(19) United States
(12) Patent Application Publication
(10) Pub. No.: US 2024/0392374 A1
(43) Pub. Date: Nov. 28, 2024

(54) DIAGNOSIS AND TREATMENT OF DISEASES AND CONDITIONS OF THE INTESTINAL TRACT

(71) Applicant: FLAGSHIP PIONEERING INNOVATIONS VI, LLC, Cambridge, MA (US)

(72) Inventors: Douglas Gowers COLE, Wayland, MA (US); Jason PARK, West Newton, MA (US); Sabrina Yusang YANG, Cambridge, MA (US); Boris HAYETE, Needham, MA (US); Andrew John GASPARRINI, Boston, MA (US)

(21) Appl. No.: 18/694,565

(22) PCT Filed: Sep. 23, 2022
(86) PCT No.: PCT/US2022/076927

§ 371 Date: Mar. 22, 2024

Related U.S. Application Data
(60) Provisional application No. 63/247,527, filed on Sep. 23, 2021.

(51) Int. Cl. C12Q 1/6883

(52) U.S. Cl. CPC C12Q 1/6883; C12Q 2600/118; C12Q 2600/158

(57) ABSTRACT

The invention relates to diagnostic and therapeutic methods for inflammatory bowel disease. Disclosed is a method of differentiating between ulcerative colitis (UC) and Crohn's disease (CD) in a subject having an inflammatory bowel disease (IBD) comprising determining a level of one or more of SEQ ID NOs: 1-590 in a sample from the subject.

### SEQUENCE LISTING

[0001] The instant application contains a Sequence Listing which has been submitted electronically in XML file format and is hereby incorporated by reference in its entirety. Said XML copy, created on Sep. 12, 2022, is named 51373-017WO1_Sequence_Listing_9_12_22.xml and is 8,441,923 bytes in size.

### FIELD OF THE INVENTION

[0002] The invention relates to diagnostic and therapeutic methods for inflammatory bowel disease.

### BACKGROUND

[0003] Mammals are colonized by microorganisms in the gastrointestinal (GI) tract, on the skin, and in other epithelial and tissue niches. The gastrointestinal tract of a healthy individual harbors an abundant and diverse microbial community. It is a complex system, providing an environment or niche for a community of many different species or organisms, including diverse strains of bacteria. Hundreds of different species may form a commensal community in the GI tract in a healthy person, and this complement of organisms evolves from the time of birth and is believed to form a functionally mature microbial population by about 3 years of age. Interactions between microbial strains in these populations and between microorganisms and the host, e.g., interactions with the host's immune system, shape the community structure, with availability of and competition for resources affecting the distribution of microorganisms.

[0004] A healthy microbiome may provide a subject with multiple benefits, including colonization resistance to a broad spectrum of pathogens, essential nutrient biosynthesis and absorption, and immune stimulation that plays a role in maintaining a healthy gut epithelium and appropriately controlled systemic immunity. Conversely, an unhealthy (e.g., dysregulated) microbiome may be associated with a disease state.

[0005] There is a need for methods for addressing problems in healthcare through assessment of the microbiome.

### SUMMARY OF THE INVENTION

[0006] In one aspect, the disclosure features a method of differentiating between a diagnosis of ulcerative colitis (UC) and Crohn's disease in a subject having an inflammatory bowel disease (IBD), the method comprising determining a level of one or more of SEQ ID NOs: 1-590 in a sample from the subject, wherein (a) a level of one or more of SEQ ID NOs: 1-590 that is changed relative to a respective reference level for SEQ ID NOs: 1-590 indicates that the subject is likely to have UC, and (b) a level of one or more of SEQ ID NOs: 1-590 that is not substantially changed relative to a respective reference level for SEQ ID NOs: 1-590 indicates that the subject is likely to have Crohn's disease.

[0007] A method for determining whether a subject having an IBD has UC or Crohn's disease, comprising the steps of (a) measuring the nucleic acid level of one or more of SEQ ID NOs: 1-590 in a sample collected from the subject using amplification and one or more pairs of primers specific for each of the one or more of SEQ ID NOs: 1-590; and (b) using the amplification results to determine whether the level of one or more of SEQ ID NOs: 1-590 is changed relative to a respective reference level for SEQ ID NOs: 1-590, wherein (i) a level of one or more of SEQ ID NOs: 1-590 that is changed relative to a respective reference level for SEQ ID NOs: 1-590 indicates that the subject is likely to have UC, and (ii) a level of one or more of SEQ ID NOs: 1-590 that is not substantially changed relative to a respective reference level for SEQ ID NOs: 1-590 indicates that the subject is likely to have Crohn's disease, thereby determining whether the subject has UC or Crohn's disease.

[0008] In some embodiments, the method comprises determining or measuring a level of at least two, at least three, at least four, at least five, at least six, at least seven, at least eight, at least nine, at least ten, at least fifteen, at least 20, at least 30, at least 40, at least 50, at least 60, at least 70, at least 80, at least 90, at least 100, at least 110, at least 120, at least 130, at least 140, at least 150, at least 160, at least 170, at least 180, at least 190, at least 200, at least 210, at least 220, at least 230, at least 240, at least 250, at least 260, at least 270, at least 280, at least 290, at least 300, at least 310, at least 320, at least 330, at least 340, at least 350, at least 360, at least 370, at least 380, at least 390, at least 400, at least 410, at least 420, at least 430, at least 440, at least 450, at least 460, at least 470, at least 480, at least 490, at least 500, at least 510, at least 520, at least 530, at least 540, at least 550, at least 560, at least 570, at least 580, or at least 585 of SEQ ID NOs: 1-590 in the sample from the subject.

[0009] In some embodiments, the method comprises determining or measuring a level of all 590 of SEQ ID NOs: 1-590 in the sample from the subject.

[0010] In some embodiments, a level of one or more of SEQ ID NOs: 1-590 is changed relative to the respective reference level for SEQ ID NO: 1-590 in the sample from the subject and the method further comprises administering a therapy appropriate for treating UC to the subject.

[0011] In some embodiments, a level of one or more of SEQ ID NOs: 1-590 is not substantially changed relative to the respective reference level for SEQ ID NO: 1-590 in the sample from the subject and the method further comprises administering a therapy appropriate for treating Crohn's disease to the subject.

[0012] In some embodiments, the method further comprises treatment by fecal microbiota transplant (FMT).

[0013] In some embodiments, the reference level is a pre-assigned level.

[0014] In some embodiments, the reference level is a level in a set of samples from a reference population. In some embodiments, the reference population is a population of subjects having Crohn's disease.

[0015] In some embodiments, the level of each of SEQ ID NOs: 1-590 that is determined or measured in the sample from the subject is a nucleic acid level. In some embodiments, the nucleic acid level is a DNA level.

[0016] In some embodiments, the change is a decrease relative to the reference level. In some embodiments, the levels of at least 10%, at least 20%, at least 30%, at least 40%, at least 50%, at least 60%, at least 70%, at least 80%, at least 90%, or more than 90% of the sequences for which a level is determined or measured are decreased relative to a respective reference level for the sequence.

[0017] In some embodiments, the change is an increase relative to the reference level. In some embodiments, the levels of at least 10%, at least 20%, at least 30%, at least 40%, at least 50%, at least 60%, at least 70%, at least 80%, at least 90%, or more than 90% of the sequences for which a level is determined or measured are increased relative to a respective reference level for the sequence.

[0018] In some embodiments, the sample comprises a sample of the microbiota of the subject.

[0019] In some embodiments, the sample is a fecal sample.

[0020] In another aspect, the disclosure features a kit for differentiating between a diagnosis of ulcerative colitis (UC) and Crohn's disease in a subject having an inflammatory bowel disease (IBD), the kit comprising: (a) polypeptides or polynucleotides capable of determining the level of one or more of SEQ ID NOs: 1-590 in a sample from the subject; and (b) instructions for use of the polypeptides or polynucleotides to determine the level of one or more of SEQ ID NOs: 1-590 in the sample from the subject, wherein (a) a level of one or more of SEQ ID NOs: 1-590 that is changed relative to a respective reference level for SEQ ID NOs: 1-590 indicates that the subject is likely to have UC, and (b) a level of one or more of SEQ ID NOs: 1-590 that is not substantially changed relative to a respective reference level for SEQ ID NOs: 1-590 indicates that the subject is likely to have Crohn's disease.

[0021] In another aspect, the disclosure features a method of differentiating between a diagnosis of ulcerative colitis (UC) and Crohn's disease in a subject having an inflammatory bowel disease (IBD), the method comprising determining a level of each of SEQ ID NOs: 1-590 in a sample from the subject, wherein (a) a level of at least 50% of SEQ ID NOs: 1-590 that is changed relative to a respective reference level for SEQ ID NOs: 1-590 indicates that the subject is likely to have UC, and (b) a level of a level of at least 50% of SEQ ID NOs: 1-590 that is not substantially changed relative to a respective reference level for SEQ ID NOs: 1-590 indicates that the subject is likely to have Crohn's disease.

[0022] In some embodiments, a level of at least 50% of SEQ ID NOs: 1-590 is changed relative to a respective reference level for SEQ ID NOs: 1-590 in the sample from the subject and the method further comprises administering an anti-UC therapy to a subject.

[0023] In some embodiments, a level of at least 50% of SEQ ID NOs: 1-590 is not substantially changed relative to a respective reference level for SEQ ID NOs: 1-590 in the sample from the subject and the method further comprises administering an anti-Crohn's disease therapy to a subject. In another aspect, the disclosure features a method of treating a subject having UC using a therapy appropriate for treating UC, wherein the subject was diagnosed as having UC by any of the methods provided herein.

[0024] In another aspect, the disclosure features a method of treating a subject having Crohn's disease using a therapy appropriate for treating Crohn's disease, wherein the subject was diagnosed as having Crohn's disease by any of the methods provided herein.

[0025] In another aspect, the disclosure features a method of treating a subject having UC using a therapy appropriate for treating UC, the method comprising the steps of (a) measuring the nucleic acid level of one or more of SEQ ID NOs: 1-590 in a sample collected from the subject using amplification and one or more pairs of primers specific for each of the one or more of SEQ ID NOs: 1-590; (b) using the amplification results to determine whether the level of one or more of SEQ ID NOs: 1-590 is changed relative to a respective reference level for SEQ ID NOs: 1-590, wherein a level of one or more of SEQ ID NOs: 1-590 that is changed relative to a respective reference level for SEQ ID NOs: 1-590 indicates that the subject is likely to have UC; and (c) treating a subject who has been determined to be likely to have UC with a therapy appropriate for treating UC.

[0026] In another aspect, the disclosure features a method of treating a subject having Crohn's disease using a therapy appropriate for treating Crohn's disease, the method comprising the steps of (a) measuring the nucleic acid level of one or more of SEQ ID NOs: 1-590 in a sample collected from the subject using amplification and one or more pairs of primers specific for each of the one or more of SEQ ID NOs: 1-590; (b) using the amplification results to determine whether the level of one or more of SEQ ID NOs: 1-590 is changed relative to a respective reference level for SEQ ID NOs: 1-590, wherein a level of one or more of SEQ ID NOs: 1-590 that is not substantially changed relative to a respective reference level for SEQ ID NOs: 1-590 indicates that the subject is likely to have Crohn's disease; and (c) treating a subject who has been determined to be likely to have Crohn's disease with a therapy appropriate for treating Crohn's disease.

[0027] In some embodiments, the nucleic acid level of the one or more of SEQ ID NOs: 1-590 in the sample collected from the subject are measured using amplification and one or more pairs of primers specific for each of the one or more of SEQ ID NOs: 1-590, and the amplification results are used to determine whether the level of one or more of SEQ ID NOs: 1-590 is changed relative to a respective reference level for SEQ ID NOs: 1-590.

[0028] In some embodiments, the method comprises measuring the nucleic acid level of at least two, at least three, at least four, at least five, at least six, at least seven, at least eight, at least nine, at least ten, at least fifteen, at least 20, at least 30, at least 40, at least 50, at least 60, at least 70, at least 80, at least 90, at least 100, at least 110, at least 120, at least 130, at least 140, at least 150, at least 160, at least 170, at least 180, at least 190, at least 200, at least 210, at least 220, at least 230, at least 240, at least 250, at least 260, at least 270, at least 280, at least 290, at least 300, at least 310, at least 320, at least 330, at least 340, at least 350, at least 360, at least 370, at least 380, at least 390, at least 400, at least 410, at least 420, at least 430, at least 440, at least 450, at least 460, at least 470, at least 480, at least 490, at least 500, at least 510, at least 520, at least 530, at least 540, at least 550, at least 560, at least 570, at least 580, or at least 585 of SEQ ID NOs: 1-590 in the sample from the subject. In some embodiments, the method comprises measuring the nucleic acid level of all 590 of SEQ ID NOs: 1-590 in the sample from the subject.

[0029] In some embodiments, the reference level is a pre-assigned level. In some embodiments, the reference level is a level in a set of samples from a reference population. In some embodiments, the reference population is a population of healthy subjects.

[0030] In some embodiments, the nucleic acid level is a DNA level.

[0031] In some embodiments, the change is a decrease relative to the reference level. In some embodiments, the levels of at least 10%, at least 20%, at least 30%, at least 40%, at least 50%, at least 60%, at least 70%, at least 80%, at least 90%, or more than 90% of the sequences for which a level is measured are decreased relative to a respective reference level for the sequence.

[0032] In some embodiments, the change is an increase relative to the reference level. In some embodiments, the levels of at least 10%, at least 20%, at least 30%, at least 40%, at least 50%, at least 60%, at least 70%, at least 80%, at least 90%, or more than 90% of the sequences for which a level is measured are increased relative to a respective reference level for the sequence.

[0033] In some embodiments, the sample comprises a sample of the microbiota of the subject. In some embodiments, the sample is a fecal sample.

[0034] In another aspect, the disclosure features a method of treating a subject having UC, the method comprising the steps of (a) measuring the nucleic acid level of each of SEQ ID NOs: 1-590 in a sample collected from the subject, wherein a level of at least 50% of SEQ ID NOs: 1-590 that is changed relative to a respective reference level for SEQ ID NOs: 1-590 indicates that the subject is likely to have UC, thereby determining an increased risk of UC for the subject; and (b) treating a subject who has been determined to have an increased risk of UC with a therapy appropriate for treating UC.

[0035] In another aspect, the disclosure features a method of treating a subject having Crohn's disease, the method comprising the steps of (a) measuring the nucleic acid level of each of SEQ ID NOs: 1-590 in a sample collected from the subject, wherein a level of at least 50% of SEQ ID NOs: 1-590 that is not substantially changed relative to a respective reference level for SEQ ID NOs: 1-590 indicates that the subject is likely to have Crohn's disease, thereby determining an increased risk of Crohn's disease for the subject; and (b) treating a subject who has been determined to have an increased risk of Crohn's disease with a therapy appropriate for treating Crohn's disease.

[0036] In some embodiments, the nucleic acid levels of each of SEQ ID NOs: 1-590 in the sample collected from the subject are measured using amplification and one or more pairs of primers specific for each of SEQ ID NOs: 1-590, and the amplification results are used to determine whether the level of each of SEQ ID NOs: 1-590 is changed relative to a respective reference level for SEQ ID NOs: 1-590.

### BRIEF DESCRIPTION OF THE DRAWINGS

[0037] FIG. 1 is a graph showing the out-of-cohort performance (as percent specificity and sensitivity) of metagenomic markers for distinguishing individual having ulcerative colitis (UC) from individuals having Crohn's disease. AUC=area under curve.

[0038] FIG. 2 is a heat map showing the level (scaled reads per kilobase of transcript per million mapped reads (RPKM)) of all significant metagenomic markers in patients having UC or Crohn's disease (CD).

[0039] FIG. 3 is a heat map showing the level (scaled reads per kilobase of transcript per million mapped reads (RPKM)) of all significant metagenomic markers in patients having UC or CD.

### DETAILED DESCRIPTION OF THE INVENTION

### Definitions

[0040] The term “changed,” as used herein, refers to an observable difference in the level of a marker in a subject (e.g., in a sample from the subject), as determined using techniques and methods known in the art for the measurement of the marker. A marker level that is changed in a subject may result in a difference of at least 1% (e.g., at least 5%, 10%, 15%, 20%, 25%, 30%, 35%, 40%, 45%, 50%, 55%, 60%, 65%, 70%, 75%, 80%, 85%, 90%, 95%, or 100%, or at least 2.5-fold, 3-fold, 4-fold, 5-fold, 6-fold, 7-fold, 8-fold, 9-fold, 10-fold, 15-fold, 20-fold, 25-fold, 50-fold, 75-fold, 100-fold, or more than 100-fold) more or less than a reference level (e.g., a level from a healthy subject or a level prior to treatment) (e.g., up to 100% or up to 100-fold relative to the reference level). In some embodiments, the change is an increase in the level of a marker in a subject. Increasing the marker level in a subject may result in an increase of at least 1% (e.g., at least 5%, 10%, 15%, 20%, 25%, 30%, 35%, 40%, 45%, 50%, 55%, 60%, 65%, 70%, 75%, 80%, 85%, 90%, 95%, 98%, 99%, or 100%, or at least 2.5-fold, 3-fold, 4-fold, 5-fold, 6-fold, 7-fold, 8-fold, 9-fold, 10-fold, 15-fold, 20-fold, 25-fold, 50-fold, 75-fold, 100-fold, or more than 100-fold) relative to the reference level (e.g., up to 100% or up to 100-fold relative to the reference level). In other embodiments, the change is a decrease the level of a marker in a subject. Decreasing the marker level in a subject may result in a decrease of at least 1% (e.g., at least 5%, 10%, 15%, 20%, 25%, 30%, 35%, 40%, 45%, 50%, 55%, 60%, 65%, 70%, 75%, 80%, 85%, 90%, 95%, or 100%, or at least 2.5-fold, 3-fold, 4-fold, 5-fold, 6-fold, 7-fold, 8-fold, 9-fold, 10-fold, 15-fold, 20-fold, 25-fold, 50-fold, 75-fold, 100-fold, or more than 100-fold) relative to the reference level (e.g., up to 100% or up to 100-fold relative to the reference level).

[0041] In some embodiments, the change in the level of a portion of the markers analyzed is an increase, while the change in the level of another portion of the markers analyzed is a decrease. In some embodiments, the change in at least 10%, 20%, 30%, 40%, 50%, 60%, 70%, 80%, 90%, 95%, or more (e.g., 100%) of the markers analyzed is an increase relative to a reference level. In some embodiments, the change in at least 10%, 20%, 30%, 40%, 50%, 60%, 70%, 80%, 90%, 95%, or more (e.g., 100%) of the markers analyzed is a decrease relative to a reference level.

[0042] The term “pharmaceutical composition.” as used herein, represents a composition formulated with a pharmaceutically acceptable excipient. For example, a “pharmaceutical composition” can be a composition that is manufactured or sold with the approval of a governmental regulatory agency as part of a therapeutic regimen for the treatment of a disease, disorder, or condition in a mammal, intended for such use, or in development for such use. In some examples, the pharmaceutical composition is a pre-approved composition.

[0043] The term “subject,” as used herein, represents a human or non-human animal (e.g., a mammal).

[0044] “Treatment” and “treating,” as used herein, refer to the medical management of a subject with the intent to improve, ameliorate, stabilize, prevent, or cure a disease, disorder, or condition. This term includes active treatment (treatment directed to improve the disease, disorder, or condition); causal treatment (treatment directed to the cause of the associated disease, disorder, or condition); palliative treatment (treatment designed for the relief of symptoms of the disease, disorder, or condition); preventative treatment (treatment directed to minimizing or partially or completely inhibiting the development of the associated disease, disorder, or condition); and supportive treatment (treatment employed to supplement another therapy).

[0045] The term “inflammatory bowel disease” or “IBD,” as used herein, refers to a condition of the bowel, e.g., the small intestine, large intestine, mouth, esophagus, stomach, rectum, and/or anus, that is characterized by inflammation. Examples of IBD include ulcerative colitis (UC) and Crohn's disease. Other examples include microscopic colitis (e.g., collagenous colitis or lyphocytic colitis), diversion colitis, Behçet's disease, or indeterminate colitis.

### I. METHODS FOR DIFFERENIATING BETWEEN DIAGNOSES OF ULCERATIVE COLITIS AND CROHN'S DISEASE

[0046] The invention is based, in part, on the discovery that levels of gut microbiome biomarkers (i.e., markers of bacterial origin), which may be referred to as co-evolved molecules, can be used to distinguish between patients having ulcerative colitis (UC) and Crohn's disease. Accordingly, the disclosure provides methods of diagnosing, treating, and monitoring subjects (e.g., human patients) based on this discovery.

### Diagnostic Methods and Methods of Treatment

[0047] In some aspects, the disclosure features methods of differentiating between a diagnosis of ulcerative colitis (UC) and Crohn's disease in a subject having an inflammatory bowel disease (IBD), the method comprising determining a level of one or more of SEQ ID NOs: 1-590 in a sample from the subject, wherein (a) a level of one or more of SEQ ID NOs: 1-590 that is changed relative to a respective reference level for SEQ ID NOs: 1-590 indicates that the subject is likely to have UC, and (b) a level of one or more of SEQ ID NOs: 1-590 that is not substantially changed relative to a respective reference level for SEQ ID NOs: 1-590 indicates that the subject is likely to have Crohn's disease. SEQ ID NOs: 1-590 are bacterial sequences.

[0048] In some aspects, the disclosure features a method for determining whether a subject having an IBD has UC or Crohn's disease, comprising the steps of: (a) measuring the nucleic acid level of one or more of SEQ ID NOs: 1-590 in a sample collected from the subject using amplification and one or more pairs of primers specific for each of the one or more of SEQ ID NOs: 1-590; and (b) using the amplification results to determine whether the level of one or more of SEQ ID NOs: 1-590 is changed relative to a respective reference level for SEQ ID NOs: 1-590, wherein (i) a level of one or more of SEQ ID NOs: 1-590 that is changed relative to a respective reference level for SEQ ID NOs: 1-590 indicates that the subject is likely to have UC, and (ii) a level of one or more of SEQ ID NOs: 1-590 that is not substantially changed relative to a respective reference level for SEQ ID NOs: 1-590 indicates that the subject is likely to have Crohn's disease, thereby determining whether the subject has UC or Crohn's disease.

[0049] In some aspects, the disclosure features a method of treating a subject having UC using a therapy appropriate for treating UC, wherein the subject was diagnosed as having UC by any of the methods provided herein.

[0050] In some aspects, the disclosure features a method of treating a subject having Crohn's disease using a therapy appropriate for treating Crohn's disease, wherein the subject was diagnosed as having Crohn's disease by any of the methods provided herein.

[0051] In some aspects, the disclosure features a method of treating a subject having UC using a therapy appropriate for treating UC, the method comprising the steps of (a) measuring the nucleic acid level of one or more of SEQ ID NOs: 1-590 in a sample collected from the subject using amplification and one or more pairs of primers specific for each of the one or more of SEQ ID NOs: 1-590; (b) using the amplification results to determine whether the level of one or more of SEQ ID NOs: 1-590 is changed relative to a respective reference level for SEQ ID NOs: 1-590, wherein a level of one or more of SEQ ID NOs: 1-590 that is changed relative to a respective reference level for SEQ ID NOs: 1-590 indicates that the subject is likely to have UC; and (c) treating a subject who has been determined to be likely to have UC with a therapy appropriate for treating UC.

[0052] In some aspects, the disclosure features a method of treating a subject having Crohn's disease using a therapy appropriate for treating Crohn's disease, the method comprising the steps of (a) measuring the nucleic acid level of one or more of SEQ ID NOs: 1-590 in a sample collected from the subject using amplification and one or more pairs of primers specific for each of the one or more of SEQ ID NOs: 1-590; (b) using the amplification results to determine whether the level of one or more of SEQ ID NOs: 1-590 is changed relative to a respective reference level for SEQ ID NOs: 1-590, wherein a level of one or more of SEQ ID NOs: 1-590 that is not substantially changed relative to a respective reference level for SEQ ID NOs: 1-590 indicates that the subject is likely to have Crohn's disease; and (c) treating a subject who has been determined to be likely to have Crohn's disease with a therapy appropriate for treating Crohn's disease.

[0053] In some aspects, the disclosure features a method of treating a subject having UC, the method comprising the steps of (a) measuring the nucleic acid level of each of SEQ ID NOs: 1-590 in a sample collected from the subject, wherein a level of at least 50% of SEQ ID NOs: 1-590 that is changed relative to a respective reference level for SEQ ID NOs: 1-590 indicates that the subject is likely to have UC, thereby determining an increased risk of UC for the subject; and (b) treating a subject who has been determined to have an increased risk of UC with a therapy appropriate for treating UC.

[0054] In some aspects, the disclosure features a method of treating a subject having Crohn's disease, the method comprising the steps of (a) measuring the nucleic acid level of each of SEQ ID NOs: 1-590 in a sample collected from the subject, wherein a level of at least 50% of SEQ ID NOs: 1-590 that is not substantially changed relative to a respective reference level for SEQ ID NOs: 1-590 indicates that the subject is likely to have Crohn's disease, thereby determining an increased risk of Crohn's disease for the subject; and (b) treating a subject who has been determined to have an increased risk of Crohn's disease with a therapy appropriate for treating Crohn's disease.

[0055] In some embodiments, the sample comprises a sample of the microbiota (e.g., the gut microbiota) of the subject. In some embodiments, the sample is a fecal sample. In some embodiments, the sample is a colon or rectal biopsy.

[0056] In some embodiments, the method comprises determining or measuring a level of at least 2, at least 3, at least 4, at least 5, at least 6, at least 7, at least 8, at least 9, at least 10, at least 15, at least 20, at least 25, at least 30, at least 35, at least 40, at least 45, at least 50, at least 55, at least 60, at least 65, at least 70, at least 75, at least 80, at least 85, at least 90, at least 95, at least 100, at least 105, at least 110, at least 115, at least 120, at least 125, at least 130, at least 135, at least 140, at least 145, at least 150, at least 155, at least 160, at least 165, at least 170, at least 175, at least 180, at least 185, at least 190, at least 195, at least 200, at least 205, at least 210, at least 215, at least 220, at least 225, at least 230, at least 235, at least 240, at least 245, at least 250, at least 255, at least 260, at least 265, at least 270, at least 275, at least 280, at least 285, at least 290, at least 295, at least 300, at least 305, at least 310, at least 315, at least 320, at least 325, at least 330, at least 335, at least 340, at least 345, at least 350, at least 355, at least 360, at least 365, at least 370, at least 375, at least 380, at least 385, at least 390, at least 395, at least 400, at least 405, at least 410, at least 415, at least 420, at least 425, at least 430, at least 435, at least 440, at least 445, at least 450, at least 455, at least 460, at least 465, at least 470, at least 475, at least 480, at least 485, at least 490, at least 495, at least 500, at least 505, at least 510, at least 515, at least 520, at least 525, at least 530, at least 535, at least 540, at least 545, at least 550, at least 555, at least 560, at least 565, at least 570, at least 575, at least 580, or at least 585 of SEQ ID NOs: 1-590 in a sample from the subject, e.g., comprises determining or measuring a level of 1-5, 5-10, 10-15, 15-20, 20-25, 25-30, 30-35, 35-40, 40-45, 45-50, 50-55, 55-60, 60-65, 65-70, 70-75, 75-80, 80-85, 85-90, 90-95, 95-100, 100-105, 105-110, 110-115, 115-120, 120-125, 125-130, 130-135, 135-140, 140-145, 145-150, 150-155, 155-160, 160-165, 165-170, 170-175, 175-180, 180-185, 185-190, 190-195, 195-200, 200-205, 205-210, 210-215, 215-220, 220-225, 225-230, 230-235, 235-240, 240-245, 245-250, 250-255, 255-260, 260-265, 265-270, 270-275, 275-280, 280-285, 285-290, 290-295, 295-300, 300-305, 305-310, 310-315, 315-320, 320-325, 325-330, 330-335, 335-340, 340-345, 345-350, 350-355, 355-360, 360-365, 365-370, 370-375, 375-380, 380-385, 385-390, 390-395, 395-400, 400-405, 405-410, 410-415, 415-420, 420-425, 425-430, 430-435, 435-440, 440-445, 445-450, 450-455, 455-460, 460-465, 465-470, 470-475, 475-480, 480-485, 485-490, 490-495, 495-500, 500-505, 505-510, 510-515, 515-520, 520-525, 525-530, 530-535, 535-540, 540-545, 545-550, 550-555, 560-565, 565-570, 570-575, 575-580, 580-585, or 585-590 of SEQ ID NOs: 1-590 in the sample from the subject. In some embodiments, the method comprises determining or measuring a level of all 590 of SEQ ID NOs: 1-590 in a sample from the subject.

[0057] In some embodiments, a change in the level of at least 2, at least 3, at least 4, at least 5, at least 6, at least 7, at least 8, at least 9, at least 10, at least 15, at least 20, at least 25, at least 30, at least 35, at least 40, at least 45, at least 50, at least 55, at least 60, at least 65, at least 70, at least 75, at least 80, at least 85, at least 90, at least 95, at least 100, at least 105, at least 110, at least 115, at least 120, at least 125, at least 130, at least 135, at least 140, at least 145, at least 150, at least 155, at least 160, at least 165, at least 170, at least 175, at least 180, at least 185, at least 190, at least 195, at least 200, at least 205, at least 210, at least 215, at least 220, at least 225, at least 230, at least 235, at least 240, at least 245, at least 250, at least 255, at least 260, at least 265, at least 270, at least 275, at least 280, at least 285, at least 290, at least 295, at least 300, at least 305, at least 310, at least 315, at least 320, at least 325, at least 330, at least 335, at least 340, at least 345, at least 350, at least 355, at least 360, at least 365, at least 370, at least 375, at least 380, at least 385, at least 390, at least 395, at least 400, at least 405, at least 410, at least 415, at least 420, at least 425, at least 430, at least 435, at least 440, at least 445, at least 450, at least 455, at least 460, at least 465, at least 470, at least 475, at least 480, at least 485, at least 490, at least 495, at least 500, at least 505, at least 510, at least 515, at least 520, at least 525, at least 530, at least 535, at least 540, at least 545, at least 550, at least 555, at least 560, at least 565, at least 570, at least 575, at least 580, or at least 585 of SEQ ID NOs: 1-590 in a sample from the subject, e.g., a change in the level of 1-5, 5-10, 10-15, 15-20, 20-25, 25-30, 30-35, 35-40, 40-45, 45-50, 50-55, 55-60, 60-65, 65-70, 70-75, 75-80, 80-85, 85-90, 90-95, 95-100, 100-105, 105-110, 110-115, 115-120, 120-125, 125-130, 130-135, 135-140, 140-145, 145-150, 150-155, 155-160, 160-165, 165-170, 170-175, 175-180, 180-185, 185-190, 190-195, 195-200, 200-205, 205-210, 210-215, 215-220, 220-225, 225-230, 230-235, 235-240, 240-245, 245-250, 250-255, 255-260, 260-265, 265-270, 270-275, 275-280, 280-285, 285-290, 290-295, 295-300, 300-305, 305-310, 310-315, 315-320, 320-325, 325-330, 330-335, 335-340, 340-345, 345-350, 350-355, 355-360, 360-365, 365-370, 370-375, 375-380, 380-385, 385-390, 390-395, 395-400, 400-405, 405-410, 410-415, 415-420, 420-425, 425-430, 430-435, 435-440, 440-445, 445-450, 450-455, 455-460, 460-465, 465-470, 470-475, 475-480, 480-485, 485-490, 490-495, 495-500, 500-505, 505-510, 510-515, 515-520, 520-525, 525-530, 530-535, 535-540, 540-545, 545-550, 550-555, 560-565, 565-570, 570-575, 575-580, 580-585, or 585-590 of SEQ ID NOs: 1-590 in the sample from the subject relative to a respective reference level for SEQ ID NOs: 1-590 indicates that the subject is likely to have UC. In some embodiments, a change in the level of all 590 of SEQ ID NOs: 1-590 relative to a respective reference level for SEQ ID NOs: 1-590 indicates that the subject is likely to have UC.

[0058] In some embodiments, a change in the level of at least 5%, at least 10%, at least 15%, at least 20%, at least 25%, at least 30%, at least 35%, at least 40%, at least 45%, at least 50%, at least 55%, at least 60%, at least 65%, at least 70%, at least 75%, at least 80%, at least 85%, at least 95%, at least 98%, at least 99%, or 100% of the total number of SEQ ID NOs: 1-590 measured in a sample from the subject relative to a respective reference level for SEQ ID NOs: 1-590 indicates that the subject is likely to have UC.

[0059] In some embodiments, a threshold number of one or more of SEQ ID NOs: 1-590 is changed relative to the respective reference level for SEQ ID NO: 1-590 in the sample from the subject (e.g., a number of SEQ ID NOs: 1-590 that has been determined to indicate that the patient is likely to have UC, e.g., a level of at least 1, at least 2, at least 3, at least 4, at least 5, at least 6, at least 7, at least 8, at least 9, at least 10, at least 15, at least 20, at least 25, at least 30, at least 35, at least 40, at least 45, at least 50, at least 55, at least 60, at least 65, at least 70, at least 75, at least 80, at least 85, at least 90, at least 95, at least 100, at least 105, at least 110, at least 115, at least 120, at least 125, at least 130, at least 135, at least 140, at least 145, at least 150, at least 155, at least 160, at least 165, at least 170, at least 175, at least 180, at least 185, at least 190, at least 195, at least 200, at least 205, at least 210, at least 215, at least 220, at least 225, at least 230, at least 235, at least 240, at least 245, at least 250, at least 255, at least 260, at least 265, at least 270, at least 275, at least 280, at least 285, at least 290, at least 295, at least 300, at least 305, at least 310, at least 315, at least 320, at least 325, at least 330, at least 335, at least 340, at least 345, at least 350, at least 355, at least 360, at least 365, at least 370, at least 375, at least 380, at least 385, at least 390, at least 395, at least 400, at least 405, at least 410, at least 415, at least 420, at least 425, at least 430, at least 435, at least 440, at least 445, at least 450, at least 455, at least 460, at least 465, at least 470, at least 475, at least 480, at least 485, at least 490, at least 495, at least 500, at least 505, at least 510, at least 515, at least 520, at least 525, at least 530, at least 535, at least 540, at least 545, at least 550, at least 555, at least 560, at least 565, at least 570, at least 575, at least 580, or at least 585 of SEQ ID NOs: 1-590 in a sample from the subject (e.g., a level of 1-5, 5-10, 10-15, 15-20, 20-25, 25-30, 30-35, 35-40, 40-45, 45-50, 50-55, 55-60, 60-65, 65-70, 70-75, 75-80, 80-85, 85-90, 90-95, 95-100, 100-105, 105-110, 110-115, 115-120, 120-125, 125-130, 130-135, 135-140, 140-145, 145-150, 150-155, 155-160, 160-165, 165-170, 170-175, 175-180, 180-185, 185-190, 190-195, 195-200, 200-205, 205-210, 210-215, 215-220, 220-225, 225-230, 230-235, 235-240, 240-245, 245-250, 250-255, 255-260, 260-265, 265-270, 270-275, 275-280, 280-285, 285-290, 290-295, 295-300, 300-305, 305-310, 310-315, 315-320, 320-325, 325-330, 330-335, 335-340, 340-345, 345-350, 350-355, 355-360, 360-365, 365-370, 370-375, 375-380, 380-385, 385-390, 390-395, 395-400, 400-405, 405-410, 410-415, 415-420, 420-425, 425-430, 430-435, 435-440, 440-445, 445-450, 450-455, 455-460, 460-465, 465-470, 470-475, 475-480, 480-485, 485-490, 490-495, 495-500, 500-505, 505-510, 510-515, 515-520, 520-525, 525-530, 530-535, 535-540, 540-545, 545-550, 550-555, 560-565, 565-570, 570-575, 575-580, 580-585, or 585-590)) of SEQ ID NOs: 1-590 is changed relative to the respective reference level for SEQ ID NO: 1-590 in the sample from the subject and the method further comprises administering a therapy appropriate for treating UC to a subject.

[0060] The anti-UC therapy may be any medicament, treatment, or combination thereof suitable for the treatment of UC. For example, the therapy may include an anti-inflammatory drug (e.g., a corticosteroid or oral 5-aminosalicylate (e.g., sulfasalazine or mesalamine)), an immune system suppressor (e.g., azathioprine, mercaptopurine, or methotrexate), a steroid, an analgesic, a biologic (e.g., natalizumab, vedolizumab, infliximab, adalimumab, certolizumab pegol, or ustekinumab), an antibiotic (e.g., ciprofloxacin or metronidazole), and/or surgery (also see the list provided below). Any one or more of these therapies may optionally be used in any of the methods described herein as employing a therapy that is appropriate for treating UC.

[0061] In some aspects, the anti-UC therapy further comprises treatment by fecal microbiota transplant (FMT).

[0062] In some embodiments, a level of at least 2, at least 3, at least 4, at least 5, at least 6, at least 7, at least 8, at least 9, at least 10, at least 15, at least 20, at least 25, at least 30, at least 35, at least 40, at least 45, at least 50, at least 55, at least 60, at least 65, at least 70, at least 75, at least 80, at least 85, at least 90, at least 95, at least 100, at least 105, at least 110, at least 115, at least 120, at least 125, at least 130, at least 135, at least 140, at least 145, at least 150, at least 155, at least 160, at least 165, at least 170, at least 175, at least 180, at least 185, at least 190, at least 195, at least 200, at least 205, at least 210, at least 215, at least 220, at least 225, at least 230, at least 235, at least 240, at least 245, at least 250, at least 255, at least 260, at least 265, at least 270, at least 275, at least 280, at least 285, at least 290, at least 295, at least 300, at least 305, at least 310, at least 315, at least 320, at least 325, at least 330, at least 335, at least 340, at least 345, at least 350, at least 355, at least 360, at least 365, at least 370, at least 375, at least 380, at least 385, at least 390, at least 395, at least 400, at least 405, at least 410, at least 415, at least 420, at least 425, at least 430, at least 435, at least 440, at least 445, at least 450, at least 455, at least 460, at least 465, at least 470, at least 475, at least 480, at least 485, at least 490, at least 495, at least 500, at least 505, at least 510, at least 515, at least 520, at least 525, at least 530, at least 535, at least 540, at least 545, at least 550, at least 555, at least 560, at least 565, at least 570, at least 575, at least 580, or at least 585 of SEQ ID NOs: 1-590 in a sample from the subject, e.g., a change in the level of 1-5, 5-10, 10-15, 15-20, 20-25, 25-30, 30-35, 35-40, 40-45, 45-50, 50-55, 55-60, 60-65, 65-70, 70-75, 75-80, 80-85, 85-90, 90-95, 95-100, 100-105, 105-110, 110-115, 115-120, 120-125, 125-130, 130-135, 135-140, 140-145, 145-150, 150-155, 155-160, 160-165, 165-170, 170-175, 175-180, 180-185, 185-190, 190-195, 195-200, 200-205, 205-210, 210-215, 215-220, 220-225, 225-230, 230-235, 235-240, 240-245, 245-250, 250-255, 255-260, 260-265, 265-270, 270-275, 275-280, 280-285, 285-290, 290-295, 295-300, 300-305, 305-310, 310-315, 315-320, 320-325, 325-330, 330-335, 335-340, 340-345, 345-350, 350-355, 355-360, 360-365, 365-370, 370-375, 375-380, 380-385, 385-390, 390-395, 395-400, 400-405, 405-410, 410-415, 415-420, 420-425, 425-430, 430-435, 435-440, 440-445, 445-450, 450-455, 455-460, 460-465, 465-470, 470-475, 475-480, 480-485, 485-490, 490-495, 495-500, 500-505, 505-510, 510-515, 515-520, 520-525, 525-530, 530-535, 535-540, 540-545, 545-550, 550-555, 560-565, 565-570, 570-575, 575-580, 580-585, or 585-590 of SEQ ID NOs: 1-590 in the sample from the subject that is not substantially changed relative to a respective reference level for SEQ ID NOs: 1-590 indicates that the subject is likely to have Crohn's disease. In some embodiments, a level of all 590 of SEQ ID NOs: 1-590 that is not substantially changed relative to a respective reference level for SEQ ID NOs: 1-590 indicates that the subject is likely to have Crohn's disease.

[0063] In some embodiments, a level of at least 5%, at least 10%, at least 15%, at least 20%, at least 25%, at least 30%, at least 35%, at least 40%, at least 45%, at least 50%, at least 55%, at least 60%, at least 65%, at least 70%, at least 75%, at least 80%, at least 85%, at least 95%, at least 98%, at least 99%, or 100% of the total number of SEQ ID NOs: 1-590 measured in a sample from the subject that is not substantially changed relative to a respective reference level for SEQ ID NOs: 1-590 indicates that the subject is likely to have Crohn's disease.

[0064] In some embodiments, a threshold number of one or more of SEQ ID NOs: 1-590 is not substantially changed relative to the respective reference level for SEQ ID NO: 1-590 in the sample from the subject (e.g., a number of SEQ ID NOs: 1-590 that has been determined to indicate that the patient is likely to have Crohn's disease, e.g., a level of at least 1, at least 2, at least 3, at least 4, at least 5, at least 6, at least 7, at least 8, at least 9, at least 10, at least 15, at least 20, at least 25, at least 30, at least 35, at least 40, at least 45, at least 50, at least 55, at least 60, at least 65, at least 70, at least 75, at least 80, at least 85, at least 90, at least 95, at least 100, at least 105, at least 110, at least 115, at least 120, at least 125, at least 130, at least 135, at least 140, at least 145, at least 150, at least 155, at least 160, at least 165, at least 170, at least 175, at least 180, at least 185, at least 190, at least 195, at least 200, at least 205, at least 210, at least 215, at least 220, at least 225, at least 230, at least 235, at least 240, at least 245, at least 250, at least 255, at least 260, at least 265, at least 270, at least 275, at least 280, at least 285, at least 290, at least 295, at least 300, at least 305, at least 310, at least 315, at least 320, at least 325, at least 330, at least 335, at least 340, at least 345, at least 350, at least 355, at least 360, at least 365, at least 370, at least 375, at least 380, at least 385, at least 390, at least 395, at least 400, at least 405, at least 410, at least 415, at least 420, at least 425, at least 430, at least 435, at least 440, at least 445, at least 450, at least 455, at least 460, at least 465, at least 470, at least 475, at least 480, at least 485, at least 490, at least 495, at least 500, at least 505, at least 510, at least 515, at least 520, at least 525, at least 530, at least 535, at least 540, at least 545, at least 550, at least 555, at least 560, at least 565, at least 570, at least 575, at least 580, or at least 585 of SEQ ID NOs: 1-590 in a sample from the subject (e.g., a level of 1-5, 5-10, 10-15, 15-20, 20-25, 25-30, 30-35, 35-40, 40-45, 45-50, 50-55, 55-60, 60-65, 65-70, 70-75, 75-80, 80-85, 85-90, 90-95, 95-100, 100-105, 105-110, 110-115, 115-120, 120-125, 125-130, 130-135, 135-140, 140-145, 145-150, 150-155, 155-160, 160-165, 165-170, 170-175, 175-180, 180-185, 185-190, 190-195, 195-200, 200-205, 205-210, 210-215, 215-220, 220-225, 225-230, 230-235, 235-240, 240-245, 245-250, 250-255, 255-260, 260-265, 265-270, 270-275, 275-280, 280-285, 285-290, 290-295, 295-300, 300-305, 305-310, 310-315, 315-320, 320-325, 325-330, 330-335, 335-340, 340-345, 345-350, 350-355, 355-360, 360-365, 365-370, 370-375, 375-380, 380-385, 385-390, 390-395, 395-400, 400-405, 405-410, 410-415, 415-420, 420-425, 425-430, 430-435, 435-440, 440-445, 445-450, 450-455, 455-460, 460-465, 465-470, 470-475, 475-480, 480-485, 485-490, 490-495, 495-500, 500-505, 505-510, 510-515, 515-520, 520-525, 525-530, 530-535, 535-540, 540-545, 545-550, 550-555, 560-565, 565-570, 570-575, 575-580, 580-585, or 585-590)) of SEQ ID NOs: 1-590 is not substantially changed relative to the respective reference level for SEQ ID NO: 1-590 in the sample from the subject and the method further comprises administering a therapy appropriate for treating Crohn's disease to a subject.

[0065] The anti-Crohn's disease therapy may be any medicament, treatment, or combination thereof suitable for the treatment of Crohn's disease. For example, the therapy may include an anti-inflammatory drug (e.g., a nonsteroidal anti-inflammatory drug), an immune system suppressor, a steroid, an analgesic, an antibiotic, and/or surgery. In some aspects, the anti-Crohn's disease therapy further comprises treatment by fecal microbiota transplant (FMT). Any one or more of these types of therapies may optionally be used in any of the methods described herein as employing a therapy appropriate for treating Crohn's disease.

[0066] Further agents that may be used for the treatment of an IBD (e.g., UC or Crohn's disease) include a biologic therapy (e.g., vedolizumab (ENTYVIO®), infliximab (REMICADE®), adalimumab (HUMIRA®), golimumab (SIMPONI®), certolizumab (CIMZIA®), risankizumab (SKYRIZI®), or ustekinumab (STELARA®)); an anti-inflammatory agent (e.g., a corticosteroid or an aminosalicylate, such as mesalamine (e.g., DELZICOL®, ROWASA®, others), balsalazide (COLAZAL®), or olsalazine (DIPENTUM®)); an antibiotic, e.g., ciprofloxacin (cipro) or metronidazole (Flagyl); and an immune system suppressor (e.g., azathioprine (AZASAN®, IMURAN®), mercaptopurine (PURINETHOL®, PURIXAN®), methotrexate (TREXALL®), tofacitinib (XELJANZ®), upadacitinib (RINVOQ®), or ozanimod (ZEPOSIA®)). Any one or more of these therapies may optionally be used in any of the methods described herein as employing a therapy appropriate for treating UC or Crohn's disease.

[0067] In some embodiments, the respective reference level for SEQ ID NOs: 1-590 is a pre-assigned level of one of SEQ ID NOs: 1-590.

[0068] In some embodiments, the respective reference level for SEQ ID NOs: 1-590 is a level in a set of samples from a reference population. In some aspects, the reference population is a population of subjects having Crohn's disease. In other aspects, the reference population is a population of healthy subjects (e.g., a population of subjects not having an IBD (e.g., not having UC and/or not having Crohn's disease) and/or a population of subjects having a healthy gut microbiome). In some embodiments, the subjects of the reference population are human subjects.

[0069] In some embodiments, the level of each of SEQ ID NOs: 1-590 that is determined or measured in a sample from the subject is a nucleic acid level, e.g., a DNA level or an RNA level. In some embodiments, the nucleic acid level is a DNA level, which may be detected, e.g., using a PCR-based method. In other embodiments, detection of a level of one or more of SEQ ID NOs: 1-590 can optionally comprise, for example, detection of RNA levels, which can be achieved by, e.g., RT-PCR, RNA-Seq, and/or methods including the use of microarrays, as are known in the art. In other embodiments, the methods can focus on the detection of protein levels, which can be carried out using standard approaches (e.g., immunoassay-based approaches).

[0070] In some embodiments, the change in a level of one or more of SEQ ID NOs: 1-590 in the sample from the subject is a decrease relative to the respective reference level for SEQ ID NOs: 1-590 (e.g., a decrease of at least 1%, 2%, 3%, 4%, 5%, 6%, 7%, 8%, 9%, 10%, 11%, 12%, 13%, 14%, 15%, 16%, 17%, 18%, 19%, 20%, 21%, 22%, 23%, 24%, 25%, 26%, 27%, 28%, 29%, 30%, 31%, 32%, 33%, 34%, 35%, 36%, 37%, 38%, 39%, 40%, 41%, 42%, 43%, 44%, 45%, 46%, 47%, 48%, 49%, 50%, 51%, 52%, 53%, 54%, 55%, 56%, 57%, 58%, 59%, 60%, 61%, 62%, 63%, 64%, 65%, 66%, 67%, 68%, 69%, 70%, 71%, 72%, 73%, 74%, 75%, 76%, 77%, 78%, 79%, 80%, 81%, 82%, 83%, 84%, 85%, 86%, 87%, 88%, 89%, 90%, 91%, 92%, 93%, 94%, 95%, 96%, 97%, 98%, 99%, or 100%, e.g., a decrease of, e.g., at least 2.5-fold, 3-fold, 4-fold, 5-fold, 6-fold, 7-fold, 8-fold, 9-fold, 10-fold, 15-fold, 20-fold, 25-fold, 50-fold, 75-fold, 100-fold, or more than 100-fold) relative to the respective reference level for SEQ ID NOs: 1-590; or a decrease of 1-5%, 5-10%, 10-15%, 15-20%, 20-25%, 25-30%, 30-35%, 35-40%, 40-45%, 45-50%, 50-55%, 55-60%, 60-65%, 65-70%, 70-75%, 75-80%, 0-85%, 85-90%, 90-95%, or 95-100% relative to the respective reference level for SEQ ID NOs: 1-590).

[0071] In some aspects, the levels of at least 5%, at least 10%, at least 15%, at least 20%, at least 25%, at least 30%, at least 35%, at least 40%, at least 45%, at least 50%, at least 55%, at least 60%, at least 65%, at least 70%, at least 75%, at least 80%, at least 85%, at least 90%, at least 95%, at least 99%, or more than 99% of the sequences for which a level is determined or measured in the sample from the subject (i.e., one or more of SEQ ID NOs: 1-590) are decreased relative to a respective reference level for the sequence, e.g., 5-10%, 10-15%, 15-20%, 20-25%, 25-30%, 30-35%, 35-40%, 40-45%, 45-50%, 50-55%, 55-60%, 60-65%, 65-70%, 70-75%, 75-80%, 0-85%, 85-90%, 90-95%, or 95-100% of the sequences for which a level is determined or measured are decreased relative to a respective reference level for the sequence.

[0072] In some embodiments, the change in a level of one or more of SEQ ID NOs: 1-590 in the sample from the subject is an increase relative to the respective reference level for SEQ ID NOs: 1-590 (e.g., an increase of at least 1%, 2%, 3%, 4%, 5%, 6%, 7%, 8%, 9%, 10%, 11%, 12%, 13%, 14%, 15%, 16%, 17%, 18%, 19%, 20%, 21%, 22%, 23%, 24%, 25%, 26%, 27%, 28%, 29%, 30%, 31%, 32%, 33%, 34%, 35%, 36%, 37%, 38%, 39%, 40%, 41%, 42%, 43%, 44%, 45%, 46%, 47%, 48%, 49%, 50%, 51%, 52%, 53%, 54%, 55%, 56%, 57%, 58%, 59%, 60%, 61%, 62%, 63%, 64%, 65%, 66%, 67%, 68%, 69%, 70%, 71%, 72%, 73%, 74%, 75%, 76%, 77%, 78%, 79%, 80%, 81%, 82%, 83%, 84%, 85%, 86%, 87%, 88%, 89%, 90%, 91%, 92%, 93%, 94%, 95%, 96%, 97%, 98%, 99%, 100%, or more than 100%, e.g., an increase of, e.g., 2.5-fold, 3-fold, 4-fold, 5-fold, 6-fold, 7-fold, 8-fold, 9-fold, 10-fold, 15-fold, 20-fold, 25-fold, 50-fold, 75-fold, 100-fold, or more than 100-fold, relative to the respective level for SEQ ID NOs: 1-590; or an increase of 1-5%, 5-10%, 10-15%, 15-20%, 20-25%, 25-30%, 30-35%, 35-40%, 40-45%, 45-50%, 50-55%, 55-60%, 60-65%, 65-70%, 70-75%, 75-80%, 0-85%, 85-90%, 90-95%, 95-100%, or more than 100%, relative to the respective reference level for SEQ ID NOs: 1-590).

[0073] In some aspects, the levels of at least 5%, at least 10%, at least 15%, at least 20%, at least 25%, at least 30%, at least 35%, at least 40%, at least 45%, at least 50%, at least 55%, at least 60%, at least 65%, at least 70%, at least 75%, at least 80%, at least 85%, at least 90%, at least 95%, at least 99%, or more than 99% of the sequences for which a level is determined or measured in the sample from the subject (i.e., one or more of SEQ ID NOs: 1-590) are increased relative to a respective reference level for the sequence, e.g., 5-10%, 10-15%, 15-20%, 20-25%, 25-30%, 30-35%, 35-40%, 40-45%, 45-50%, 50-55%, 55-60%, 60-65%, 65-70%, 70-75%, 75-80%, 0-85%, 85-90%, 90-95%, or 95-100% of the sequences for which a level is determined or measured are increased relative to a respective reference level for the sequence.

[0074] In some aspects, a level of at least 50%, 51%, 52%, 53%, 54%, 55%, 56%, 57%, 58%, 59%, 60%, 61%, 62%, 63%, 64%, 65%, 66%, 67%, 68%, 69%, 70%, 71%, 72%, 73%, 74%, 75%, 76%, 77%, 78%, 79%, 80%, 81%, 82%, 83%, 84%, 85%, 86%, 87%, 88%, 89%, 90%, 91%, 92%, 93%, 94%, 95%, 96%, 97%, 98%, or 99% of SEQ ID NOs: 1-590 that is increased in a sample from the subject relative to a respective reference level for SEQ ID NOS: 1-590 indicates that the subject is likely to have UC.

[0075] In some aspects, a level of at least 50%, 51%, 52%, 53%, 54%, 55%, 56%, 57%, 58%, 59%, 60%, 61%, 62%, 63%, 64%, 65%, 66%, 67%, 68%, 69%, 70%, 71%, 72%, 73%, 74%, 75%, 76%, 77%, 78%, 79%, 80%, 81%, 82%, 83%, 84%, 85%, 86%, 87%, 88%, 89%, 90%, 91%, 92%, 93%, 94%, 95%, 96%, 97%, 98%, or 99% of SEQ ID NOs: 1-590 that is not substantially changed in a sample from the subject relative to a respective reference level for SEQ ID NOs: 1-590 indicates that the subject is likely to have Crohn's disease.

[0076] In another aspect, the disclosure features a method of differentiating between a diagnosis of ulcerative colitis (UC) and Crohn's disease in a subject having an inflammatory bowel disease (IBD), the method comprising determining or measuring a level of one or more of SEQ ID NOs: 1-590 in a sample from the subject, wherein (a) a level of at least 50% of SEQ ID NOs: 1-590 that is changed relative to a respective reference level for SEQ ID NOs: 1-590 indicates that the subject is likely to have UC, and (b) a level of a level of at least 50% of SEQ ID NOs: 1-590 that is not substantially changed relative to a respective reference level for SEQ ID NOs: 1-590 indicates that the subject is likely to have Crohn's disease.

[0077] In some aspects, a level of at least 50% of SEQ ID NOs: 1-590 is changed relative to a respective reference level for SEQ ID NOs: 1-590 in the sample from the subject and the method further comprises administering an anti-UC therapy to a subject.

[0078] In some aspects, a level of at least 50% of SEQ ID NOs: 1-590 is not substantially changed relative to a respective reference level for SEQ ID NOs: 1-590 in the sample from the subject and the method further comprises administering an anti-Crohn's disease therapy to a subject.

[0079] Determination of whether a difference detected is significant can be carried out using standard methods, as well as statistical analysis. In some embodiments, a difference detected is a change of at least 5%, 10%, 20%, 30%, 40%, 50%, 75%, 100%, or more, e.g., at least 2.5-fold, 3-fold, 4-fold, 5-fold, 6-fold, 7-fold, 8-fold, 9-fold, 10-fold, 15-fold, 20-fold, 25-fold, 50-fold, 75-fold, 100-fold, or more than 100-fold, relative to a reference level.

### II. ARTICLES OF MANUFACTURE AND KITS

[0080] In another aspect of the invention, an article of manufacture or kit containing materials useful for the diagnosis, prognostic assessment, and/or treatment of individuals is provided.

[0081] A kit for differentiating between a diagnosis of ulcerative colitis (UC) and Crohn's disease in a subject having an inflammatory bowel disease (IBD), the kit comprising: (a) polypeptides or polynucleotides capable of determining the level of one or more of SEQ ID NOS: 1-590 in a sample from the subject; and optionally (b) instructions for use of the polypeptides or polynucleotides to determine the level of one or more of SEQ ID NOs: 1-590 in the sample from the subject, wherein (a) a level of one or more of SEQ ID NOs: 1-590 that is changed relative to a respective reference level for SEQ ID NOs: 1-590 indicates that the subject is likely to have UC, and (b) a level of one or more of SEQ ID NOs: 1-590 that is not substantially changed relative to a respective reference level for SEQ ID NOs: 1-590 indicates that the subject is likely to have Crohn's disease.

[0082] In some aspects, the reagents for determining a level of one or more of SEQ ID NOs: 1-590 in a sample from the subject comprise one or more polynucleotides (e.g., PCR primers) that hybridize to a complement of a locus of one or more of SEQ ID NOs: 1-590 under stringent conditions and may be used to amplify all or a portion of any one or more of SEQ ID NOs: 1-590, as described herein. In some aspects, the instructions indicate that the one or more oligonucleotides (e.g., PCR primers) may be used to evaluate the presence and/or level of one or more of SEQ ID NOs: 1-590 in a sample from the subject and provide instructions for using the polynucleotide(s) for evaluating the presence and/or level of one or more of SEQ ID NOs: 1-590 in the sample. In some embodiments, reagents are included for determining a level of at least 5%, at least 10%, at least 15%, at least 20%, at least 25%, at least 30%, at least 35%, at least 40%, at least 45%, at least 50%, at least 55%, at least 60%, at least 65%, at least 70%, at least 75%, at least 80%, at least 85%, at least 90%, at least 95%, at least 99%, or more than 99% of the sequences of SEQ ID NOs: 1-590.

[0083] For polynucleotide-based articles of manufacture or kits, the article of manufacture or kit may include, for example: (1) an oligonucleotide, e.g., a detectably labeled oligonucleotide, which hybridizes to a nucleic acid sequence encoding a protein, (2) a pair of primers useful for amplifying a nucleic acid molecule, or (3) a microarray comprising multiple oligonucleotide probes. For protein-based articles of manufacture or kits, the article of manufacture or kit may include, for example, one or more antibody-based reagents. The article of manufacture or kit can also include, e.g., a buffering agent, a preservative, or a protein-stabilizing agent. The article of manufacture or kit can further include components necessary for detecting the detectable label (e.g., an enzyme or a substrate). The article of manufacture or kit can further include components necessary for analyzing the sequence of a sample (e.g., a restriction enzyme or a buffer). The article of manufacture or kit can also contain a control sample or a series of control samples that can be assayed and compared to the test sample (e.g., a reference sample, as described herein). Each component of the article of manufacture or kit can be enclosed within an individual container and all of the various containers can be within a single package, along with instructions for interpreting the results of the assays performed using the kit.

[0084] The following examples are meant to illustrate the invention. They are not meant to limit the invention in any way.

### III. EXAMPLES

### Example 1. Identification of Markers

### A. Assembly and Annotation of Metagenomic Markers

[0085] Paired end reads from healthy Human Microbiome Project 1 (HMP1; Human Microbiome Project Consortium, Nature, 486 (7402): 207-214, 2012) individuals were downloaded from the National Center for Bioinformatics (NCBI) Short Read Archive (SRA) and assembled using metaSPAdes (cab.spbu.ru/software/spades/). Metagenomic markers were annotated using antiSMASH4.0 (docs.antismash.secondarymetabolites.org/) with the following non-default parameters: -c 3--smcogs --disable-embl. Annotated metagenomic markers were clustered using all vs. all diamond (https://github.com/bbuchfink/diamond) blastx. Blastx results were filtered using a python script requiring (a) E-value <1×10⁻⁵, (b) 90% coverage of length of coding sequence, and (c)>50% of coding sequences in a metagenomic marker present. Metagenomic markers were then grouped using markov clustering, resulting in a dereplicated library of 8,211 representative metagenomic markers identified in healthy human gut metagenomes.

### B. EMP Selection

[0086] A subset of metagenomic markers prevalent in healthy cohorts, referred to as essential microbial products (EMPs), were identified by clustering metagenomic markers presence/absence across 592 healthy patients from various geographic, genetic, and lifestyle backgrounds. Clusters with a mean prevalence >0.7 and z-score >10 within cohort were selected. To take sample imbalance into account, a proportion test was performed to assess stability across cohorts. This resulted in 1321 EMPs. For diagnostic analyses, metagenomic markers were subsetted from the full dataset, resulting in 1171 EMPs. Metagenomic markers were further subsetted, resulting in 590 EMPs.

### C. Metagenomic Data

[0087] Raw metagenomic reads from Ananthakrishnan et al., Cell Host Microbe, 21 (5): 603-610.e3, 2018 were downloaded from the NCBI Sequence Read Archive (SRA). There were 83 baseline (week 0, pretreatment) samples (43 Crohn's disease and 40 ulcerative colitis), 81 of which had baseline metagenomes available. The Ananthakrishnan et al. study presents the results of an analysis of disease activity and stool metagenomes in patients having Crohn's disease (CD) or ulcerative colitis (UC) who were treated with the anti-integrin therapy vedolizumab.

### D. Quantification of Metagenomic Markers Across Cohorts

[0088] To quantify metagenomic marker abundance across metagenomes, raw forward reads were mapped to the library of 8,211 metagenomic markers using diamond as described above. Normalized abundance of metagenomic markers was calculated such that abundance equals number of reads mapping divided by cumulative length of coding sequences in kilobase pairs divided by number of raw reads mapped.

### E. Data Preprocessing

[0089] EMP abundance data were transformed using the rank-based inverse normal transformation (Blom), and centered and scaled.

### F. Modeling

[0090] Lasso models of the form diagnosis ˜EMPs were fit using leave-one-out cross-validation with the glmnet package in R. Area under the receiver operating characteristic (ROC) curve was calculated using the pROC package in R, and the p-value of the ROC curve was computed using the Mann-Whitney method as previously described. For purposes of heatmap visualization, univariate models were fit for each EMP of the form diagnosis ˜EMP. EMPs were selected for inclusion in the heatmap on the basis of p-value of their coefficient <0.05 after Benjamini-Hochberg correction.

### G. Visualization

[0091] Heatmaps were constructed with features selected from univariate models using pheatmap with binarized data and clustering of columns and rows according to Ward's distance.

### H. Conclusions

[0092] A set of 590 metagenomic markers (SEQ ID NOs: 1-590) were found to be significant predictors in a model discriminating between patients having ulcerative colitis and patients having Crohn's disease (FIGS. 1-3).

### OTHER EMBODIMENTS

[0093] Various modifications and variations of the described invention will be apparent to those skilled in the art without departing from the scope and spirit of the invention. Although the invention has been described in connection with specific embodiments, it should be understood that the invention as claimed should not be unduly limited to such specific embodiments. Indeed, various modifications of the described modes for carrying out the invention that are obvious to those skilled in the art are intended to be within the scope of the invention.

[0094] Other embodiments are in the claims.

The application's sequence listing, which the Patent Office published only in electronic form, follows.

SEQUENCE LISTING (590 sequences)

SEQ ID NO: 1 - DNA, 10862 bp, unidentified
  source 1..10862: mol_type = unassigned DNA
atggaaaaaacattgaagggcatagtacaatatgctcgtaaaaactatttcagctattgggctattcttgggattgacacagcactgtctgttttatgttcattactcgcctatgctgtaattcactacatggcatacgtcccgatgagtgactggatactttgcaaatttatttgcgtgtctttggtgtcaagtgttgcaggagccttattattccatacttatcgaaatacgatccgtttttctcaagcacgagagttatggcgtattatgtgtgccgtattattcaagatagcctgtttgtcggttattgcatattgggtaatctatgagactgaattaccggataattataggatatcttatcttttgtttgatggtttattaactctggtaacattaactgtttttcgtgtatctcttataatcatatatgattttttattggattgggtaaataaaaagaatactcgtattcttatttatgggattgatgaaaaaagtgtagccttaaaacttcgtcttcgtgatagtgcgcattataaggttgtaggtttttatatttatggtaaaaataatcgtagacgtcgattggcagatcttcctatttattattttgaaacagaagaagactttaattatgtcataaaaaaacatggtattcatggcattttatttgctcgttatgaagatacccgcttggaggagaaccgccttttagagtattgtaaaagtaatgctgtcaagacttttattgctcctactatcagtgaagcggattctgacgggaactttcatcagtggatacgtcctattaaaattgaagatttattgggacgtgctgaaatcaatataaaccttagtcaggtcgcagaagaattcagaggaaaagttgtattagtgaccggtgctgcaggcagtatcggtagcgagctttgccgtcaattggtgcaaatgggtattcaaaaactcatcatgtttgactctgcagagactcctttgcataatgtccgtttggaatttgagaaaaattatcctgctatcgattttgttccggtgattggtgatgtacgtgtgaaagaacgtgtgcgtatggtattcgaactttatcatcctcaaattgtcttccacgccgctgcttataaacatgttcctttaatggaagaaaatccttgcgaagctgtacttgtcaatgtcacgggttcgcgtcaggtcgccgatatggcggtggagtatggtgcagaaaaaatgataatggtttctaccgacaaagctgtgaacccgactaatgtgatgggatgttccaaacgtttggcggaaatctatgtacagagcttggggtgtgctatccgtgagggaaagataaaaggacatactaaatttattactacacgttttggaaacgtattaggcagtaacggttctgtaatcccgcgcttcaaggaacagattgagaacggtggtcctgtcacagtgactcaccctgatattattcgtttttttatgacgattcccgaagcttgtcgtttggttatggaggctgttacaatgggagagggtaatgaaatctttgtctttgaaatgggcaaggccgttaagattgtcgacttggctacccgtatgattgaattggcgggttatcgcccggatgaagatataaagattgaatttactggcttgcgaccgggtgagaaactctatgaagaagtgctgagtgataaagaaaatacgattcctaccgagaataaaaaaattatgatagctaaagtacgtcggtatgaatatgctgatattcttgatatatatgcggagtttgagaagttgtcccgtgctgtgcggattatagacacggtcagattgatgaaaaaagttgttccggagttcaaatcgaagaattcgaaatttgaggtactggataaagaataataaacttgagaaatttatgtataatttgttttgtatttgtgcaagtagagtaagtagaaaggggaggggggtatttccctgtttagttgcgatattgctgttcgcttcctgccagtcgtataagaaagttccttatttacaagatgcaaaagttgtagaacagactgctcaacaggaaaatctatatgatgcaaagataatgcctaaagatctgcttactattgtagtgtcatgtaccagcccggaattggctgttccgtttaacctcacggtagctactcaaaataatgtagctataaccagtacaacctcccaaccgatattgcagcaatatctcgtagataacgatggaaaaataaattttccggtactaggtgagttgagggtaggtggcttgaccaagaaagaggcggagcaactgattgtggagaaactgaaaccttatatcaaagaaacgccgatagtcactgtccgtatggtaaactataaaatctccgtattgggtgaggttgcccgtccgggaacttttactatcagtaacgagaaagtgaatttgttggaagcgcttgctatggcgggtgacatgacggtttggggagttcgcgacaatgtaaagctgattcgtgaaagtgctgatggcaaacaggaaattataacactggatttgaacagtgcggagaccattctttctccctattactggttgcagcagaacgatatcgtttatgtgactccgaacaaggcaaaagcacgcaactcggatattggtaacagtacaagcctctggttctccgctacttctattttagtgtcattggcaagtttattagtaacaattttcagataatagcattgtatgattgatgaaagaaaagataaattaggggaacagtccgaagaacaggttaatattcaggaacttcttttccgttatctgattcactggccttggtttgtagtatcgataattatttgtattgcttgtgcatggggatacctacgtctgacaacacctatatataatatttctgccactgtccttattaaggacgaaaagaaaggtggtggtgcaagtatgtcttccgatttagaaaagatgggattggagggtttcgtctcttcatctagcaatgtagataatgaaatcgaagtacttcgttcaaagtctttgtccagagaggtggtaaacaatctgggactgttcgtgacttatatggatgaagacgaatttccaagcaaagagctttatcatacatctcctgttttagtgagtctgactcatcaggaagcggataaacttccgggtagaatggaaataaatatgattcttcaaccaacgggtgcgttgggggtacaaattacagtaggcgaaaaagagtaccggaaacagtttgataaattgcctgctgtatttccgacagatgagggtacggttgcttttttcgcaaataacgataccttgtcagcagtttgtccggaaaatataaccaaagaacgtcatatcacagcttttattaacagacctttttctgtgttgaaagaatatgttaactctttgtcaatagcccccacttcaaagactacttctgtagttgttatttcactggaaaatacaaatacccggcgtggtagagattatatcaataaactgcttgaaatgtataatatcaatgccaataatgacaagaatgaggtggctcagaaaactgctgaatttattgacgaacgtattggtattatttctaaagaattaggcagtacagaacaggatttggagaacttcaaacgtagtgcgggaattactgatttgagcagtgaagcacagatagccttgacaggcaatgctgaatatgaaaagaaacgcgtggaaaatcagactcagataaatctggtgatggacttgcaacgctatatgaaaggtaatgaatatgaagtattaccgagtaatatcggcttacaggatgcagcatcagccggtgcgatagaccgttataatcaaatgctggttgaaaggaaacgtctgttgcgtacttcgacggagaataatccgaccataatcaatctggataccagtatccgtgcaatgagaaccaatgtgcaagctaccttagatgctacattgaaaggattgcagattaccaaagaagatctggctcgtgaagcaagccgttattcccgccgtatcaatgatgcgcccactcaggaacgccagtttgtaagcattgcccgccagcaagagattaaatcgggtttgtatctgatgttgcttcaaaaacgtgaggagaatgccatcactttggcggctactgccaataacgcgaagattattgatgaagcgttagcagatgacaatccgatttctcccaaaaagatgttggtttatttggctgctttagtcttaggtgtgggacttccggtaggagttatttatctgataggtttgacaaaattcaagattgaaggtcgtgctgacgttgagaaattgacttcacttcctgttgttggtgatattccgttagcagatgaaaagactggttctatagcggtatttgagaatcagaataatctgatgagtgagactttccggaatgtccgtactaatctccagtttatgcttgagaatggtaagaatgtaattctggtaacttctactatcagtggtgaaggtaagtctttcatatctgctaatttagcaattagtctttctttattagggaagaaagtggtgatagtaggactggatattcgtaaaccggggttgaataaagtcttcaatatacctaaaaaggaacatggtattactcaatatctgacaaacacaactgcgaatttaatggattttgtgcagccttctgatataaacaaaaatctgtttattcttcccggtggtacagttccacctaatccgacagaattattggctcgtggagggttagagaaagccattgaaacattgaaggcgaattttgattatgtgatattggatacagcgccggtgggtatggtaaccgatactttacttataggacgtgtcgcagatttatccgtatatgtatgtcgtgctgattatacccataaggcagagtttactttgattaatgaattggctgaaaataacaaattgcctaatctctgtattgctatcaatggtttggatctgaacagtaggaagtatggttattactatggctatggaaaatatggcaagtattatggttatggaaaacgttacggttatggttacggatatggagagaagcatggaggtgaaaaataattaaatcaaacaaaatatgcgtgattttaaagacattaagattgccgtagccggtacgggctatgtggggctgagcatagcaacgctgctatcacaacatcatcatgtaaccaccgtggatgtaattcccgaaaaggtggaaaaactgaataataagatttctccaatccaggacgattatatcgagaagtatcttgctgaaaaggatcttaacctcacagcaactctcgatggtgccgcagcttacaaggatgcagattatgtagtaatcgctgctccaactaactatgacccacagaaaaactttttcgatacacatcatatcgaggacgtgatcgacctcgttttgagtgtgaatcctggtgcagtgatggtaatcaaatctactattcctgtaggatattgccgttcactttacgtgaagtatgcgctcaagttcttgaccgatccttcactcaagggcaagaagttcaatttgcttttctctccagagttccttcgcgagagcaaggcactttacgataatctctacccatctcgtatcattgttggctatccaaagatattgccggctgatcgcaataagaagtgggatgaggaaaatgcatctattgaggcaattagtaatgctgacgctgagaaaaatgcaaaaacatttgccgcactccttcaggaaggcgcaattaaggaaaatattgatactcttatcatgggtatgactgaagcagaggctgttaagctatttgctaatacgtatcttgcacttcgcgtgtcttatttcaatgagttggatacttatgctgaagtaaagggcttggattctcaggcaatcatctcaggtgtagggctcgatccacgtatcggaacacactataataatccttcattcggttatggtggctactgcttgccaaaagatacaaagcagttgttggctaactatgcagacgttcctcaaaacatgatgagcgctatcgtggagtcaaaccgcacgcgtaaggactttattgctgatgaagttcttcgtaaagccggttactataccgccaatagcgactggaatgaatcttcagagaaggaagttacagtcggtgtattccgccttactatgaagtcaaattctgacaacttccgccagagtgccattcagggcatcatgaaacgcgtaaaggcaaagggtgccaacatcatcatctacgagccaacacttactgatggtgaaacattcttcggctctaagattgtcaacaaccttgatgaattcaagaaactcagcaatgctatcattgctaatcgctatgataccgcattggatgacgtaaaggacaaggtttacacacgtgacatcttccagcgcgactaaggatttccaaaaacaaactataaactaacatggccaatttccaatatcacatattctcaccttaccgtgtttgccctgatgatggtgcaaaatttgttgaggaataaaaatctctaattcgagacaagaaaaatcaaagaataccagctgcatcatgtgtcatgagcaaccatctatagagaaactccagcgcactggagtcattgtcgttgatgacaacatgcgcgtactcaatatgtaagaaaaaccgcaagagccaaaatctcattgggctgttcctccattctatgtatattttaaaaaaaaatttgggccttgtttgcaattcagttgctaatggttgtggaaaggatgccccaggcaatcttgcccattacatggttgacaatactaaaatgcatgcatggaaaatgtcagcaggccgtttcaacatcggatctctcgatacttactatgaagcagtaaaaaaatacggaaaataaacatggtaaaatttaatttagatttaaacggaaagactattttggtaacaggtgctgctggatttatcggtagtaatcttgcaaaacgtcttataaacgattataaagatataaaggtaatcggtcttgataccatgaccgattattatgatgttaatattaagaaagagcgtcttcgtggaatagaggctcttggtggcaattggtcattcgtggaggaatctattgcaaacaaagaggttatcgataaaatattcacaaaaaatcggatttcagtagtagttaaccttgccgcacaggctggtgtacgctacagcattactaatccagatgcttatattcaaagcaatctcattggtttttataacattcttgaagcatgtcgtcatcatgaagtagatcacttggtttatgcttcatcgtcaagcgtatatggtagcaataagaaagttccatactctacagaggacaaggtggataatcctgtttcactttatgcagcaaccaagaagagcaacgagttgatggctcacgcttattcaaagctttataatattccatctacaggtcttcgcttcttcactgtttatggccctgctggtcgtccagatatggcttactttggcttcaccaacaagttgcgtgagggcaaaactattcagatcttcaactatggcaactgcaagcgcgacttcacctatgtagatgatatcgtagaaggtgtactgcgtgtgatgcaacatgcaccagaaaaagccaatggtgaggatggattaccaatcccaccatataaggtttacaacattggtaacaattcaccagagaatctccttgatttcgtaactatccttcaggaagaattgattcgtgcaggagtattgccatttgattacgatttcgatgctcacaaagagcttgtacctatgcaaccaggtgatgttcctgtaacatttgcagatacaacaccactagaagatgatttcggatataagccaaacacgccattgcgtgagggcttacgaaagttctctgagtggtataaacaatactatggataatataataaaccatatgagtttatatgtattagcattcaaataaactcatatggtattctggcagcacaggtaggcgaaaggcgaggttcgatacttcctgccagatcaaatataatttgaaatatgaatattcttttaacaggtggagcaggtgctgatggacgtgcagaagtctgatcctgagtggaatgtggtgctgcttcgttatttcaatcctattgacgctcacgagagtggtttgataggtgagaatccgaatggcattccaaacaacctgatgccttatatcacgcaaacggctattggcatgtgcaaggaactgggtatttttggtaatgattacgatactcctgatggaactggtattcgtgacttcatacatgttgtagatttggcgaaaggccatgtatgcgcattaaaggctatcgttgagaacaagaggtataatatagagtggataagtataactagaatgagatccctactttttccacacattcagcaatgattactctcaaaattaaattgctataggtaggatctcattcttttacttattatgataagaaatagggaagatcttaggttttatttaaaagaagacatgtctcagtattctttgtctttttggaaatatattgcttatcttatttatggatttgaaaatgcatatatagaaatatttaaggcttttgagatactgtgaatatcattataattgtcaccacaaaataagatttcatttatataatattaggagacaacatttgggattgaaattaaacattgacattccattaaatgtttgtggttatggcttacgtattcgtcacctttctggtggtggtgggattttactaaatgctagaaaaataggaaattattgctcttttaattcgggagttttgttaggcaacaaggatgataatagtaagaaaccgatattaggtgaacgtgtctcgtttggtccatctgctaaagcctttggtgatattgtaattgaggacgatgtttttgttgctcctggtgcaattgtaactaagtctgttagtaaatcacagattgttggtggaatacctgcaaaactattaaaaaacaaatagattcatatatgaatagatattttttagatgatcaaaaagctcctttgaaaaaacttatatggcagatattcttcgtttttttcttcgtttatgaagttcaaccatttggagtgcctgacatgttgacttcgcgaaagatagttttttacattgctggttttacatttattacaaggtttttaaagcgttttaattcaaagacctttgatgatgttaattttaaaaggacatcaaaaaaattaatttcgattggttttgtcgttttcttatggcaaactctgataactttactacattcaggtacaggcagtggtcaacctatgtggggtaaaacattactgtttttgttattaacttcatttttttgtaccttttcttatttcttttttaataatattaaacagtttctacttgcgatgttttacgcaactgtgattcaatcagttatttgcattgcagatttcttttcatttgaagtgaaagtgtttctttataaccattttatggttgatgcaaattttggttatttgtctagctcaagagcttacggtttaggcgccgcagagtcactgttggctataaatctttttttgggtcttgttccaactgcaattttgatcattggatgttcaaaaaatgtattttatatttttggatatattgcaatattatttgctgctttattggtgggttcaactggttttattttgggaattctattgctaatcttgactataggcttagtctttatttatggtagtttctaccaaaaatcaagcttagcaattattggaacagttggtttttttatcttgttttctttggcagctgtgtttttttcagatattgaagagtttggtaattttcataagatattagcctttcaagaggttggaattgaaaatcaaaatacagttcatactttaagagaacaagctgtagctcctatttgtctgcatactttattgggaacatcatattatcgtggaacggttgatggattaacaacaatgtcggacactggctatttacaatcatattttggaaacggcttaatcttaactcttgttttttatttttatttatatcgacttatgtttataaatgttagatatataaaaaatcgagttatttgtatattattggggtttctttttctatctattgtttttgcggaaggaaaagaaccttacatttatcattatggtaatacctttgttttctttttagcttgtttcctttcgaataaacctcataaacagttgattaagtgatatgattagtgtcattgttccaatatataatgttgaacgttacattaataaatgtattgattctattattcatcagtcttataaaaatttggaaattattttagtcgatgatggatctcctgataaatgtggcgaaattattgatgagtattcaagaattgataaacgaattcatgtaatacataaatctaatggaggtttaagttctgcccgaaatgctgggttggatattgcttctggtgattttattggttttgttgatagtgatgattggattgagcctaccatgtatgaagaaatgctttcatttatggaaaaggaacaattggaccttgttgagtgcggaataaatttggttactaataatattagtaataaa

SEQ ID NO: 2 - DNA, 16775 bp, unidentified
  source 1..16775: mol_type = unassigned DNA
tcagatcggcacatcctgccactgcccgccgatcagttcgcgggtggatttgaacccgttttttttcagcagctcgaatgcttctgcacgtccgtcgttcaccaggtccgggtagtggcagtcggagtttaccatcaccggaatattcaactcgcggaggcggtgcagatagtcggtatgcggatagacctcctgttttttcacgaggttttttgtgttgacttcgaccatcaggcccttttctgcgatcaggtgcaggcagtcgttgagcggtttttgataccagtctgcttgcaggtcgaagccttcgcatttgtggccgttcatgtatatcttgtccatgtggccgacaatgtcgattccgcctgcctcgatcatttgctgtgtggagctgaaataatgggcgaccaacttgcggatatctccgtcgtagtaggtgtcgacagacttctggtattcccggaaagagccatcgatgcacaccatattctcttctgcaagcggctgtgcgattggtagaaagtggatggagccgatgcggtaatcgagcggcaagttacggaagtaggggatggatgcgttgtagctcttgtctaagaaatcgatttccagtcccacgtatatttccaaccggtcgttgtatttctttttcagccgttctatctctgtcagatattcgggcatatcatctttcgacatgttccagaatgtttcgaacggcaatggtgaatgggatgaaaaaccgtaggcgcggaacccgtgcgcaacagcgaatttaacgaagtcttccggcgtactccgcccgtcacaaaatgtacaatggctatggtagttactgagttgcataaaattttacttgtaagaagacaaagataatttttttatcccgaaagacaacctgtttgataaaaaaaggcttgattgctgccgagggattagcggcggaatcaagccttgaaaacacttaaaggatgaaaaaattgtatgttttattttattacattcagttctttacccaccttgataaatgcttcgatagctttatccagatgttctgtttcgtggccagcggacaactgtacgcggatacgggcctggtctttcggcactaccggataatagaaaccggttacataaatgccttcttcttgcatcttagctgcgaaatcctgagataatttggcatcatacagcataacggcgcagatagcggactgagtcggcttgatatcgaaaccggcagctaacatcttttcgcggaaatagctgacattgttcatcagtttcgtatgcaatgcgtcgctttctttcagcatcttgaacatttccaggctggcacctacgatagcgggagcgacagagttggagaacagataaggacgggagcgctgacgcagcatgtcgatgatctctttctttccggttgtgaatccgcccatagcgccaccgaatgctttacctaatgtacctgtgaagatatcgactcttccgtatacattatattgttcagccacaccgtgtcctgtcgggcctacgacaccggcagagtgggattcgtcgaccattaccaatgcgtcgtatttttctgccagttcgcagatcttgtccatcggagccacgtttccgtccatagagaacacaccgtctgttgcgatgatgcggtgacgttgtgcctgggcttcttgcaggcaacgttccaggtcggccatgtctgcattggcataacggtagcgttttgccttgcaaagacgtacgccgtcgatgatggaggcatggttcaaagcgtcggagatgatcgcatcctcttcagtgaacaacggttcgaacagaccaccgttggcatcgaaacaagcagcgtacaagattgtatcttcggttttgaaataatcggagatagcagcttccagttgtttgtgaagatcctgtgtcccgcagatgaaacggacggatgacatgccgtatccgtgtgtgtccatagcttctttggctgccttgatcagacgttggttgtcggacaggcccaggtagttgtttgcgcagaagttcaaaacgtcgcttcctgcgtttactttgatgtcggctctttgaggagtggtgatgatacgctcgttcttatacaatccggcagctttgatgtttgccaattcctgagtaaggaaatctttcagtttaccgtacataactttgttttttgttagtatttctaattaagttgacaattatatctcttttatcgcagacaagtggcaaaatatcttttcgaaacctttttctttgtctctgatttgtctgccgatgcggcaaaggtcatattttttttgaatatataggctaaaaaaatacaagaaattcataccggaatgtttttattctctatacctttgccgcagaaaaacttaaaagaacatcaaacgcaatgaagaatgtattagtaattggttctaccggtcagattggatcagagttaaccatgaagttgagaggtatctacggtggaaacattgtagcaggttacatccccggacaggaacctaaaggtgaactgttggaatcaggaccttctgcaattgtcgacattacaaacgaacagcagattgctgaaactgtatctaaatataaagtagatacgatttataacctggcagccttgctgtcggctgttgcagaagcaaaaccgcagctggcttggaaaatcggtatgggcggtttgtttaatgtattggaagtggcacgtgaaatgaattgtgcagtattcactccgagttccattggtgtattcggcaataacacaccgaaagacaagactccgcaggatacaatccgtaacccgcgtaccatgtacggtgttacgaaggtttcaggcgagttgttgagtgactactataatatccgtttcggtgtcgacactcgttccgtacgttttccgggtcttatctcttatgtaacacctccgggtggtggtacgaccgactacgcagttgatatctattattcggctgccaaaggcgagaagttcgtatgtccgatcaagcagggtacattcatggatatgatgtatatgccggacggtctgcgtgcagctattgaaattatggaagccgattcgacgaaattcgttcatcgtaactctttcaacattgcctctatgagctttgatcctgaaattatctacaacaatatcaaaaagtatgttcctgacttccagatggaatatgatgtagatccgttgcgtcaggctatcgcagaatcttggccgaactctctggacgacacgtgtgcccgtcaggaatggggctggaaaccggaattcgacctggatgccatgactcaggatatgttggcaaaattgaaagaacgtttcaacaaataagaattaattccccggtcattaactgatcaataggagaaaaaggcgactgtccatccggatcgtcgcctttttgtttgtatcgtttttattcagtattgtaggcagtttcaataacaatgtgactgtttcttgtgtaggaaacgattaagttaaaagtgcatgaaaaattatgttgtaaaacatgaaatagttaaatcaggttaaggaaaagtactttttcggtgaaatattatgctgtataacataaactccctatatttgcatcgtgtttttcatggtattagatttaaggttaacaatgaagattggctgtccgtgatggatggccttttttattttatgccagtcccgattctttccagttaattctaaaacacgtcttgtcttttttcaatcccttattgtaatatctttcaaaaatgcattggttcaaatcgaaactattaccgcatctattttagttttctaccccgtttaaatcaaattacatgcaagggtaatcttttttaacaaacatctattttagcatattattgtatatcagatttttatgtaatatttgacttttaagggggatactgttgttttttggaggtgagaataggtgtggatggtggcaaaatgggttccgatttactgtaaatgatgccgattaattatgttatatagcatgttttcgttaaatagatttaaataaatgagatttccaagtgaaaatgtatgcttcataacataaaatgcctatatttgcactgtgtttttcatggtattagatttaaggttaacaatgaagattggctgtccgtgacggatagcctttttttgtttttatccggatcatccattcttttggtattcttgattatatttgtatctctgaaaaggattcattgtaactaaaatatcatagtatggaaatgtacaaagcaaatgataaccggtatgccgatatggcgtacaggcgttgcggacggagcgggttgttgttgccggccatctctttaggattgtggcataattttggtagtgtggatgtgttcagtaactttattcagattgcgcatgctgctttcgacaatgggattacacattttgatcttgccaataactacggtcctgtatatggatcggcagaggaaaacttcggtcgtatcttgaagaaaggtttggggctgtacagggatgagcttgttatttctacaaaagccggatatgatatgtggcccggtccgtatggtaactggggaagtcgcaagtatctgatggcaagcttggatcagagcttgaaacggatgggtctggaatatgttgatatcttctattcgcatcgtccggacccgcagacaccgattgaagaaacgatgggggcgttggcagatatcgttcgacagggaaaagctttgtatatcggaatttcgaactataatgccgaacagacagaaaaggcgcttgctgtcttgggggaacatcgtgtgccttgtctgattcatcaagcgcgctattcgatgttggatcgctggaccgaaccggacctcttgcctctactgaagcaggaaggggtgggaatgatcgctttttcgcccttggcacagggtatgctgacggacaaatatctgaacggtatccctgaaaattcacgcgcagccaaatctacaggccatctgcaacgcgagcaggtaacggaagaaaagataagtagaattcgccaattgaataaacttgcaaaacaacgtggacaaacgcttgcagaaatggcactcgcctggttgttgaaggacgaacgggtaacgagtgtcttagtgggggccagttcggttgcacagttgacggataatttaaaggcgttacaaaacaaggttttttcaacggaagagttacaggcaatagagagtatattacaataaaataataatttgtctgttacttttggcttgatccaaaagtaaccaaaagatcaaggcttaagctgcttcgctactccgttcccttcgttcgctgtcgcgtctgaaactcgcttcgctcagacagcagacgctccggacgcttactgcggtcactgcgcttaacgctcaccagcttaggccggaaatagagcctgacggctctttggggatggccgataccgcctgcctctttgcgatcccgcatcaagtgcgggaacgggtttgttcttgcccttgtcgcttgtccccgtaccccgcacggggccgcagaagaacggtcggtatcggccaccccaagagaaagcgtagctttcttggaaaggcctaagcggatgggcgtcaagcggagggcaaagacggagcggcaggagcctgcgctgtctgagcgaagcgagtttcgcaggcgacagcgtagtctttgcccggagtagcccagacggttaagccttgaacttttgattacttttctttcaagagaaaagtaacagattactaattcgaacaattaatgaaaccattcttatatcaggttgcatctcttttttattcgaaatatggggcggaagtcagccgtctggcttttgttttcccgaaccgtcgtacgggattgttctttcagaaatatttgtcggaagtgtcggagaagccgcttttctctccgacgatcctgaccatcaacgacctgtttgtacagttgagtggaaagcagactgcagaccggatcagcatgttgtttaagctgtatgatatctatttgaaccatagcggttcttctgaaacattcgatgagttcctctattggggggaaatgttgttgaatgactttgatgatatcgataaatatatggttgacgctcgcatgctcttcacaaacgtgacagaccttcgtgaaattgagaatgatttcagttttctgagtcccgaacagatcgcggctatccggactttctggtcttctttctacccgaaaggagatacacccaatcaggaacagtttctggctgtctggcaaatcttatacgccctatataccgatttgagggaaacgcttgctgccgaaggcaagggatatgaaggtatgattttccgggaagtggtcgagcagatggagaaaaacgaatgttgtgaccttccctatacgaaagtcgtgtttgtcggcttgaacgccttgtctgtggctgaagaacgtttcctgtctgaattacagaaacgggaaatagcagatttctactgggattatgcttcgccgaaagtgacagatccggataataaagcctcttacttcgtggaacgcaatttacggcgattcccttcacagttgaaagttgaaagtggagagttgaaagtggaaagtgaagatagcaacgcgaagccactttcaactttcatctctccactttcaactcccaaggtcgaggtgatcggtatcccttccggtattgggcaggccaagcaggtgcacagtattttaagcgagctttgcagggaagatgaaatgagtgcagaagaagcgttgcggacggctgtgattctgccggatgagcatttgttgattccggtcctgaatgccatccccgaacagatcaaacggatcaatgtgacgatgggatatccgttggccggtacaccagtcgcatctttgatggaatatattttagctttgcaaaagaatattcgttatgtggaccggaggccggtgttctatttccgggatgttttgccgatcctgaaccatcgatatatttcgactacttctccggaggtggtctccgatctggtaaaagatatttcagaaaacaacaagatttacatctcgtatgacgatctggataagacgtctctgctctccatcctctttactccggtgactgcggtggaaactttctccgattacctgatcaacgtgttgcaggaactcaataaagcagttgaaagtggaaagttgaaagtggaaagtgaagatagcaacgcggagccactttccactttcaactctcaactttcaactattaacgacatcgaacaggagtttatcttccattattttgccaccgtcaatcggatgaaggaagtcatgcgggaggcgaatgtagagatgaaaatcgacacctatttccgtttgctgaaacgtgtgacggatacgattacgatccctttccatggtgaacctctttccggtttgcagatcatgggggttttggagactcgtgcgcttgactttgaccggttgattattctttcgatgaatgaagggattttcccgttgaggaaagcggctaattcatttattccttataatctccgccgggggttcggtttgccgacatacgagcaccaggacagtgtttgggcgtatcatttctatcgtttgatttatcgtgccagccatgtcagcctgctttatgatacccggagtaacggattgcagacaggcgaggtaagtcgtttcgtgcatcagttgcattatcattatgaggaaccgatacaaaacaagctggtcgtttacaatgtctcttcttccaagactcctgccttgcaggtggctaagacggaggaagtcatgaaccgtctggtggctttccggagtggcgggacgcgagcgatatcggcgagtgcagtcaatacctatctggattgtccgcttaaattctatttctccgttgtcgaaggaatacgggaagaagaggaggtaagcgagacgatcgaaagtaatgttttcggaagtatcctgcataaggtgatggagaaattgtatcagccattctgcggaaagatggtgacggccgatctgctgaaagcgatccgcaaagatacgcctatgttgacaggagcgattgcccgtgcctttgccgaaattttctttaaaacggatatcgtccgtccgctcaccggacagaatttcctgatcggcgaaatgattcgcaaatatgtagagaaagtgttggagagggacgataaactgactcctttccgttatatcgaatcggaaaagcagataaaatgccttttcccgttgacggataagagcaatatccagctgaaaggatttattgaccgtatagacgaagtgcgagataccgtccgcatcatcgactacaagagtgggagcggaacgacacagtttacctctgtcgaagctctttttgacaaagaagatacagatcgttctaaagcggttatgcaggtctttatgtatgcatggatgtacggcacggttcaactttcaactgctattcaaccgggtatctattacatgcggactctcttttctccctctttcgaccccggaatctaccggcgtacagaccggtttaaaacagaacaggtcctggacttcgccaattatcatgcggattttgaaaacagtctgcgaaattgcctggatgaaatcttcgacacagaaaccccattcgtacaaactccgaacggtaaagcttgcgtatattgcccgtttaaggatatttgtgggaaataggattttttactgatttcccatatattcatccacaatctcattcaggaagcggttgaatgggagaagctttcgaaaacaatcgatggtttcttccatccagtcaggctggctgaaaaagctgtcgggtttaataccgataacgctgaaatctttgtgctttaatatatggccataaggggaatcggaggggaaacctgccgggatacgttttagcatgtccccttcgagtgacgggtatagagctttgaaggaaggctcttcgatgatggaaacaaattcatctatgttattgtatatttcacgtcgaaggactttcaatatttccggtttgggataccagataccaccggacagtacgcagtattccggttcaagatgaaagtagtaagctccccggatactatgacgccctccttgagcaatacaggctgacatataagtcttgtaaggcgacttgtcgaggctgaaacggatgtcgcgattaatacggaatagacatttccgggcatccaatccccgtatgtcaggatcgaatacactgattcgttcgattaattcttgtacttcgttgataaaggtacggcgaagtttgtcatatcgttctctattttcatggaaccagacggtattattgttccgccgtaaatcgtctaagaatcggatgatttctgcattcatattaggatattctttttattgtattttatatctccattgtcccggagtcatctgtttcatctttttgaaagagcgattgaagtagggaatgtcggtgaagccgcattgccaggctatttcattaatgtccttatccggaaagttgaggagtaaagtgcaaacggcttctatccggtattcgttgatgaagtttgtaaacgttttgcctgtttcacgtttgaaaaacgagcagaatgccgttgtactcatactgattacatttgcggcgtccgaaagagttattttctccttgtaatgctcgatgacgtatttgaagatcagttgcatgcgtctcatatttttggtgataccattaaattccgtttcctgcaaaccgatagggattaaatcggttgtggttccgatttgttgcaggatgcggatcaacatcagcatcctttcgcttgcattcaagcagttcatttcttctaagcaggatttgatttttccggcagttccgcctgtcagcaggataccttgctggattgctgataatcgatgagcggcatattcccattcggtaaaaaaagacaggccggcttgtagcaggtcggggttgaattgcacgactatacattgtcgtttcccatccggctcgcaactttccgggttatacatccaacaatgtggttggttggtcgggaccagtacgacttctccctcctcgaacggctccagaaagtcgcccatcatccggtagcctgaacctttcacaacataacatatttctatttcgggatgaaaatgaagaggcatttcatcttttgggtacaagctggaataatcgtagcgtaacgaggcacaactatcttttttgatttgttcgaattttagtttctcgtgcatgtcggatgaattttcagataaaacacagtaaaattagacaataatcgcataatctgcgacaattacacttaataattttgttgtttctttgcggccggaaaaacagaaagattgaataggttatgaagaaaggtttgtatgcattgtcctttggtacatttgggctggggattgcagagttcattatgatgagtatcttgccggatgtggcggcaggatttgatatttccttatccgaagccggacatcttatttcggcttatgcgttgggtgtatgtgtgggagcaccgttggtagtggtggtggccaggagttggccgttacgtacgatcttgcttgctttggtcgggctttttgttgccgggaatctgcttatggcgctgtcgaccgattattggatgggactgtgtgcccggtttgtatcggggttgccgcatggggcttacttcggagtcggctcgattgtcgccagccgtttggcggagaaggggaaaagtacttctgctgtagctattatgattatggggatgacggttgccaatttgttcggtgtcccggctgggaatttcctgggacattttctgtcttggcgtttggtttttgtgattgcagcgttgtgggggggtgtaacgatttggtttatccggaggtgggttcctgttttgcccgccctgccggcaacgaatctgaaagggcaatttcgttttttgagaaggccggaaccgtggatgctgattgctgctaccatgttaggaaacgggggagctttttgctggtatagttatgtcaatccgttaatgacggatgtatcaggtttcagtatcggggcaatgcctgtattgatgttgctggcgggtgcgagtatgtgtatcggtaactatttgggaggacatttgtctgatcgttttacgcccggtatcgtggcgatgtccatgcagtttctgatgtttgcatcacttctgctgatttatttttttgcttcgtacggctttttgtctgctttgctgatgtgcgtttgtactggttgcctgtttgctgtttcttctccgcagcaattgttgttgcttcagtattctcctggcggagagatgatgggcggggcgatggttcagcttgcctttaatttggggaatgctgtgggtgcttatttcggaggattgtcgatcgaacatggggcagggctggaaagtacggcattgatcggttcgttttttgctctgttggggacgacggtgttcttggttttcaactatatggtgcttaaacctcagtggaagctactttaaaaaggggaaatagccgtcctaagtccggatggctattttcaatgtccaaaagggggtgtctcaaaatccccttgtccccgcgcttgacgcggggccgcaaaagagcaagccttatcaatcagatgtttatatgactagctttaatgtgatcccgcgtcaagcgtttgacacacctcctttcattttataatgtctcttgtttcagttgttcgacgaaacggtcgatccgctgtagttctttcggaatatcgatcccctgcggacagtgtggattgcattgattgcaactggtacaatgatccgcctggcggagcttcggaacactgcggtcatatccgatcagataagctcggcgagcttcgcggtagttttcatcctgtccactctggggaacattcccttcgttcacacatttattataatgaagcagaattcccggaatatcgatcccgtagggacaaggcatacaatatttgcagtcgttacacggaatggtcggatactgcatcatcaagtcggcggtgtcgaacaagaaatggttttcttcttctgttaatggctgcaatgggcagtaggagcgtaggttgtcttgcaggtgctccatgtaagtcataccactcagaacggtgagcacaccgggaaacgaaccggcaaaccggaaagcccatgaggccacacttcgtcccggctctcgttgtttcaagcgtgcgacgatatggtcgtgtacgtttgaaagccgccctccgagaagtggttccatgatgatggcggaaatctcccgtttttgtaattccccgtacagatattccgcatcggtgtttcgcgggttgatctctttggcgtgtttccagtctaagtaattcaattggatctggacgaaatcccattggtattcgtcgtgcttcgaaagcaaataatcgaacacctctatatctccgtgataggagaaacccaagtttcggatacgtcctgccttgcgttcttcgagcaggaagtcgagtataccgttcttgacatacctgttttcataggcttccatgcctcccataccgatcccgtggagcagcatatagtcgagataatcgacttgtaactctttgagcgaattgttatacatcgcgatagaagcctcacggctccatgtgtcgggagagaaatttgaaagcttggtggcgatataatatttgtcacgcggataacggctgagggcgatccccatggcatgttccgaacgtcctttgcaataggctggcgatgtgtcgaaatagtttacaccgtgttcgatggcatagtcggtcagccggttgaccatttcctggtcgatttcgtcgtcgctgtctcttgcgctgcttttggcaatagtcggcagacgcatgcatccgtagccgaggatggaaactttgtcttttgtggacggcgttgtgcggtatgtcatctgatctgtaggaataggagtggagttgcctgaatctgcggtcaccccgcttttcgagttgcacccggagagcaatggggtggtagttgccgtactgattcctacaatcttcaggaagtctcgacggtttatcgcttgatgattgtcttttttcatatatgatgattcttttatttcttgattaaatattccggtgttgttcgtgcccttccacataaatggcgctgaacggacgggacggacacaggttttcacaggctccgcagccgatgcatttttcctcgtttacgactggtagttgaagcgaatccgggtcgttcgggtcttttgccaccatcaggatcgcctgggtaggacaatggcgggcacagttgccgcaagtgacgccatcccgattgacgatgcaattttcttggatcagtacggcatgtcctatctggatagctgttttatctgctttcgtgatcgggcggatcgctccggtcgggcagacttccgaacatttgacgcattcgggacgacaatatcctcgctcatacgatacctctggttgcataaatgtttgcaggtttcccgaaggacgaagtacatggttcgtacaaaccgatacgcaaagctggcacgcggtgcaatgttgggagaagttggcagcgctcagcgagcccggaggggtgatcggtgtcgtccggttcggtttctttttatcttcaatgatggccaatccgccgtcgactttcttgtccgggagttgtactttttcctgggctttcagggctgctgaagtggcaagtaatgccgatacggtaaagaacttgcggcggtcgggcttgtttacaaccggttggttagcctgtgtttctgctttgtttgtttttctgcgtgtatatcggatggccccttgccggcatttgtctatgcagtccatgcaatcgacgcaacggctgtaatcgatctcgtgtgcttttgtattgatacaggctgctttgcaattacgggcgcataagccacaaccattgcatttggacgtatcgataaccggcttgaaaacagaaaaacgggagatcaatcccaaaaccgtacctaccgggcaaatcgtattgcaataggtccttccgttccgccaggcaagtatgattagtgtaataaaggtaactgtggcaatgatgaaagtagggaggctccgtagccaaacttccgtctcgtagaaagcgtaactgtctgcccgttctgctaagtaggccaagaggttatttgcccacccccagaagggggcgaataagttggaggcgatgcgcccgtaagcgctgtaaggtgcgattaatgccgcccatgctcctaatccgctgatcatggcaaggataaatattcccataactccgtatcttaaccaagacaacgcgggggaataacggaaacgatttttcttccgtttccccgccagccatgaaacaatatcctggaatataccgagaggacaaattacagaacagtaaacccgaccgaaaatccaggtcaatgcaatgagaaacagtaccacaccgaggtttagtgccaatactgccggcaggaactgtacttttgccaaccatccgaaccatacatgcaatgttcccgtaaaatcgagaaatagcagggtgacaagcgtaaaacagatgagtgcagttgtaagtctgattgttcgcaacataataagctctttttagatagtctgttattttatgttgcaaaaatagtgaaaggaaatggtttacaacttacacgaattacggattgatgtaccaatattacggttttgtcaacttctgcaaaaagtctgactgacaaacctcagaacttcaggcagagccgtccgccaataggtccagctatggccgccgtcacgtacccggaattcgtgcttgatccctttctgcctcatgatctggtgcacctgcatgtttccgtccagtaagccgtcgtcatcaccacagtcaatgtaataacggattttgggtaagtcgttttgattccagtcggacaggatcttcaaaacattgttttgttgccagtgttcgtctcccggtccgaacaggcggttgaataaatctttgtgcgatttgttttttctcgcttccatgaccgtatcgtcgaaaacggcggcactcaatggggcgcatgcgcagaacatatccggatgatgcaagctgtacaggaatgaaccgtagccacccattgacaacccggcaatcgcccggctttctttattactgcgaatccggtatgttttttccatataggggataagctcttcaaaaaacatgtcttcataaggtgcttttccgtcatactggttgatataccaagtgtcccatgcgtccggcatgacgatgatcatcggcacggcttcctcgtttgcgatggcacggtcggcaatcgttttcatttgtcccatctgtatccagttggtttcattatccgtataaccgtgtagaaggtagaggaccgggtaattccttttcgaggtgctgtagtcggaaggcaggtagatggagtaggaaactttcctgcctaatttgttactttcgaaagagagcgattcgaaaaccgtactttgcgaatatcctgccatattgaatagaaaacacaggatgaaatagaggtgaaatttgtttttcatatattattaataattagatttgtctgtttggacaaagtaaaaataagagaagagagcttgccgaaaaacgattaagttccgacatactctctttatcttgttaggggattaatctgccaccggatagggaaattcggtcaaccctttgtacataaactgataagtcggaacttcgattcctaattcctgggcagctcgtacgacataacctgtcaatgtttccacctcggtgcggttgcccttttggaaatcactgtgcatggaggtagtggaattgttcggcatgatcttctgagcgtcgatagcggcgaatacctggtcgtccggcagaggaatccctttggctacagccacgcttttgagttcataacctaacgtgatgaataggtcgatgtggttatttatcacttcgccaatcgtctcattgaaataggaggtgatggtggcagcggtcgagatcatgaagaatttcttccagatttccaagtcgatattatccggtattgtggtaaggatacgggcgttagccaatatatcctgcaattctttctgccgttttgttggggcttccttactaccgaagaacatccggtcctttatggtaaacttttctactcttcccggtctgaccaggcgggaaccgatgtaaacgcatcctttccaaatctcgttgttcggtaatagctgttgtatgcgttccgttatgtttgccccgttcagtaagggaatgataaccgtgttcggaccgatcaccggggttagctgggctatattctcttccaaatcgtagcttttggtacaacaaaacaggtaatcgacaggtcctatttcggcaggattgtcggtcgcgagggttggttttgctttgatcgtcaggaatgtatttttaacttcgatgccgttctcacgtatctctttcaggttttcaccccgagaaatgaaatagatgtcaatatcttcggaatctttataacgggcagctaataatcccccgtagtaaccgcctacagctcctataccggaaattgctattttagttttactcat

SEQ ID NO: 3 - DNA, 11554 bp, unidentified
  source 1..11554: mol_type = unassigned DNA
tcaggcctctgtgttgttttcctctgctgcttctgaacactcctcagatatcttctgttcttcaaaagctgcttctgctttctctaaaggctcctttgaaaggcttactccggcagaactgctggtttctgtctgtgtttcctctttcctgtcaaaatccggaagttcctccagattgtccggaatctcaattcctctctcaacagcacgaaagatcttcataaattctttgcctgtgatcgtctctctgcgaatcaggtaagcggcgatcttatccagtgcttctctgtgttcactcagaagtctcttggcttcttcataggaataatgaaggagctgcatcacttcatgatcgatctcggttgctgtatcatctccacagttaagcaccgctcttcctgaaagatactgattttcctgtgttgcaagtcccatcaggccaaatttctgcgacatgccatactgagtgatcatcgcacgagcaaccttcgtggcctgctcaatatcgttggccgctcctgtcgttacggtgtcaaaaacaagttcctctgccgcacgtcctccaagataacctaccagcattgcctccagttccttctgcgtattaagatatttctcctcttccggaacctgcatgacatatccgagtgctcccatggtacgcggaacaatggtaatcttctgaaccggctccgcatccttctgaagtgcattcacaagtgcatgacctacttcgtgataagaaacaatccttctctcctgtgcacttaagatacggtccttcttttccttaccgaccagaacaacctccacagattcctgaagatccttctgcgaaacagccctgcgtccgttcttgactgcaaggattgccgcctcattgatcatatttgcaagatcggatccgactgcacctgatgttgccagtgcaatggcatccagatccacggtttcatccagcatgacgttcttggcatggactttgaggatttccacacgacccttcagatccggacgatccacaatgatacggcggtcaaaacgtcccggacgcaagagtgccggatccagtacctccggacggtttgttgccgccaggatcagaagtcccttggaagtatcaaatccatccatctctgcaagaagctggttcagtgtctgttcacgttcatcatttccaccgccatatctggaatcacgactcttacctatggcatcaatctcatcaataaatacgatacatggtgcgtttttcttggcttcctcaaacagatctcgaactctggaagctccgacaccaacaaacatctctacaaactcagaaccggacagagagaagaatggcacatttgcttctcctgcaacggccttggcaagaagagtcttacctgttcccggaggtcccacaagcagtgcgcccttcggaagcttcgcaccaatctgcgtatatttgcccggattgtgcagaaaatctacgacctcctgcagagattccttcgcttcttcctgtcctgcaacatctttaaaaaggactcctgtctccttctggatataagccttcgcacggctcttgccgacacccatgattcctccgccgcttcctttgttcatgcgacgcataaaatacagaagcataaagaacagtactactgttggaagcaggacgcttatcatggtagaaacaaactcgcccatcacatcaggcggttcatatttaaaaataattcccttaccttccagtctctcagtcaacgcactggtatcctccatctgattgaccttgtagctttctttctggtaagatttctgaagttttggaacgacagtcagcactcccgactggagtgtcacttctctgatctgatctttatctaccatctcgataaatttatcgtatgtgatctcactggatttatcgctcatcatatctgtcacaaaactcagacacactaaactgatcagaaggcagatcaaaaatcccagaatagtctgacgattcttgttcggtccctgattctttgggttatttcggttcggacgattatcatccggacgcttatccatatgatcgttcattcttttcctcctcttattatcttctatattataaagagattttcgttataaatcaactggaaaactgtgaatgtttgtagtatactaaacgcgaatgcatttgactaagttactgcaaactgcagctaagtgtgatggaaaggaaatcgacaaatgaaaattggatttgataatgaaaagtatcttacaatgcagtccgaacatatccgtgaccgtatcagcaaatttgacaacaagctttaccttgaattcggcggaaaactctttgatgattaccacgcttcccgtgttcttccaggattcgaaccagacagcaagctccgtatgctcatgcagctcagtgaccaggctgaaatcgtcatcgtcatcagtgctgccgatattgacaaaaataaaatgcgtggtgaccttggaatcacctatgacgaggatgtgcttcgcctgatcgatgcttttacagagcgtggtctctatgtaggaagcgtatgcattacacgctatgccggtcaggaaagtgcaattcttttcaaaaaccgtcttgcaaagctcggaattaaagtttacttccattatagtatcccaggatatccaagcaatatccctctgatcgtaagtgacgaaggctatggaagaaatgaatatattgaaacatcaagaccacttgtggtcattaccgcacccggaccaggaagcggaaagatggcaacctgtctctctcagttataccatgaatacaagcgtggagttgctgccggttatgccaaatttgagacattcccaatctggaatattcctctgaagcatccggtcaatcttgcatatgaggctgctactgctgacctgaatgatgtcaatatgatcgacccattccatctggaagcctacggtgaaacaactgtcaactataaccgtgatgtagaaatcttccctgttcttcaggctatgttcgaaaagatcatgggcgactgcccttataagtcacctaccgatatgggtgtcaacatggctggaaactgtattgttgatgatgatgtatgctgcgaagcttcccgtcaggagatcattcgtcgttactataagagctgcggtgcccttcttaccggcaccggtacagaggaagaggtacgcaaaatcgagcttcttctgaaacaggcgcatgcttctcttgaagaccgcaaagttgtttctgcaagtcttcagaaagagcaggaaacaggcggacctgctgctgctctggagcttcctgacggacgtattatttatggtaaaacctccgatcttctcggagcctcttccgcacttattctgaatacactgaaagaacttgccggaattgaccacaaacatcatgtaatctcaccggaggcaatccatccgatccaggaactcaaaaccaaatatctcggaagcagaaacccaagacttcatacagacgaaactctaatcgcactctctgtcagcgcggcaagcaatccggaggcacgtctggcactggagcagcttcacaccctcaaaggctgtcaggcccatacttctgtcatgttgtcttctgttgatatctgggaattccgcaaactcggtatcgaactgacctgcgaaccaaagtttgaaaaagaaaaaaaatatcactgactcacagttttctgacgtaaaaataccccgatggatcattcaaacgatccatcggggtatttcataattacgttaaaaatcagtcctcataaccattcgggttcttctgctggaaattccaggaatctgcacacatatctttgatatcgtactctgcttcccatccaagttctttcttagctttggttgcatcagaatagcaggttgcaacatctcctgcacgacgtggtttaatagagtacggaatctttacacctgttgcggcctcaaaattcttaacaatatcaagaacactgtagccctttcctgtaccaagattgtaaatactgagtccggaattgtcctccagcttcttaacagcctttacatgtccctttgcaagatcaactacatgaatgtaatctctgacaccagttccgtccggtgtatcataatcatttccaaatactcccagttctttgagcttgcccacagcaacctgtgtgatataaggcatcagattgttcgggatgccatttgggttctcaccaatcagaccgctcttatgagcaccgatcggattaaagtaacgaagaagtactacattccactctggatctgctttctggatatctgtaagaatctgctccagcatggattttgtccatccgtaaggattggtgcactgtcctttcgggcattcctctgtgatcggaataattgccggatcgccatatacagttgcagaggaagagaaaataatatttttgactccatgctttctcattacatctaccagtgtaagggtacctgcgatattgttttcataatattcccacggttttacaacagactcacccactgctttaagtcctgcaaaatgaatacaggaatcaatgtcttctttttcgaaaacttcattcaatccctctctgtcgagaatatctactttataaaatttaactggtttacctgtaatcttttctacacgttcaagactcttctcactagagttgctcaggttgtccagtactactacatcatatcctgcattctgaagttctactacggtgtggcttccaataaaaccagctccacctgttactaaaattgccatggttttctcctcctgacgtttgttctggttctgtttcgatgtcattgtagcaccattcctttgttttaacaatatcttcttaaatcctccatcatattttactaaaactccgtcatattttactataattgttctctgccaaaatcattggatcattctcaaattacctgctcattttactgcttcctagtgaatattcctgtttttaatcgctctctgatcccctctttttccatgtcaatagtgttttttgtgcaatatatattattttttttgtttttttcgttatttttagccatttttattgacacgcttgttttcaatatatataatcaagctaatatatacgatttctcatgaacttgagctgactttttagtcagtttcacaatcaaaagggaggatttatttatgaaacgaaaaatcgctttagtaatggtactggcaatgacagcagcaatggctcagcctgttcttgcagcagatgacaagacaactcttgatgtcatcatcagccagtatggtacccagacacaggcctggtggacccagttcgaaaaagatttcgaagcagaaaatccggatatcgatctgaacctggaggttatttcctggaatgaccttgctaccaaggttaatacactgattgccaataacagtgctcctgacattctgaatatcgacgttcttgcagattatgtagctgacgatctgctgatgcctgcaacagaatatacatctgatgaacttcaggctaaattcttcccggcattctgggatgcaagcaacatcgatgatacagtatatgcattaccaatcctcgcttcctgccgtgcactcttctacaataaagatatccttgatgaagcaggtgcagctgttcctactacatgggcagaacttcaggatgcagcaaagaagatcaaagataaattcggcgatgacgtttatccatggggtattgatatgacaactgacgaaggtcaggctgcattctcttattatacatggaacaatggcggcggatttgttgatgaaaacggcgactgggctctgaacagtgacaaaaacgtagaagctctgaactttgcggtcggtcttgtaaacgatggatataccaactccgatcctgcaaatgagacacgttatgatcttcaggatatgtttggtgcaggcaaagttgccatgatgatcggaccgaacaacattcctacctatctctccgatggtggatatgatatcaactacgatgtaacaaccatccctgcaaacgaaggctgcgaatctatcgctatgggtgtttgcgaccgtcttgaagtattcaaggatgactccgcagaggatcaggaagctcgtactgctgccatcagcaagttcttcgacttcttctacgatgatacacgttacgcagattacatggtatatgaaggattcctgccaacaacccagacagcagcagaccttcttgcaaaagatgacgaaaccttcgcatcctggattgatattctccagagctgcaacttctacccggcaaccaagactgaatgggcagatgtaaaacagggtgttatcgaagttgaacagaacgcacttcttggtgatgatgtgcagacacttctcgatgaccttcaggctgatatcgcaggctgatctccagatttaggcacgatttaaccgggagccggacattagtgaccggctcccgcttctttttgacaaacgatttggtggtggaaatatgaaaaaaaagaaaacgctggctgcgatagagccatatctctggctgcttccaagcatccttatcatgacaatctttattctctttccgattttcgaagttttccgtacttccttaagtgaagtaagtaaagccggacttatcaaaggcttctgtgggtttgacaacttcgccaaagtccttaagggatctacttttaagatggttctcaaaaatacacttgtatggaccgttgccgttgttgtgatctccacagtgtttggttttatcctcgcactggtccttaacaataccttccgtttccgtaaagcagtccgtgcgatcgttgtttttccatgggcaacttccctgatcattcaggcaggtgtatggaaattcatcatcgacaaggactatggttctctgaacactcttttaatgaaactcggactgatctccagcccggtcaactggacccctacccctggcgcgtattttgcctgggaaatctttgtaggtatttttgtaactgtaccattcgttaccttctgtgttctttccggtctgcagagtatcgacaactcctattatgaagcggctactgttgacggtgcaaactactggcagaaactgttcaagatcactattcctctggtaaaatcctcactgacggtaagtacggtattaaatatcatttatgtatttaactccttccctatcatctggacgatcaccaaaggtgatcctgcaagccgcacagatacccttgttacctatctttataaacttgctttctacaaaggtaaatccggcgaagcagccgcggtatccgtgatcggatttctgatcctgtgtatatgcgcttctgtttatatggtagtttcactcagaaaggaggaggaagactaatgaaaaatcattcacgtgactccaaaagcatactccttcgggttcttctttatctttttgttattctggtcgtactggttaccttgtatccatactttgtcatgtttacgacagcagcaaagagccgtgcagaaatctattctccggagggaacacttctcccgatccagtggctgtggcagaactttaaggatatctggacactggctcctctttccagatattttctgaactccctgatcgttgcaggcggctccactctgatcgcgatcgtatgtggtattccggcagcctatgcacttgcccgaatgaaattcaaaggcaaaaaggttttcctgggaatcgttatcatctcccagatgtttgctcctgtagtccttctggttggtatctataagatcatgtctgtttttggcatgacagacagccttattggtctcgtattcatcaatgccgctttcaaccaggcatttgcgatctggctcctgcgcggtacatttatctctatttctccggaaatggaacaggctgccactgtagacggctgcggcaaggtttctgccctgatccgtatcctgcttccggttgctgcacctggtatcgtaactgctctgatctttatcttcatcaatgcatggaacgagtataccgttgccctgaccctgatctcaacagacgtgttcaagcctctgactgttggtatcacaatatttaatggttacaacatgatcgaatggcagtatctgtttgcatcctctctgtttgctacagtgcctgttatcattctgtttgtacttatcgaaaagcatctggtaggcggccttacctccggtggggtcaaaggataaacagtcaaaaagcttcggatcttaaatgatccgaagcttttttgaatactgctctgtatatttatttgtatctacttatatttctcaatgatctcattcatctgcggaagcttttcctgcatatccttaacaagagtaagctgtgtcctgcatctgtcaagattatgtccttctctgtgtatcttaaagtaatgatctccttccagataatctgtaagaaaacggataccgttctcaaaagtcataagaatcgcacccagcggcagggtttcaatctcaagttctgtcagtgcaccaccgcagccttcaataaatcccttcgcataaacatcaaacagatgaagattacaggatacctttgagagatctctttcatcttccagtgctgtgcttgccccaaaccggatagaatcaccgaaatcattggctgccagccccggcatcacggtgtccagatcgatcacgcagacagcctttccggttttatcatcgatcatgatattattcagttttgtatcgttatgagttacacgaagcggaagccttccatctttctgcatatcatacaatgcccgtgtcagttcttctctttccagaataaagttgatttcatcctgaacagctgcagctcttccacatacatcttcagctactgcttttttaaatttcttcagacggtccggtgtattatgaaaatctttgatcgtctcatgaagagtttctgccggataatctgccagaagtctctgaaaatgtccaaaagccactgcactctgataaaaatcattatcatccttgacctgttcatagcaggttgctccctctataaacagataaattctccagtaatctcccgttgaatcaacaaaatatggaagattttcccggctgtttaacagcgtcagagtttcacgctccggatcgccgccattttcaatgatctttttgcggagccatgaagtaacaccgctgacattttccatcagttcctgcggattcttaaagatacgcctgctcattctctgcagaatataacgcctgatcccctccggggtttcacaggtaagcctgtaggtatcattgatatgtccgtttccatacggaatacattcttttagttcacccggcaaattaaaagcttctgtcacttcggatattttattgctgttttccaccttatgcttcctcccataaattctgcggatacagtccctgatctttcagattctggatcgcgttcataaccatcggcttatcttctttgtatgtgactccataccatttgtcctctgacttcaggactctgactgttgctttcttttcctgaagaagttcatccactacaaacggaaggaaatattcccccttcataggattgttctgaagtgcctcatcgaggaatggtttaaaacgagctttcagttcctgcaaaatactttctgaaaagccccacatgttcatagaaacgatgctgcccttcggaagcattgtccaggtcttaccgtcatcttctgtgtacgctgtcccaccgtcatgcttctcaatatgtgtacgctcgttgatcttgatcagatgaccatcctcatctgttacacagacccctcttgcaacatgtccattctccgtcagggtattttcaaggcgataaccgaccatcatataatgataaacgtctccatcttcctgattggaagtcaggaaatcatatgccatcttaaatgcatgcattccataataatcgtctgcattaataaccgcaaacggtccgtcaatctcatctatgcagctcagcacagcatgtcctgttccccacggttttactcttccctccggaacagaatatccctctggaagatttgctaattcctggaacacataggaaacctctatctgtctgctcagccggttgccgatcacctcacggaacatctcctcattttctctctttataataaatacaactttttcaaatcctgctctcactgcatcataaatagaaaaatccataatgatatgtccttctttatcaataggatcgatctgtttcaggccaccgtaacgacttcccattcctgctgccataactactaaaaccggtttcttcatcatcttttcctcctgtttctcagtgaaatactatctcctggatagtgttaaaataactgtacaccacaaacttctataagacaataaataattcttatcctctatataatatgtacacttttttcaaaatagtatttgcacgatcaatcgatatttttgtacaatattatttataatttgactatttcgtacaaatttattattataaagaaagataataatattataaatcaacaactcttatcttacagaggaggaatttccgtggcttatcagagtgtttcgctggagcgggaactttttataaaaagcatttataccattcattactacgaatatcagaatgatttttattttgacggagagcgtcatgacttctgggaatttcagtgtgttgatacaggagccgccgaggttgttactgacaatggctgttatacactgtcccgtggacaggttatctttcatcgtcccaatgaatttcatacattaaaggctaccggaagaactgcaccacgcgttgtagtgatctcttttgcctgcgattctccatgtatgaagttttttgaaaacaaggttcttaatttttctgataccgaacgcagcattctcggccgtatcattgccgaagcccggaactgcttttcttctcccatggatgatccttatctggaacaaatgaaaaagaaagaaaacatccccttcggagcacagcagcttctgatcctgtatctggaagaacttctgatccatatgatacgccgctgtacaaattcacactattctgcgtctgccggaatttacgatccatgtcagacgacttctgatgtctgccgggagatcatacattatctggaacagcatatccgggaatctctgactatccaggaaatttccagaaacaatatgatcggccattctcagctgcagaagatttttcgagaggaataccagtgcggtgtgattgaatttttcacccgtatgaaaatagattttgccaaacagcttatccgggaaaacgatatgaactttactcagatttcagattttcttggctattcttctatccactatttttcccggcagttcaagaagctgtccggaatgacgcctacagaatatgccacttccataaaggcaatatccgagcgtccccagaacaggaactga

SEQ ID NO: 4 - DNA, 6537 bp, unidentified
  source 1..6537: mol_type = unassigned DNA
ttattttctcccgcgctgcaattcaatccaggccaggtctccgcgctccaggccgtggatcaaaacctcggcagtggcaatgttggtggcaacggggatggcgcgggtatcgcacaggcgcagcagggtaacggcgttcggctcattgggccgggcgttgacggggtcgcggaaaaacagcagcatatcaatttcgccgcaggcaatcatggaggaaatctgctcggcaccaccgcgtgcaccggggtacaggcagcgaaccggcagcccacaggcatcgtgtaccactttgcccgtcacgccggtggcaaccagttcgttctgagacagaatacgcacataggctgtgcagaactgggccaaaagctctttgcgggaatcatgggcaatcaatgcgatcctcaaggtgggtgcctcctataattagttatttatataatatcatagaatagattgctgaaaaatgcaagccacctttggttaaaccacccgctaaccccgaaaaagcgtgcagtgttaccaaaaaactttacacgattttggcaaaaccgctttgtgcgaatgtgctataatatgtacaataaatacataacctgtaaggcaccaaaagcgccgcacaggcaaaggaggaaaaacgctatgaaaaaatccgcacagaccgtcattcgggaaggcgcctgctatactatcgctgccgccaatggccgcgtgctggaagttgccgatttcaacaccgagaacggcgcatccatccgcctgtggagctatgagggtcagccctggcagcaatggatttttgaggaagccgccgaaggccagtaccgcatcaaaaaccgctttaccggcaaggtgatggacctggccatgagtggtgttgtgaacggaacctgggtgcaccagtgggagaaaaccaccggcaagggccagcggtgggagattgttcccgccgatggcggcaaggccaagatccgcaatgtgctggctgataaggttattgacctggtaggcatgcgggttgataacggtacccaggcccagatctggcaggatgtgtttggcgaaaaccagctgtggagcatccagcccgtgccggataagctgctgcaaaaggatatgccaaagccggaacccaagaaaacggcccccaagtccacccgcacccagaccggcaccggccgcgccaaaaagaccggcggcaaaggcggacgccgcgcagccaagtaaagcagagaaaaccgaataaataaaattgaaacagcccgctcatccggcaacaaacggatggacgggctgttgcggttacattttgaaagccaaactttactggcggatcatgcggtagccaacgccgatgtgggtctggatatagcgggggtggctggggtcttcctcaatttttttgcgcagcgttgccataaatacgcgcagggacggcgtatccgatgcggccgggctgccccagacttcgttcagcagatagttgtgggtcagcactttgccggtgttcttggccagcacgcagatcagcttgtactcaatgggggtcagatgaatctccgttccgccgcggtacacacagcctgcggcatagtcaatgcgcagttctccattctcgtatatgctggcctggtcacctgcgcgggaagtatcataccgcacacggcgcagcgccacgcgcagccgggccaaaagctcctctacgctgaacggcttggtcaggtaatcatctgcaccggcatccagggcggatactttgtcggtatcatcactgcgggccgaaaccaccagaatgggcacgttgctccacccgcgaatcttgcggatcacatcaataccgtccatatccggcaggccaaggtccagcaaaattacatccggccgtgccgaagcagcttccaacagggcaccggctccgttctgtacacggtggtactgataattgcgggtttccagtgtggtggagatcagccgtgcaacagccgggtcatcctccaccacaaggatcagcggtttattcatacagggtcacctcagttcgcgggagtgtaaaacggaagcaggcaccgtgcggtgcagcgttctgtacatcgatcacaccgccatgggcggcaacaatggaacggcacaaggccagcccaagacccagcccgcggcggccatcgctgcgggttttgccaagggtataaaacatatcaaacagcttgtcacggctttcttccgggatgccggggccgtcatccgttacgcagatgcggacaaatttaccctccggcgcggcgaaaagctcgatgcgggaatgttcgggggtatatttgatggcgttgttgatgaggttcaccagcacctgctcgatcagctgggcgtccatatcggccatcagcaggtcatccgccacgttggtcacaatggtgtggcgggcggcgtcatggtctaaatgagccagtacatcgtcaaaaatgtcttgaatcagctccggctgaatgcgcaggtttacctggccgttctccatccgggtgatggaaagcagattttccaccagatggttcagccagttggcgtcctcataaattgcggcagaaagctcccggcgcttttcctcggtcagcaggggatttttctcggtcaaaatcagcgcgttgccggaaatgcttgtcagcggggtgcgcaggtcatggctgatgctgcgcagcaggttggcgcgcagctgttcctggcgggcggcttcctcaatttcgcgccgggcgcggttggaggcttctttttccagcgccaaggaacacacatccaggatggataatgccagattgtgctcataggtgctgaactcatgcagcgccgggcaactgcggtaatccgtctgggcgggagggggcagaatcagggttcccggtgcaatgtgctccggtgcgggggcaaagcagaccgggcgctccaacagcttgcccagctgggtggccgttatccgcagaatggtgtcagggtcctcggctcccaacaggctgcggctggcttccagcagcacctgcgaagcataggctttgcgctcgctttgggcggcctgtaccttgatacgccccgtcagcgaggagcagagcaacgaaacgcagagcatgaccactgccgttaccatgtcgtctgaccggatgcggaactgcataaaggggtcaatgaacatatagttgaccagcatcaccgagaacagcgaagccacaacgccgtacaccaaccccgatgtaaagacgttgatatacatgacgcccaggatataggtcaggatatagttggaagaaacaaaatccagccggaaaaatacccagcttgtcagcgtacacagcgcaaggaccaatgcggtcagggcgaagtcccgcagccaaagcagggcaggtttgcgttgcggcatgggtgcaggctcctttccactacagggcagggaatgcggcaaggcggcccagcactgtatttatcctatggcaacaccgcacaattcccgccttgcggcttaagcaccgctccggcagctgcggcacggcatctgcgttgccaaaatgctcgataagacatccagtattatctgcgcttttggcttggcatctgccgcacctcgctcgccgtatcggcacttagaattatgcggtattgccctattataacatattgccgaactctttgatacaaacggaataatctttatataaatttaatgtgggcctaccctatccgcggcagccccggcacttttttgcacgctgggcggggcattggttgaaatcaggccgcaaatcggttatactattttgtaataattggattgttctgccctgcgggcggtattgccatataaaaaggagtgtttttacaatgtcccataccgttatggtgaccggtgccgatggctttatcggcagccatctggccgaagagctggtaaaaagcggcgagaaagtgcgtgctttctgcctgtataactcgtttggttccctgggctggatcgataccctgcccccggagatccgcaatgaaatggatatctttatgggcgatgtacgtgaccccaacggcgtgcgtactgccatgcgcgggcaggagcgcgtgttccatctggctgccctgattgccattccgttcagctaccacagcccggacagctatgtggataccaacatcaagggcaccctgaacgtgctgaacgccgcccgcgagctgggcacccagcgcgtgatggttacttccaccagcgaagtatacggcaccgcccagtatgtgcccattgacgagcaccacccgttccagggccagagcccctactctgccaccaagatcggcgcggaccgcctggctgaaagcttttaccgcagctttgacctgccggtttccattgtgcgtcccttcaacacctatggcccgcgccagagcggccgcgccatcatccccaccatcatcacccagctgctggccggccagcaggaaatcaagctgggcagcctgacccccacccgcgactttaactatgtcaaggacaccgcccacggctttatggccattgcggactgcgatgctgccattggccaggaaatcaacattgccaccggcgtggaacattccatcggcgatttggccaatgagctgattgcccagatcaaccccagcgccaggatcgtctgcgaagccgagcgcctgcgccccgaaaagagcgaggtcaaccgcctgctgggcgatgccaccaagctgcgcaccctgaccgattggaaaccgcagtatacctttgaacagggccttgccgaaaccattgagttcctgcgcggcaacctggaccagtacaaggtcggccagtacattctgtaagggcggttgtaaggaagttttatgccaataaaattacaaaagctgcccgccgctgtgcggtgggggctggctgtgctgtgcgccgccgtgtgcggcgtgctgtgggcctattactggcgggtgttctttgggctggacagccgtgtgtcccccctggtggttacactggggtgtgcggcctttctggaagtatgtctgctggccgggtattgtgtgcggcggtttgcaaaaggatttgcggcaaaaggggccgtgtgcatctttttgtgcgggctgctgtttgcatttgccaacccgccgctgcaaacgccggacgaagctgaccattacctgcgcacctatgccatctccaccgggcactttgattttgatgcttcccgcacctacccggacgatgtggcatacctgctggaagcgttccccggtgcatgggtgaatgcgcatacctctgccggtgtgggcgctgaccccgataccggggcggaaaaagcctataacaccgcgggctatgccctgaagcaatacggcaaggacggcgcagtgcagagcatggcggacagctttgccctgtacctggcgcacgatgtgcgggattctgtgccggacccagtcagcgagccggtcagctttctggtcattccattcctgccgggtgcggtcggtatggtgttggcacgcctgctgggctttggcgcgctgggctgcctgtatggcggacgcatcgtcaacctgctggcctacacgctgttgtgcgcgttggcgctggccaaagcggagcgttaccgcccggcctttgcggccattatgctgctgccgatgtcgctttttatgggggcatcactgagctatgatgcaaccctgctgggctgctattacctgatgcttgccctgctgacccgcagggagtggaacacccaaacggcgggtatttacaccgccgcctgcatctttgtcaatatcgccaaaccgtacctgaaccttttgtgggtcctgcctatctttttggtggcaaagcgggaatggcacgccaagggacgccgcccgctgtgggcactgggcagctttggcggtgctatggccgttaccctgctgacggaatggtacggaacggcgttccgctataactatcccatgattgagcgccagggcggcagcacggtaaacggcggtgaacagctggcctttgtgctgcgcaaccctctgcggaccattgctgcgttctgggggaccctgggagagaatgatttctttattgggcagctcggcctgttcggctggaaggacctgcccatcagctttttgaacctgaccggcccgctggtgctgctgttggccgccctgctggctgctgcgcagccaaaacgcgccgatgcgttccccacccgccgccgcgtgggcggggtggcgctgctggcgctggtgtacgccgccggtgccatggcagccatgtatatcacctataccccggtgggcatggtgcgcattgtggggctgcaggcgcggtatttcctctgcgtctggctggcattgctgcccgccctggccgtactgctgcgcaaaaccatctgccccgccatcacggaagaaaaggccgaagcgaccatcaccccgctgtgcgcctgctatgccgtttttggcgctgtgctgctcttccagcactactttgtggggccggtgtacgtcgtatacgcgtga

SEQ ID NO: 5 - DNA, 16449 bp, unidentified
  source 1..16449: mol_type = unassigned DNA
ctattctgtggcagtattaattaaaccgtttttctgcctctttagcgatttctgtcttgtctccaccttctctgcagcttccttgttttctgcactgacagagatatagtttttcagcttcgactcggtatcggaggagcgcaccacaagagaaccgttatcttccagcagggacttgagcacgtcagacttcggcagaccatccagacccggagcgtaatccagcagcttaacgaccttcttgccgccgaacaccttgatggcgccacggaatgcctgcataatgttctgcatcttggcaaaaccggcgctgccgtcaaactcataattgtgcagattgttcaggcaatatccgtaagccttgtacaactcgtccagcaggctgatgcccttggtcgcatagtagctgaacatctcacagatcatgtacgcaccgtctacgccgtctttgttacggacgtaggagccggtcaggtaaccacagctttcctcatagctgtctttcttgccctgcttttccaacttaccgatctgctcgcccatatccatggtgacgatcgtcttgaccataaccgggtcaacaggcatcttgccgtgcttcacacgctgactgcaattataatccagcagcatgccggtctggttgccggtcagcagttcgtactccactgccttattcttgacggcgatgcccacacggtcacagtcagggtcagtcgccagcagcaggtcagcgttgcacaccttagcatatccaacatttgaaacatcatatgtctttactgcgtcaagaatccgcaatgccagaagcgtctccactcattcgtcagttaaataccatacatgagatagtcaaaaacgctaaccgtcaaaatttcagtcatattcttttcctcaatcagtccatcatgcccgtattataccactgaatcatacgctcataatcgtcctgcgtatccagatctcttatgcgcatcggaactgcctttagaggaagaagtggttgcagcatctcatcaattccttgtgcccctgcaatcaaccggctcgataaaactttggaaaggcacccccattcatacttacttgggctacgtaagaattcgtttacttcattatttgaaacagccaagtaaattggttcacttgagtgtgcttcacatacacttatacattcctgtggctcactcataaatcgattgaaatcgtccctattaataagtaaatcgccatccataattacgacgtattttcgcgctccaattaatgtcttagataagctcacccctgagcctgtcttacgataatcattattaaaagcaaacattacatccttacggatatgctttacctccttgataaccttttctgcttgataaccaacggaaacgcgaatatcatcatactcatcgagcatttccagctgacgctgtataatagacttaccagctatttttaccagtgcctttgttgtcccaataccaagtctagtgcccattcctgcacaacagattacaacgctaatatcatcgtgtcccataatcatgtttccttctaatctttttatagaagcgtcctgagaaaatccgcgcatctattatcgtcgtaaaatgcataatcaatattctgaatcagcgatggcgcaatatccctaataccaccaaaaccaactgaaatattagcaactcgtgccataccagaatcattatctccatcaccaataacaacaagtggctgaacaaactgttttgcagtcaattccttatcaataacactgactacttgcgtgattttatcgtctttatagtttgctctagagcaatacacatgatcattgaggccgagtttgcgcatcaaatcattgatccaaatatctagatttccagttacaacgtagcacctatcacgattttcccttataaactgtgcgatattctcattcaagggtatctcagctaccatcgctcgcgtttctgatacattcataacgcttaatatttccaccctttttaggaaactactcttaaatggaatctctccattcatggttgcttccgtaagttctcgcatttctttttgtctatttaccttttctgcaatagtaggtaaaatttctttacgtgtaattgtcgaatccaaatcaaataaaaatatatactcagacatctctttcaatcctattctcagaactcagcattgcatttaatgtctccgccaattttcgaataaacatatcattatccgcttcatttctgatggcaattcttaaatattgtttctttcctttgattttcttacttagagtcttaataaagacctttttttcaagcaacattctctgttttaattcttctgcatccaaaccgtcaagcaattctaccataagatagtttgcttgagatggtattacacgtatatatcttaggtcttgaagctttgatataaatctagctctttcttttctaaatttatctagcgactttatatatgaatcacgatacttaccgcaaatctgcatataaaattcagcaaacgaatttatattccagattgatacatccaccttcatccttgaaattaatcctttatctccgcttgccaagacaccaagtctcaatcccggcacaccgtacgatttagaaatactcttaatcacgtatagatttggatattgatttaaaatttcttgatcaatcaaagatgaatttatctcatcagaaaaatcaacaaatgattcatcaataattatcttaatgcccttatctcttgcccacgatatcatcctcagcatatcgttcttaggaatataattacctgatggattatctggattaaccaatacaaggttagaaatcgtagttttgccaaagtattctataagatcactcgcactataggaaaaatcttctgattctaccagataattaaccgtttcgatttcagtatatctgttgggatattcatcaaacgtaggtcgaacgaatccagttttcccttttataaatcccatcattgacttaattagctctgcagcaccgtttccaacaataatactttctggagaaaccccaaatgcgctcgctgctagttccgcattaactctcatccctgacggatattgttcaagcaaaactttaaaattattctgcagttcctcaactagttcacgtggcggataatatggtgtcacaagataaaaataatccagatattcaggatatctccaatatccgccccaacttcccagcattttatccgcaatactttttttatcttttgaaaaaagaattgtagcctgatttacgtcctctgtattattgatttcacgccatacagcattgcttacacgcaaggccttaatcctcgtgtcgtttgacattgcaatcacattcaacggtacagaatattccagactatctcctagcacatcaattatgttttccaataccggaacaaaatatttttttgtaaaattcatatcaaatttgcaaattccaaccatccgacacgaattcaactgataagtcgaactcaattgagattcttgtccaactgacaaaacacgagcattttcgtcaacaaatactggtttgcctgtcatccaatttttataagtatctactgatacaacacattccccatccgtttcaagtatagatttgagaagattatcttccagcacaagctgagaatttagaataacagtatcatccattgacagatgttctcttcccaagaataccgagtaaatactctttgactctttgtaaaacttattttctaaaaacacaagttcagtctttaagtttaatcccttgctgaattcaattagactttctttattatttccagtaacgagaattatttttgaaacaatactattgtctagctgaatcaacattctttctattattggaactccatcgatttcaaccatccatggttcattactttttcccaatccagtcagacccattatctctcgatccgctaaaatgagtgcctgcattatgctccccttctctcgcttttaatttcaatctcaaatagacgactatcagaagcacaaatttcttctccgtgaaacctagtaatcagtacttcctccacaccatcttattgactacattcacatacccctgaataatgcgaactactttcatagacacagtttcatccatatagtcggggcagggcttgcccagaacgcccttctgcttcatctcaatggccatatcggtggcgttgagaagttcccgggtggtaatgccagccagaatgaagtcaccggcttccagtgcctccggacgctcggtggaggtacggatgcacacggcggcgatgggatggccaatggacagatagaagctgctttcctcaggcagagtgccagagtcggagacgattgccaaagcgttcatttgcagcttgttgtagtcgttgaagcccagcggctcattgacccggacacgtgggtccagctggaaaccgctcttttccagacggtgcttgctgcgaggatggcaggagtacaggatgggcatatcatacttctctgccagagcgttgatggcggtaaacaggctcaggaagttcttttcggagtcgatgttctcctcacggtgggcggacagcagaatatacttgtccttttccagccccagacgttccaacacattgcttttctggattttctccagattcatgtgcaatacctctgccatgggagagcctgtctgataggtacgctccttgggcagatcagtatctgccagatacttccgggcgaactcggaatagcacatattcacgtcagagatcacatccacgatgcggcgattggtctcctcgggcaggcactcgtccttgcagcggttgccggcctccatgtgaaacagaggaatgtgcagccgcttcgcagagatggcggacaggcaggagttggtatcgcccagcaccagataaccctccggctgcaactcggacagaagctcatagctgcgacccagaatgttaccgcaggtcacgcccagattctcgcccaccacgggcaccagaatatccggaccatactccccgaatgtgttcttcagttcaaaatcctcccagaaaacggtggaaagatttctgtcccagttctgattataatagaccacgcagcagtcaaaatactcccggcagcgcttgataacggcagccagtcggatgatctccggacgggtgccgcagccgatcatgaccttggtgcgtccatcatttttccatgtaaaattgtgttccataaaaatctcctaacgtcaaccagtatcttctcttacaccggctcgaagaaggtgtccggatggttcgggtcaaaaatttcgttgcaggtcatcaccgtcaccagattctccgtctccgacaggttgataatgttgtgggtccagccgggaatcatgtggacagcctcgatcttgtccccagaaacctcaaactccaccgtttctccggtgttgatgtttcgctcttggatcaggccgtgcccagccactacaatgaacagctcccacttggagttgtgccagtgctgccctttggtgattcccggacggctgatgttgatagacacctgaccgcagtcagcggtatgcaccagttccgtgaaagagccacggttgtccacgttcatcttcagggcatacttgaacttgtcggtgggcagataggtcagatacagggagtacagcttctttgcaaaggagccatccggcatcttcggcatcatgagggtcgtgggctgcgccttgaactcctgcaacagatccacgatttcgcccagcgtgaccttgtgggtcgcgggaacgcagcagtagcgaccgtctgccttcagaacagtctctacaccgtcaaactcgcagtgctgctccttgccttccagcaggtcgaacatcccttccacaagatcgtcgatgtacagcagctccaactcggtgctgcggtcgttgacggtgaagggctcatcattggcaactgcccagcagaaggtgctgacagcactgttgtacttagggcggctgtgtcccatcaggttcacgaaacggtagacggcaacctttgcgccggtctccttggcgtagtcgaagaacagctcctcgccagccttcttgctgcggccgtactcgctgttgccaaagcggcctgccaacgtcgcctgaatggaggaggacagcatgatggttgccttgttgttatactttttcaggcagttcagcaagtcagatgcaaaaccgaagttgcccttcatgaaatcttccgggttctccgggcgattcacccctgccagattgaacacgaagtccgccttgcggcagtactcgtccaactcctccggggtggaatccaaatcgtactcgaagatttcttcaatattcaatgccgggcgggtcttattttttccatcccggatgtttttcaggttgttgcacagggcggttcccaccatgcccttggcacctgtgactagaatgttcatcctatcacctctttaatgtactgcggtgcagtccggaatatctgcgccatccagcacggttgcattattgcagatggtgcagttgctaccgatgcgggcaaagttccccaccgttgcgccggtgcgaacaacactgttggtgtaaatcaaagcgtagtcccctaccgctgcatcacagtgggcctctgttccggcattcagcaaaacaccgtcgccaacggacgcaccgttctggacacaggcattttgcaataccacgcagccacagcccaattttgcgtatggactgatgtaggcgctgggcgcaacgatattgggaaaagcaaagccaagggtcttcaccttctcatacacctgtgctcggaaccgattattgccgattcccaccaccagcaagccatactccttccgcagctccggcagatcagcaagaccgccaaccactggaatgccgcaaatctcaacgccaacaggctgtccatcatccacaaaggcacagtcatattggagcatcgcctgctccgcaaccatacgcccaaagccgccagcgcccaccagcagcagcttttccttagacattggggatgcctttcagctcattctggacatattcagtggtcagaatcttcttcacagtgccctccacatccagacgagtggtattatggctggtgtaagattcatctgccatggtatgtacttcgcccttgaccacgaacttatcatagttcaggtcgcgattatccgcagcaacacggaagtaatgacccatatcctggctgcgcagacgctcctcacgggtcatcagagtctcgaacagcttctcgccgtgacgggtgccgatgatgttcgtgccggtatcgccgaacagctgctgaacagccttagccaaatcgccgatggtagaagcatcagccttctggatgaacaggtcaccggggttggcgtgctggaaagcgaacatgaccagatccacagcctcgtccaagttcatcaggaagcgggtcatgttggggtcagtgatggtgatggggctgccagccttgatctggtcaatgaacagagggatgacagagccacggctgcacatgacgttgccgtaacgggtgcagcagatggtggtgccgccacgctccgcagccacacgagcatttgcgtagatgacgtgctccatcatggccttggaaatgcccatggcgttgatggggtaagctgccttatcggtggacaggcagacgacacgcttaacgcctgcgtcaattgcagcgtgcaagacgttatcagtaccgatgatgttggtctggacggcctgcatggggaagaactcgcaggaaggaacctgtttcaaagcggcagcgtggaagatgtagtcaacaccgggcattgcgtcacggatagactgggggttgcggacatcaccgatgtagaacttgaccttcttggcgttctccgggtgcttggcctgaagctcatggcgcatatcgtcctgcttcttttcgtcacgggagaagatacgaatctccttcaggtcagaatccaagaagtgcttcagaacggtagaaccaaaagaaccagtaccaccagtgatcataagggttgcgttatcaaatgcagacattttaattttcctctcttactttgcttcaagcgatttctttatatcagaagaacaaattccctctgttctctttaaacgaacaactcttttgttgtgctcttcacaccactgctctaccgcgtcaaaacgtccaccacggtgatcttcaccaagcgcaagaatatcaaaatcaattgtccctaaaaattcaggatcaacagattcatacaccactactttgtcaacgatccgcaatgattcaagcatttccacccgttctgcggtcgtatataagaccttagcatccggtttatacttcttaatataatctccgtcttgaacggccacaattaaataatctccataatttttgcactgtttgaacagtcgcagatgtcccaaatggaagtagtcatatactccaaatgtaagaattttactcatcatcattttcttctttcatttttcaatataaacaataacggatcgtatactgttgcatcaatatcattcttatacctttcataaaaacaggtattctgtacatccccaaatcaccgggcacttatttgcgcgcgcaagttgttggaacgacctctcgatttcgggcgaatgctcgccctgtttcaccacctcaatacactctctcaaaagtgcataaaaagctcgtccgaaatggaatttcacctcgcatagttgcttctgttaactgccacatttcatcaaattttccgattcattttgaagattccagtaaaacctctttacgcgtaattatggaactcgacatttcctcacgctcactacccttttacttctggtatgctttatacatatgatgggatactcttttctcttcgggaggaagttgcatataatcgccgtaaaatgcgtttagccatttatcatatccaacaggtgcattgtactctcttccctcaaaaggaacctttatgaatgaagaaaaaacatccttttcacaaacaattctgggaacagaagtgaaatttccgactgccgatgtattcgtatcagcatatttctttgaattatcaacaatctttttggaaaagtatcctttcgggaaaatcttcaaaacttcaaagccaaccgtttttacaatgtcttttataattccatgcgttccaacaacaccattttgaacagcatttaattttgtataccaatctcctagtttgtacatttctgcaactttttggttgctttcaggagcattgtcatagacaaaaacgtcaatattcacactgatcttcatgccgttttcatctggttcatacaaaacagtttccgtgtccagcacttttccataggggtaatagaaactattgccaagctcccgacaaataaatttatagcgaccattcgcttgattaaaaatattcataaatcggtcaaaatccggccgcaacattccaatatcaatatcatcatcccaaggaatataccctttgtggcgaattgcgccaagtaatgtcccgcaatccaaccagtattgaatttggtttttctcgcaaaaatcagcaacggtatttaaaatgccaagctgatagatttttacttcttcttcgttaagttgtttcatatgattctccttaataggcaatcaactatttgaccttctaagtcttgcataatggttatctcttttctctagcgaatagttgctaaccgatagtttttctaaatctaagcgaacgcttgatgacgtggccttattttgaatctcaatttttcgaactcggtagatttttccgtttaaatttataagtgtgccctcacggagtttaacaacgctattttgcttcttttcgacatatgcaagattgtcataacaacttccataaaattcttgactggagaaaaacatttcaggtgtagcaaccataccggtagaaatatttggctcttcccacaaatcttttagggtatctagaaattttgacggagttttaagatgatgctcgagagtgatataaaaatgtgagaaatctttttgctcaattatgctaacgtgttcttgtgggacaggtagatattttgtggcgtctgaattttcagattttgtgtcattttgactctctctgtatatttctttactttgttcaatgggtgtgttttgagtgacattctccatcttggtatgttttcttttccatgccaatcttaatagcaaaatcgcaccaattaggacatacccaactacaagtgctattgcccagaggcttacatcagaaaagtttgtgataactttttcaatcaacatacggagcgcacctccttataaatcgaaactgccgcacataaaatccaggataatatcccaaatgcaagaagcaaaaaagcacatgaggtttcctctctatctgacaatggaacaccaataaatgcactacggtacactactatataatttatagcgaaaataaagaatgaaaccaaaagccatcctttcaaaaatccgtgaattttatcgacctgattgttttcaaacaatgtcggccatactattccacatacaagtgctccaacttcgacaagttcattgctggaagcttttccgtaaacaaaatgaaaaacaagaaacacacaaaatgtgcatcctgaatacaagaatgagcgagccgcccatataataagcaattttgttatatgaatcgctctttgtaatgccgattctactttatcggtttcttttgcattcttttcctctacttccgtcacgatatcctcctgttacttcccatattggcttagtaaaactcttttctatatttccaacaataccatccgcggcttgccataaggacaagctccgttacacagcggaataccgcgatccacatcacggtaaaatgccccgttgcaatcagcaatagcaggcttgccacctgaacaacggcagacagaattgttgtttttgtcacctgtgcggccttgtccagtgcgcccaatgtcggccagcccagcacgattcccggaaaactgaaaatcagtactggcaccaatgcgcggaacagagaagtcgctgcaacatactgctcaccaccaacaatctgaagtacatacggtgctaccgcaatcgagaacgcgctgcctgcgaacacaatgggcataaaaatcatcagaagccgcttgataaacttccagctttttgtcttgatcatctctgggtaaatgccatccgtaataggggtatacatcgtctgcaccgcgccaattagctgcatacagacactccaatatgcaacttccgttgctggaaggaatgcgccaatcagcagcgtattcaatgcaccaaatgcagttgttgccatgttggaagcaaaatagacaaacgaattttttagctttttccacgctgtgcttacactggaaaagtgaatcttaatgttttctttcttcagttcaacaaacacaaggataacagccaccagcgaaccaactgcatccagtaagggaacaaacaaaatgtccttatccgagtggacaaaaataaaagtcaatgctgttgcgatgccgcgcatagcgacaaagcgcagcgtgatgacctgcattttttcgatacctcggaagaaataatcaaacaaaaacaccgacaaaaacactgtcacaaatgccaacagcgtatatccgatgttggcgcgcagcaggggaatcaccgcaatcattcccagcagggcaacaaaagccgccgccgccaacaaaacgcgggcaaggagaatgtcaccaacttctttttccaatttttcgtggtcgttcttcgcgtttacaatatcctttgtgccggacagcataaagccaaaatctacaaccaactgcatatactgcattacagcttttacatacgaaaccacgccgtagctttctacagaaagcacacgggtcagatacggcaatgtcaaaaggggaaatacgattttggcgattgacataccatagagcattatagtatttttaattacattgcttttcacgtttcaactacctctacattataattttcttgtgcggaggatatacaaccaccaatcataaataatggtatccaagaacagtttgtatatagaatggtaggaactgaaaaaccgactatcaaaaacaccattaaaacagataatgtatagcagctaagttttctatcaggtgtatcatttatttctttaattgcaataaaaaaaagcaatgcaaacaataccaatccgcaatatcccgtatttataagaacttttacatatgtgttatgctcgttcaatcctgaatatccaaatatttgattgaagttcattgctgctccaaatattttcgtaaaaatattttgtctgttaaatgctgttagtaacaatgtccagatttcatttctgccctgagtattgcttgcattcatcaaatctgataatttatcgaaatgcaagctgagtagtcctctatcctgaaaaaatttggtgtttgaaacaaagcgaagagcatatatgcaaactaaaaacgcacacccaagcatcaaaacatttttgaatgaaatgatttttttattttttctatactgaaagaaaataaataaggcgacgatagtgcatagataaataattcgtgcgttacaaagtacaattagtaccactgcgatagcaagaggaataaaatctgttttttccatctttttgttataaatccatgtgattagaaagtagcagagcatgacagcaaaatccgttttgaaaaaatacattcctctatatgtgacagctgacccccatactattgttccttttccggcgaggcaaacaataagatttataactagagcaaaaagaagcgatgatgttaagctctcccaaaccgtatcaatatcttttacatagaatctgcctaaaaagtataaaagcagcgaagaaatgattttcaaataatcaagatatagttctggtgatttaagccatgatcccgtaaacatcaacgcaatcaaaataacgattgtatcactgatacaaggtttcagagggaatctttttgttattgcaattataagcaatagaatggcaaaagccgttattataacagtcagcatttttagctgataaaacatatcaaatattatttttagcatccagaaaatatatattggatgtgtatggattttcactttaagttgtttcatatttacagaaatttctaatcatcgaatttttgtgtgttcatttagtagcgataaccatataaacttagaattagtcaccaaatatcttctaaataatcttttgggttccttcatgaagcgataaaaccattccaagctaatatcctgcatccattgaggtgcttcatcaattacgccagagacgacattaaatgctccaccaacgccaatcatgaggccgttgatttttccttgcattttatagcaaaactcttcttggcgtggagcacccaaagcgacccagacaatatctggattggtttgatttattcgagctatgagcgcattctcctcttcttcactgagcggacgaaacacggaaggctcatatccaactacttcaacccatggatactcctttttgattttctcaagaagcgcatttatattttcttgcgttgttccataaaagtaatgccgaattttcttttctttcgactcttcaaaaagccttcgcatcaaatccggtccggtgacacgattcatctgcggaaatttctttcttccaattacagaaagtggtttcccgtctggcacagacagcaaagactctgcttgcaccttataatattgtggatcatcatgtgccataactgtcgtatgcacattggaaacacagacgtaatttccatgtacagcatcccaattggagaataaaaaggaaatacaactctccatattcactactgaaatcggcacaccgattatatttacgcgtgtaggaatattctttagtttgttacaatgtatcatatattttatttagtctttcatagtttgaagcaggtgtctggttgcacaagtaatagttataagcattaaacgaaaatttcgttcgttgttcataaactgcatccaacgctttcctaaaagagcccttgacttcaaaatcaaatagagttcctgcatttgattttgaaactaagtcgccagcatttccaatacttgttgatacgaccggtactcccaaagagaaacattctgcaatattcatagggtagccctcataccatatatagggcgtaatcaatgcgactgcggattttaaggaattgaataattctttttgtggacagaatccattcaaatgaatgttcggacatttagctgctaactttcgaacctcggctgcgcactcaccctctccataaacttcaagtacataggtgcccggcagattgatccattcattaagcagttttagtattccttttcctttatcaagtcttccggcataaatatatgttcttacccccccccgaacaaatgttcatatatatcgttttggagaacataatttttatcttttgacagtgtttcgctgtaataggccagtgcatttttctgatatattttgttgttctgcaaaacatcttcaatagcatttataaatgtatcgggcttgtcaggttcaaatgttgttccaccttttgaattgacaagaatatctcctgcattgcctatatttgtcgatacaacagggcaaccaatggccattgcctctgcaagaatcattgggaagccttcataccagatacttggaaatacaagtgctgttgcagttgataaatcttcaaaaatagttttctgtggagtaaatccgtaaaaggaaatattctctttcacattttcttcaacaaaatttttgagagttccatctccataaatgtgcaggcaataatccttaggaagcaacttccacaattccaaaaggagttttattcctttgttttcttcaagtctacttgcaaaaatgaacactcgcttgtgtgctcctttgcttggctccccttttctgcttacaaaattaggttttacgaatacctgatttgaatttatatcgatgagtttatcgaatttacttttgttgaattcggtcaaaaagatatatgatatttttttatagattcctagttttctgttaaccgttaacattgctgcaacaattattgttccaactgtagagtttcgataacatttgttttttattgcttctttgaagtttccgttctcgcggcacttttcgcacaccttgcctttgcagtaaaaagacccattcgggcagagaagtctgaaattatggattgtctgaaccacaggaactttcatacttcttgcagcataatacacagatggcgaaatcaatggaaacgtgttatggcaatgtacaacatcgatttgttcgttctttatcagttttctgatttctatataggttctaagagaccacactgttgtaaaaggcaaaaagagcaatttccatttatcagatttcagctcatcgttgctacgcgtatactctattacttcatggccattatctcgaagcagttctacttcgtttttgaaaaccgtatgttctccgccacctatttgataaaaattatgaaccattaagatttttttcttttttcccacggctattctcccaatctttatgtaagctgataccccttactccccacgccccagcaggcacaccttaaacgtcttaaaaataattttccaatccacccagaagctacgctccttgacgtatttcacatccagatccatccactcctcaaaagagaggtcgttgcggtgcggggcaatctgccaatagcagctcaagccgggagtcacatacagacgctgcttttcgtagtcgccgtactgttccacttcgcggggaagtgccgggcgggggccaacgatgctcatatcgcccttcaggatgttccacagctgcggcagctcatcgatactggtcttgcggataaatttacccacacgggtaatgcgggggtcgtccttaatcttgaacacaggaccatccatctcgttctgatccagcaggtcatccagctttgcctctgcattggggcacatggagcggaacttatagaacttgaagggctttccgttgcggccgatgcgttcctgactgaagacagggccggcagacgggtcatccaccacaattgcaatagccgtagccagcatgaccggcgacaacaccaccagtgccagcgatgacaagattacgtcctgcgtccgacgcccgatccagtacaggcgatggtcgcgcagattttctttgcggtcaacttcaacttccttatcgattccgacagtattcgtagccat

SEQ ID NO: 6 - DNA, 6608 bp, unidentified
  source 1..6608: mol_type = unassigned DNA
tcaagagacatgtcttgaaaaatactttttcatgaagagtacgtatattgcgctcaacagtaagatacaccctatcaagaagatatagccatactgttggtaataaatatatcctactattataaaagtctgtattgtcatataggccagagagactatgacatgaggaatcttcagttcattcgccataatctgatacagatgcttgcgatgcggtagcccgatattctcatgaagcatcaggcggtgaatgatagtcagtacactgtccacaccataaacggataaaaggactatccagctgaaatcttccgtttcaatgatgagcctgcctatcaggaaaagaaggatgaaggcaatgctcaccgaacccacatcaccggcaaagcatttggcacgcttgcggaaattgaagaagcagaagactagaacggaacagataacggtatagatgaaatccgcttctacaaaagtaaccacctccttattgatataggccaacgcagcaagaataaccagagaataacctcccgttatcccattaatcccatccataaaattgtaggcattgatgatgcccgtacagactatcaaggctatgactatccaccaccaggacaaggagaacagcccccactgataaaacatcatagccatagcagagaaatgaaaaagcagccttgtcatctgtccggtggattttatatcgtccacgaagctgatgaacgtcaccagtgtcaaggcaagcaggaaccagggatattcaaagccactcgtcaggaaataggcaaacgccccgaaatagaaaataatcccaccaccgcgtaaagtcactttcgtatgggaactccgctcattgggcttgtcgatgatattgcacctatcagctattctaaaataaaaaagttctgctaaaaacagcagaaccagtataaacagataatacataacagtattttcctctttaatttttaattcttaattgtttacttttatatttgagaacgattttatcgttctcactatcccctcctctgccctcaccggcattctgtcaatacccagggcagcctttatcttcgcattactcaccacataattctctgtcaacttgcgcagacgctctgcattcaaaggcaaatggagcagagtcccaagccgggcacagaattccatcagtcctctgtttatcttccagatatgcggcttgcgctccaaagcccgacacatcaaagttatcagttcatttgtggacaaggcttcgtcatctcccatgtggtagataccactcgccacctccttggtcaaaagaccttccaccacgtagcagagattgtctattgaagtaaaagaccttctgttctcaaaagcccccaaaggccagggaatgcctttcctcaccacattataaagaagattcagattgcctttgttgccgggaccatgaatcatgcagggacgcaggatataaacctgcttgtcatcataaggattagctttcaatttcccattctcaaccttcaacttgtcaaggatgtaattctcggcagctatcttactttccccataaggccctaccggagcaggcaccacatcttcagtcagtatatcacccaccacactgtcggcagcggcttttaccgaactgaagaatatgaatttcttcgcggacgattccagaaagaaatcaaatatcttttgggtcaatccggtattaatatcaaaataggattgggctgcggaccggtttttcgtatcatgggctttaccagccagatgaataatggcatcgaatttcggaagattccgcatcggaaaagaagccggttcaatatccttccaggagaaagtctttaccaccccctccttttcaggagcgacaatatccagcccgtaaaggctatgacgttcctttagggcaataacaagattggaacccacaaagccgtggattccagtgacgagtatgttcattgaaatatgctaaaaaatatactgaccggaaacgtgattattggttatgtatttgataaaataagtatctccaatgacagagaaaaaaatataccacgtcgtattagaattacgttgataagtgatgtaatacatatccttaccataacgttcaaaaaaagcgggcgctttctttttaaatttagaatgaatgttctgttgaatatcagctatcagttcttccacataagaaatagcaaaaggataagtacccaaatactccttctcaacaagtatttttataagcccatacaaatcctcctctacttcgggagcgaatacgactctcatccaaacaaagcctttatacgagggcaaagtctatccaataattcttcaccggaaatagcatgcctaatgtcatcacgtccttccgtaaggatattcggattattctcattacccgtatatacaactaccggttcaccaacattcggcaccatcggttcttgttccttatatggcttaatcttcctcatacatccaatctttccacaaagatatccggaaatatcaagttatcctaattattgactgataaatatcgtatgttcataaagcttcaactaagtctacatatttttgagttaccacatcctttgaatataatcgctcaatcacctccacaccatttcgacccagtaaagccagttcgctttttgagacggaattcagccaatccgccatttctcccaccttcttttccaaactcttctctgtaatcaattttgcacagccatattcctgtaggaaattgatgataggcgtatcctttcccgagcagaccaataaaggcctaccacatgccatgattgtataaaccttggaagggaatccctgcatctccatttcagggttcatgaaaataaactggatgtctgaataggcaagaatggacggcatcaaacttctgggctgatagggcaaaatatgcacattatccagctccaactcacgtactttctcctcaagaacgggtttcatgactccctcaccgatgataaagtattcaatggaaccccctttcgtcttttctgccagacaaattaagggctcccaatcctgggcataaccaatattcccggcataaagcaatttcaaagaatctgtggcagggaaaaaatggggattcagacattctacatttccaccctgagaattatacaattctgtatctacaaaattaggtattatacaaagcttggacttatccttaaaccttccgactattacattataaaatacctggtctattgtcgttacggccgttgagttattataaacataccgttccatcctacgtagctgttctataacaagcccgtcctttcgtttcaagatgtcaggatatatttcctgcacattatatatggttttacatcccttgattttcgccagccaaatgtttattacaccaatagtcaaaggaggggaaggtgacagtatgacatctatatttctctggaacaaaccaatcaggaaagagataatatgccaatagacaaatcccaggacacgcagaaatgtatttctgaatttcttctggggtacatgaagaactctgattccatgaaaacagctttctttacaaatcccccaaaccttccatttcagaggttgtgctgccagttgtgattccacaacattgtaatgaggcgtagttgtcaataccaatacttcataaccgctttcctggaatttcagagcaatatcattataaagataggctgtcgaaactccatccggactgaaaatcaagctatgtatcaaaattttcttaggcatgtctcaccattattttctccaaaccatcttgttcaccacccccgtatagctctgaatcaacttcacaaccttggccgatacattctcatccgtataattgggcaccggcagaccatcgtcctcattcctattcatctccacggcagtatctacagcctgaagcaaggatttcccatcaatgccggcaaggacaaagatacccttgtcaagagcctcgggacgctccgtactggtacggatgcatacagcagggaaaggatgccccacagaagtgaagaaactgctctcctcaggcagggtaccgctgtcactcacaacggcataggcgttcatctgcaggcagttgtagtcgtggaaaccgagaggttcatgctgaatcacacgtctgtcaagtgcaaagccacttgattccagacgtttcctgctacggggatgacaactgtaaagtatgggcatgtcatatttctcggccatagcgttaaccgcgctgaaaagagacaggaagttcttctccgtgtcaatgttctcttcccgatgcgcggaaagcaggatgtatttacctttctggagatgcaatctctggtgaatatcgctggactctatttcggacaaattctcatgcaggacttccgccatgggcgaaccggttacgtatgtacgttctttcgccacgcccgaagcgttcaggtatctgcgggcatgctccgaatagcagaggttcacatcggaaatgacgtccacaatacggcggttggtctcctcaggcaggcactcgtcaaagcagcggttgcctgcctccatatggaagatggggatatgcagacgtttcgcacctatcacgctcaggcaggagttcgtgtctcccaacaccagcacggcatcaggtttcacctgcaccatcagcttgtagccggcgttgataatattccccatcgtggcaccgaggtcatcgccgacggcatccatatacacatcggggtctttcagcttcaggtcacggaagaagacaccgttcaggttatagtcgtaattctggccggtgtgggccagaagacagtcaaaataactgcggcatttgttgatgacagccgccaagcggatgatttccggacgggtgcccactataatcagaagtttcagtctgccgttctcctgaaacctgacttgcgaataatccaattttagttccatctgttcctatattctttaactcgtttcagactttttcaaaataagtgtccggacgtgccgggtcgaaacactcgttgcaccacatgaaggtcaccaggtcttccgtttccgaaaggttgacaatgttgtgcgtatagccgggaatcatctccacgacctccatcctcccgccgcttacctcgaagctgacaacctcctccgtacctatcttgcggagctgtatcagaccgtgtccgctcaccaccacaaacttctcgttcttggtatggtgccagtgctggcctttcgtaacgcccggcttggagatgttcaccgagaactgcccgcggtcggaagtacggataatctccgtaaaactgccgcggtcgtccacattcatcttcaggggatagctgaaccgttcttcaggcaggtatgagaggtatgtggaatagagtttctttgtaaaggcatcgctcaaatccggaacggacaaggtaccgggcatttgcctgaaagaccttatcagttccacaatgccgcccaaggtaatggtatgtactacgggcacttcgcaataatcaccgttgcggtgttccctgccgcccagggcagagacaagctcgtccaccacatcgtctatgtaaaccagatgcatcaccaccgaagggtcgtttacccggatgggctggtcatgggcgatgttgttgcagaaagtggccaccgcgctgttatagttggggcggcaccatttgccgaaaacattcgggaagcggtacaccagtacctttgcacccgtttccctggagtactcgaacaacagttgctcccctgcccgcttcgattcaccgtaagggttgtcgagtgcggcctgcgtggaagaggaaatcattaccggacaggtattgccgtacttcttcaatgtatcaagcagcgtggaggcgaagccgaagttccctttcataaactcagacgcatcctggggacggttcacgcccgccagattgaagacaaagtcagcttgtctgcaatagacatccagttcggcagggtcactgtccatgtcatattcgtaaatggtaagttcctcacccgcaatgccgtaattacgggctttcccgtcacggatgttgtgcagctgggatacaaggttccggccgacaaaccctcgggagccggtcactaagattttcataaactaatgggttctgtttgtcacagaaaagagaagatattcatagtgaatgacagaaatcatccaaacctataaaacttacttttgggaaattatattgcttcaatatatgaaaatgatgatcttccgtaacaataaacttggcattagccacaattgcacagtccacaaacttattatcatccggatctgattttatcagattgaagttataataaggagtaaagaacaaagtataaggattattgagaatgacatcaatcaccagcttagctatttccacacctaccaaacgttctaatatttcctcatattcattaagaatttcatcagaaacgcataactgattcgttccatccaaaaagcaatcccaaatcttacggtacctgcttttgggagaaatgcactgtatcaagctatttgtatctaatacaattctattcat

SEQ ID NO: 7 - DNA, 8644 bp, unidentified
  source 1..8644: mol_type = unassigned DNA
atgtgtggaattattggatttacaggtaaattaaaagcccaggatgtcttattgacaggacttgcaagccttgagtaccgtggatatgacagtgcgggaattgcatactttaaagataccggaaaaatttcacttcggaaaactgtcggaaaagtaaaagatcttcgtgccatctgcgatgatgataacaattctacgtgtggaatcggccacacccgctgggcaacccatggtggcgttaccaatgccaatgcacaccctcataaggtcggacaggttgcattaatccacaatggtatcatcgagaactatcatgatctcgccaccaaatatgatctgacggatgaactgatttccgagacggataccgaagttgccgccgcattgatcaataaactctacgaaggagatccaaaagaagctctgcgcaaagcagtagccgaaattgaaggttcctttgccttctgcgttctgttcaaggatcatccgggtgaaatttatgcggtaagaaatgtcagccctatggttgcaacatactgtgatgacggtgcttttattgcatctgacctgactgcttttatcgcatacaacaagcgttatttcatcgtgccggaatatcatattttaactatgactgcggacggcattacgttagaggatttagacggtcattccgtagaaccggaatatatggaagtaaactgggatgttaccgcagcccagaaagatggttatccgcatttcatgatcaaagaaattcatgaacagccggctgccatcacaagaaccattaccccacgtatcaaagatatgctcccggatttttcggaagatgccattgcggattccttctttgaaaatgtaagcgacattacaatcgttgcctgtggtactgcaatgtacgcgggaatggtaggaaaaaccatgatccagaaccgcctgcatattccggttaccgtggcaatcgcatcggagttccgctatgaagaaccggtaatcaatgaaaaatccatggtgatcgttgtatcccagtccggagaaaccattgatactttggaagctcttcgccttgcaaataaatatacaaagaaaacactgtctattgtaaatgtaaaaggctccagcattgcacgtgaaagcagctatgtattatatacacatgccggtccggaaatcgctgttgcaagtacaaaagcatacaccgttcaggttgcttctttttacctgcttgcatgcaaacttgccatgaaacagcaaaagatttctgtcgaagaagcacgtacatttattggaacactgcaggaaattccaaattacatcgaggaagttcttgcacaggctcctgatattgaacagctgaccaaacgcatgatcaatgccaacaacgcgttctttatcggtcgtggactcgattataccctttgtatggaaggtgctttgaaattaaaggaaatttcttatatccatgccgaagcctatgctgctggtgaattaaaacacggaaccattgccctggtcagtgaaggggttcctgtcattgccgctgctacccagaaacatgtatacagcaaagttatttccaatatccgggaagtaaaagcccgtggtgcttatgtcattcttttgtccaaagacaaagaaatcacagatccttctatctgtgatgtacacatcaatcttccggatgtatccgacgaatttacgatttttgaatctgttgtaattttccagctgattgcatattacacatccgttggaaaaggcttaaatccggatcagccacgtaacctggcaaaatctgtaacggtagaataaaaaaactgtcgcgcgaaaattcgtgcgacagtttttttgacatagagcctttctaaaacttttgaaggcaaaaaaagaaccccagaagctctctaaaagcctctgaggttgcccctgccaaggattctctcacccatgtaccggaatccttgtatcgtcggcgcgacaggatttgaacctgcgacctctgcgtcccgaacgcagcgctctaccaagctgagccacgcgccgtttcaactgcccaattatagtaacacattctccggtgtttgtctagtgaatttttttaatttatggtacaatacaaaaaaagaatggagaagaacaatgaaacatactgctttgattacaggtgcatcccgaggaatcggtgcagccctggcatgtcgatttgccgccgaaggctatcatctggctctttgctgccataactcttatgaaacgctacaggcacttgccacaaaacttgaaacaacctgctccatacaggtgctttgcttccgtggtgatgtaggagactatacttttatctgtgacatggtgcaaaaaacactggataccttcggccagattgatgtgttaatcaacaatgccggcatctcttatatcggtctgctcaccgacatggatattaccgactggaatcagatagttgcgacaaacctcacatccgtcttttccacctgcagacaggtcatcccttccatggttcatgccaaatccggacatatcatcaatatttcttctgtatggggaaatgtcggagcttcctgcgaagttgcctattctgcatgcaaaggcgggatcaattcccttacacgcgctttgggcaaagaacttgcccccagcaatatccaggtaaatgccatcgcctgtggggtaatcgatacggatatgaaccgttgtttctccgaggaagaacgctctgcactcatcgaagaaattcctgccggccggatgggatccccggaagaagttgcttcactggcatattctcttgccacagcaagcagttacctgaatggacagattctcaccttagacggtggatggatttaatttcttatctctttggaaatctttttccatttatttaagaattaaaacgcaatacgcgttttctctgttttttatatcaactttctataaaatcatttgtatgaaaacgaatgataaaaataaatacaaagattttggtgaccgtctgagtctgattatgtataaacaaaatatttccaatatccagctggcaaatgcaatgtttgtttcgccgtccacgatcagcggataccgtaccggtcgtcgttctccgaccgttgcggatcttgcagccatcgtgcagattctgaatgtttctgcagattacctcatcggaaccagtgaaattacaaccagacccgataccaccgaaaaaaagagttgagcacgccctgtttccagagcggtgctcaactcttttttataaatcatgttctgccagtaaaattaccgtagaacgttccggaacacgcacacgtgtctgatctccctgtgtctgggcttcaaaatctgccccatcctggtattcacagaaagtatttactacaagtttccaatgataagactccggcaacgaaggcaggcgcatctccaaaggctcccaatacgcattcattccgtaaaagatcatatcatcatccgtatcatcggcatttcttcccgcatacatgattccaattaaatgtgtattatagtccgtataattccggttcggctctccgttatggatacttacggaaggtaacccgcagactgccggctttgtatcccttcgcagaatcggatgctttgcacggaaatggatcataaaacgggcaaaatcatgaatctcctgaaattcttccagtctgttccagtccagccaggaaataatattatcctggcagtatgcgttgttatttccatactgcgtattacaaaattcatcccctgcaaaaaacatagccggtccacggctgcataacaacgcggcaaatgcattcttcacgagtctgcgtcgcaggctcataaccgccggatcatccgtctcaccttccaccccgcagttccagctcaggccgttgttatccccgtccgtattgttccatccgtttttctcattatgcttttcattatatgaatacagatcatacaacgtgaacccatcatgacaggtcagaaaattgacggatgcactatatccgcggcttgccggatcatacatgtcggaggatccggtgatacgtgtaattgcacgccctgcgacgccactgtcgccctttaaaaagcttctcatatcatcacggtatcttccgttccattcggcccagcggttccaagacgggaaacttccaacctgatacaagccacccgcatcccaggcttctgcgatcagcttcatatcccccagaatagagtcaaatgcaagggcttccagaatcggcggattctccatcggtgcaccattctgatctcttcccagaatcgatgccaggtcaaaccggaatccatccacacggtactctactgcccagtgccgcagacaatccgtaataaacctccgtaccaccggatggttgcagtttaagacattgccacagccgctgaaattataataatatccatccggtgtaagcatataataaatattattatcaatccccttaaagcaaaaacatggaccgttttcatttccctctgccgtatggttgaataccacatcaagaatgacttcaattccattttctttcagttcgcggatcagacgctttaattcatcaccctcatgattatgctcctgatgaaatgcataacttgtattcggggcaaaaaaggaaaccgtattatagccccagtaattgtacaactgcacgccatccaccacacgggcactttccatttcatcaaattcaaaaatcggcatgagttctaccgcattgattcccagatctttcagatacggaattttctgccgcagaccttcaaatgttcccccgccttttacgccggaggacgcatctttggtaaatcctctgacatgcatctcataaatcaccagatcttcaaatttgtgattcagattccgataacgcccccagtcaaaatcactttgcaccacacgggctttatagacaaaatcctttccgccttccggtttttctccccagtttctctgaccggtaacagctttcgcatatggatcaagaagcgtatgttttctgttaaacagtaaccctctcgcctgatcggcaggaccgtccatctgataggcatactcaaagtcctctgcttttaagccaaaaacaaggatagaatacgtatttccaattttataactttccggaatgcggattcttgcatatggttcctgtgccgccggccggaataacagcaggacacagctcgtggctccatgggagcttacggtaaaacttaccccttcctctgtctgatatgcaccattcatctgataaaatcccggacgtacatcaaatcccccaatattatcgagtggatgaatgacttccccgagactttccatttcttcgtctatcggccagcttttctgttttgacggataattccaaaaacttgcattcatgtgctgattcctcttatcattattatttacttgccacataaaattttatattatctccctactcttccctgatgattaccctgccatttgcgtcaaatccgattttactgtacttttccgaatactcattcatatgatcaataatcgtctgttttctgtcgccttttgctatggcaggctgaaaattatttctttctgatgtggaagaaatgctgcatggtatcatatcggctgatatatctgtctgcagtaccccatccacaaaggtaaaggtctgttcatagatcgccgtatctttgtcttttggattcctgttccccccaaagcagaaatttccaagactgtagcagatcatttttccgttgtataattccattccctgcaatacatgaggatgtgtaccgaccagcagatctgctccccagtcaatcacctggtgtgccagcttctgctgataatcattcggataatgatccccctctatcccccagtggcaacaggcaattaccagatccgctccttcttcccgaagttctgcaatcccatcccggatataattggcatgtgtttcatcagcggatagctggcttgcggagacaattccgattttgataccatccttcgtggtataggtatccacatgatcattgaatccgaagataatccctgctttatttaacacttctctggtatcatcaagtccctgctgcccataatcaaacgtatgattatttcccagacttgccccctccacagaactgtctgtcataataccaacatactccggttttccttttaagttccacgttttttccacacgctcggtcgcatttgacaacacacattccagattgatcagtgtaaaatcatcctgctcaaaaatacttctgatatttttaaaaaaataatcctgcccgtatttatcatagtattcatgaaaggaacctgcatacccatgcgtctgtgttgccccaagcgtacagtcacctgtcgccgtaatttttaccgtctgtatcaccggttcctgctgcgtttcagttgcagtcccggtttccgtttcttccagcgtacccggttcttccgtcatctgtgtctccgtgattttttccgtagaagagggcaaagccgatgacgttgctgcaggagaagaacatcccgtcagcaaaaatcctgccattaggattggcaatatccattttttcatacgttttcagactcctctttcacaagaatatccaccgtgtgaccgcttgcacccataagatccatccgttcacaggttgccagatgatactgcagaaacgcatcaaactcttcttccgtcagcgcatttaaaaacggacgcatataatttgctgcaccgtctgccgctatgatctgccggcgcctgacctctacctgccggtccaatgcttcaatatcttccagacgaaccatggaatacagaggattggcttttgaagtacagtgataatcctctgtgagcattccctcctgaagcgcctccagaatatgtttttccttaaacgcatacgtgataacggaaaattcattcataatatacgccacgagaatcctgcctccgggtctggtcaccctcaccgcctcccgcagcgcagcaagcttgtccttttcctcatgcaggtgatacatcggcccaaacaacagggttacgtcaaaggaatcatcggaaaattttttcagattcattgcatttccctgatatgcatgcactcctgcacccttctgtttcagacgccccagattatgctttaccagttccacggccgtcacatcgaacccttcctgtgccagcggtacgctgtatcgtccggttcccgccccgatatcaaggatatggatttcctcttttgcacgttctttcacaatttcatccagacactgatggatataatgcatgcttgtcacaaattccaccctgccgtgtcggctgtccagacgcttctcttcattaaatttattataataggcttctaagtctgtcatattttaatactaacacattttctttaaaatttcactcacaatcgctgatgcgacatccgctttgctcattatttccagttccctgcagtcatctgccgtaatcagcgtcaccacattggtatctgtaccaaatccggctccggctaccttcaggttattcgccacaatcatatctgcattcttttttgcaagttttgcacgggaattctccagcatatgttccgtctccatggaaaatccacacagaaactgtcccggttttttgtgcgcgcccagatacgaaaggatatcttccgtgcgttccatcgtaagagtggcatccccgtcttttttcttgactttttcatcgaccgggtgatccggacgataatccgccacagctgccgctttgataataatatcctgttgctctgctgtctcctttacggctgctgccatatccgcggcagatacaaccggaacgacctttacaaacggcggcggagtgattgccaccggtcccgtgatcagcgtcacttccgcgccacggcgcatacagttttccgcaattgcatagcccatttttccggtagagtgattcgtaatataacgcaccggatcaatcttctcctgtgtcggtcctgctgtgaccatcactttctttccgaccatgtccttttcgcaggcaagatctttcataatataagaaaacagtgtttccggttccggcattttcccggctccggtatccccgcaggcaagataaccactcgccggatcaatgatatgaaacccataatgctccagctttttgatgttatcctgtacgatcggattttcaaacatattggtattcatggcaggggaaacatacttcgggcattttgccgcaagaatcgttgttgtcagcatatcatctgcgattccgtttgccatcttgccaattacattggcagaagccggtgctaccataaaaatatccgcacgctttgccagtgccacatgctcgacattgaactggaaattccggtcaaacgtatcgaccagacacttgttgcttgtgagcgtctcaaacgtgataggattaataaaattggttgcattttccgtcatgatcacatgcacatccgcatgctgcttgacgagcgcacttgccagataggcgattttataggcagcgatacttccggtcacaccgagtaccacacattttccttttaacat

SEQ ID NO: 8 - DNA, 13023 bp, unidentified
  source 1..13023: mol_type = unassigned DNA
ttattcatcccttttcattgaagtttgtcccgttttgattgtcacacctgaaccctcggttgaaataacaactgttccgttttcatcggttctgtatgtttcaactccgaatttatcaagcaactttaatgtgcttttgtgcggatgtccgtagctgttatccttgccgagtgaaataaccgcatatttaggatttaccttttcaagcaacgcttttgttgttgaggttctgcttccgtgatgacctactttaagaacttctgcactcatatctgccgtaacggtttcaagctctttcttttcggcatctccgaggaacagaaagctgtcgtttttataagttatttttagaattacagagcaattattcagattatcctcgtcaattgttacgggagcaagaatatttatgctgaaatcgttgtcatcaataatattcatacccgctttggctgacttgactttaagtcccttgtctgcaattgccgtgagcagattctcataggtcttggttgtggttgtaaccttaggcatatagatttcgccgatattattatgctttacaacataagccattgaaccgatatggtcggcatgagggtgagttgcaacgagataatcaatatttgtgtatccgagattattgatatattcggtaatacttttgccgtacatattttcgcctgcatcaatcagcatacacttttgattcggcagttcaatgaatatgctgtcaccctgtccgacatcaaggtaatgaaccgataatgttccgatttctgaaacagttgttttgctttccgaatcggaaccgttcacattgatattgattgaacacgaacaaagtgcaagacagattaccgcaaacaatgcagtaagctttaatattaattttgaattaattttaatttttaacacttcacaattctgagtcttattgtacaataaacaagtcaatatttcaagaacagaaaaaggagagcctttgcgactctcccatttcgattatcattatgcggttttgcctgtataaagctgatagtatctgcccttttgttcaagaagccgttcgtgtgaaccacgctcgatgattctgccattttcaagaaccataatacagtctgaattcttgattgttgaaagtctgtgggcaataacaaaggttgttctgccgtgcataagcttatccatgctgtcctgaaccatcttttcggtacgggtatcaattgaacttgtagcctcatcaaggataagtgcgggcggatctgcaacagcagctcttgcaatcgcaagcatctggcgctgtccctgactgagattgccgccgtcacctttgagcagggtgttgtagccgtcaggaagttttctgataaagctgtctgcgttggcaagctttgccgctgcgataacctcttcgtctgttgcgtcaagtctgccataacggatattttccattacggtatccgtgaacaggtgcgtatcctgtaaaactataccgagtgaacggcgaaggtcgccttttttgattttgttgatattgattccgtcataacggattttaccgtcctgaatatcatagaatcggttaataaggtttgtgattgttgttttgcctgcacctgttgaaccgacaaacgcaatcttctgaccgggttctgcgtacaaatcaatattgtgaagaacgattttatcatctgtataaccgaagtcaacatcgtccataacaagcgcacccttgagttcacgatactctgttttgcctgtttcactgtgggtatgcttccaagcccacatacctgttttttcctcagtttcaacaagcctgtcgccctctttgcgtacattaacaagtgttacatatccgtcatcaacctcaggctcttcgtcaagaagtttaaagatacggtctgcacctgcaagcgccataacaattgagttaaactgctggctgacctgattgataggctgggtaaagctcttgttgaatgtgaggaagcttacgagtttaccgattgtaaatccgaggaaattgttgagagcaaagatacaacctacgattgcacaaagtacatagctgatgttaccgatttgtgcgttaatcggcataaggatatttgcaaacttgtttgcgttgtatgaactgttgaaaagcctgtcattaagctcattgaattcttcaatgctctttttctcatggttaaatacttttacaaccttctgaccgttcatcatttcctcaatgtaaccgttagtcgcaccgaggtctgcctgctgttttgcaaaaaaccttccgcttcgtgacgcaagctgttttgttacaaaaagcattacaccaaccattataagtgtaagaattgtaagaggaatactgagtgtaaacatactgacaagaacggcaatgattgtaattccgctgttgaaaagctgaggaatactctggctgatcatctgacggagggtgtcaatatcgtttgtgtaaacactcatgatatcgccgtgagggtgtgtgtcaaagtattttatcggaagactttccatatgttcaaatatctgacaacgcaaatcacgcattgtcccctgtgttacataaaccataattttggcgtagataaacgccgacgccgcaccgattgcatagaagattgcaactcttaaaattgctccgagcatcggtccgaagtcacggctgccgctctgaatcatcggagtgatgtaatcgtcaataagattctgaataaacaatgaaccctgaacatttgcaagtacgctgatgaggatgcagacgaaaacaataatcatctgaaatttatattttttgaagataataccgaatagtcttttaagaacctgacctgaattttcaaccttttgtgcaggtcctcggtttcttcttcccattggtcccggcataattacagctctcctttcgcatcaaaatcaccgttgccgcttgtctgggcaacataaatttcattgtaaataggactgtttttgataagttcttcgtgagtacccactgcgcttatctcaccgtcatccattacaataatcttgtctgcgtgtgaaacgcttgacacacgctgtgaaataatcagctttgtagtatcggggatattctcgctgaatgccttgcggatacttgcgtctgttgcggtatcaactgcacttgtcgaatcatcaaggataaggattttcggatttttcagcaaagctcttgcaatgcaaagacgctgtttctgaccacccgaaacattagtaccgccctgttcgatttttgtgttgtacttatcggggaagctttcgataaacgcatctgcacaggcaagcttgcaggcattgacgcattcttcctctgtagcattttcgttgccccatctgaggttgtcaaggattgtaccgctgaaaagaacattcgactggagcacaaccgaaaccttgtcacgcagagtttcgatatcatagtcacgaacatcttttccaccgaccttaacagaaccttcggttacatcataaagtcttgcaataaggtttacaaggcttgtttttgaagaacccgtaccgccgataataccgattgtttcgcctgatttgatttttaggttgatatcgttgagaatcggtttttcggcttttgtgttgtatgagaatgaaacattgtcaaactcaatgcttccgtccttaacctcgtaaacagggttttcgggatttgcaagcgttgatttttcattaagcacacctgcaacacgcttgccgcttgcaaggctcattgtgagcattacaaacaccattgccaccataagaagattcataagaatgttcatacaatatgtgagcatacttgtaagttcacctgttgtaagctcactgcttacgatcatatttgcgccaaaccagcttacaaggatgattgatgcgtatgaagtaaccatcataatcggtgatactgttaccatggcattttcagccttaacaaagagtctgtaaacattgtcggctgccttgcggaacttgccgacttcgtgtttttcacgaacaaaagcctttacgactctgattgaagttacattttcctgaacgcttgcgttgagttcatcgtacttttcaaaaacctgactgaaatacttgtatgttgccttcataataaaggcaagaacaacagaaagtaaaattgttgcaatgagataaatacaggcaagccttgcattgatgatgaatgtcattgccattgcacagatgagcgatacaggcgctctgaaacacattcttaaaagcatctgatatgcattttgaagatttgttacatccgttgtcatacgggtaacaagtcctgcggttgagtaacggtcaatgttggcaaacgagaatgactggatatttgcaaacattgagcgtctgaggtttcttgcaaagcctgccgaagcttttgcaccgtagataccgcccatcatacctgcaaacaagcccgtgagtgcaagtgcgcccatataaccgcccgttatgagtatgtgctgcatatcgcccttgttgataccgtcatcaatcattgatgacataagaaacggaataattgtttcaacaattacttcgagtatcataaagaacggtgtaagaacagactctttgacgaaacctttgatattttttgccaaagtttttatcatacttatctccttccgttttaatttgcattttcaagtccgctgagaattttatttataagaaaaagaaattgtatcttttcttcttttgtcagcagactatcaagcaaagtttcgtttttggttatcatattttcgattttgtaatgaagttcaatacctgtttcggtcaagacaagttttttgagccttgcgtcactttcaacgctctccctcgttatgtaatttttcttttccataagtttaagaatacttgtaacggttgaacgggcaattgaaaatgcgttttcaatatctttttgataaacatcttcatcacgatgatcatagagatatgcaataatccagccgtgcataagagtcagcttatccacacccttatccttggcggaatagattaactttctctgcaaaacctgattaagcaccttgatttcgtgaccgattgaatcattaaagcgtttgttgcacttacagctttttacgcttttgtcatcacacattatttcacctccgaaatcacacttatgagatattgttctatatagaatagttcgatacaaaacaatttgtatcagtaattatagcaccttcattttgaatgtcaagagaaattacaaataattattcaaagtttcacattgctgtcacaaatcaaaagcgacagctaaaattacagctgtcgcagttaaaatcatattcactttgcgcaaattatgacaattgtcacttttttaggatttctgtcgcatcacggatatcgggggttttatcaccgttgatatcgcaaacaaaaagagcatactgattttcgtcataatcgtcaaaggtgaggtctttgataagatacttctgaataagctcagcatccttttcatctgttttgccgtcaatattgaggtctttcatatttttgggaacgcaaccgccgtcaagcacaaaatcaataccgctgtcgttcatgagttcatcggctctgtttttgtcaacatcaacaatgtaaagtcccaatgtgtcaaagcattgataaacatactttgcatcctttaaaatctcggctttcttttcttttgccctgtcatttgctatgcctgcaccttgaagatgtgaatcaagctttgcaatcatctccattgcgtaatcgttatccgtcattgcacggttaagatcaacaccgtttgtcatatagaaccaaccgagcgaacccataacatatagatctgtcacatcaagtccgcagtaaacggcaattttcccgtccttgtactgaccttttttcatcgacattttggaatagcccttgattatactgtaaccgagcttcattccgtcctcgctgatatagccaagatcaaatgccgctgcacttgtgcatgaaaagcacgctccgccgatgagcattgcaaatacgagcaatattgaaatcacctttttagaaaattttcttttcataaaaaacacctccattggtagtatcaccgaacggaagtgttttattttgatttatttacttttatttgacttattattttttctatcttttcttatttgattaagctctgaacctttggtttttacctttcttttaaattttgcaacggtaaacgcttttatcctgtcatgatagacataattgatttccgcacaaaccataagacaaaccataagaaagtaaaaccaaatcataataacggcaattcttgtaagacctccgtacacggaaaatccgttgaaatccgacacataaaccgaaataccgaacgaaagcacataccaagaaaccgtgcagagaaacgcaccgggcaactgtgacttaaagccgtattccttatgctcgctgcgtgagatgttcggaaagttcctgtaaatcagcgcaaacaataccgtgagaaacataaagataagtatatatctgagatgatagattattccgattatgtccggcaatgattttagatgcggtgaaagaaaatcgttaattgttgaaccgaggacaataagtacaagtgacgcaagcaaaattacaaacaacgcaattgtgtagaacatcgctcttattcttaaaaagaaccagtttctgttttcgtaagcatcataaattctgttaagaccgtttgtgattgcgtggattccctgtgccgccgaccacagagtgactacaagcgttacaagagaaattcccacagcactttcataggcagaggtcagaaagtatgttaagtcatcggcaatttttgacgaaaacacactgctgagtccgtgataaacaaaatcaatcggaatgtgcaggttttgcaaaagtgacacaaagaacattgagagcggcacagccgataatataataaagaatgccgactgtccggcaattgcaaaaatattatcgtgaacgcatttgcttgttatcggttcaaatctgcctgttattcttttgtaaagttttatcgccttgtcaacgaattttatcctcaatgtgtcacctcccctatttctatatgataattattttataccgtttttcttcatctgcacattataagaaattcttgtgagaagtttttcgggtgcaaaatgtctgaaaaacgacaccgctttcatttcaaagccgggggtgataatcattttgcccttcatggtcatgtcaacggcataccttgcaacaaacttcgggtcaagtcctcttatgcagaatttaacatccgcaacattattgaagttggtttttacgggacccgggcaaagtacggaaaccttgacatttttattatccctacgcatttcctcatgaattgcctgagtaagacggacaacataattctttgacgcatagtagcttgcaaatgtcggccctgcaagaaatcctgcggcagaacctacattgagaatatatccgctgtttctctctgccatatctttaagaaaaagctttgtgagaatgtgaaccgttgaaacattggtgtgaatgagttcaagctctctttcaagcggaacatccaaaaattttccgtatgctccaaagcctgcgttgttgacaagaaaatcaatctgttcattttcattcttaatatgctcatacaaatccaggctgtcactttctcgtgaaaaatcaagcgtaattaccctgacattcacatttgaaagttcttctttcagcttgttaagcttatcggttgagcgtgatacaagaataaggtcataaccgagttctgcaagatatcgggcgatttcttttcctatacccgaacttgcgcctgtaatcaaagccttcattagttttcatcatccttcggtttttgtgctgtggcacaaagccatgttgtaccttccttagtgtatgtgtttatgtgttcaaagcctgcagattcaagtacggctctgatttcctgcggagttaccgacttgatattcaacatattttcaaccttttcccacttgaacggatcatcgtctgttctgagcatttcaaaaagcagcataaccgttccgccctgtttgagaacacggaaaacttctttcacatcattttccttatcaggccagaagtagtaggtttcaactgccgtgatattatcgaatgtattgtcatcaaaaggcatatctgatacggatgcctgaagaattttcgctttgttgcagagtatattttttgaattgagtttttcggaggattttaccgagagttctgaatagtcgattccgtaaaccttgccgttggcaacaattgagcaaagtcggtcaacggtttttccgccgccgcaacctatgtcaagtacagttgcggtgcgttcaatattcatatgttcaagtccccatgaggtgaggcttgaatgtcctttattcatagccttaatcatcattttgccccaaaagccgtttggctttttagcattctccaccaacttgcggtatttcataaaaatcactccaatctgaaattttcatctgtttactgtctgctatttactttttttcctgttgaattaagtttttgaagtaagagtgcaaggaaaaacgcaccgcctactataacgatgaaccaaacaaatgacatatacaacggttgattcatcacacgcaaaaacgggtatggaccgtcaaatgcaccgactatgttaagtataataagcagaatcgcatatattaatgtagggattgtagccgtgaaagctgattttgtgttaaggtgaggttctttttcaaaaagcacaaacgataaaattgtaagaatcggacacaaagtatgtaaaaaggtgaagtctttgttaaaaagcatatagagccaaccgtttatgccctctccacgcatcggggaaagcacggcaagaactacgataaatgttaccgaaagcacagccgccgccatatatttgaacatttgaaccgagtgcggaatttcttttccgcttttgagatatcgcacctgaaagcctgccataaccgcacaggcaacaagtgcaaacaggttgctgtcctcagtgtaatatacaagcggatagcagcctaatttgaaaaacacgataattattgcggcaatctcacaagcgataatcgcaagattaaatgccaaagctgtttttgttcgtttaattttaagagtattttgcattttaattccttttctatattattttgttaattcctttcaatcaatgccacgctctctacatggctcatctgaatacgatgaatttcttggctgatttttggttcaagggaatacatccacagcctttttcgtggttctgccgtttgtggggatatgtccgtgaaactgaagttttcgcattatctatttcaatgtaaataatgctttttcataatccttaacataatacttgatattagtttttcctttttgcactacagtatgtccctcagtttcaagcattttcttttgtgcctcaattcctccaggatactttgcatttaattctccattcgcttttaatgttctccaataaggggttttatcctctgtgcgctgataactcgcccatgcaactattgaaacaaaaattccggctgtgataggctctgtaaaatcggcactgcttaactctgcaaagtattctcgtatttttccgacagtaatcactttaccatacggaatttttttcattactttgtcatagtcgattggcggtgcaaaatacattttatctccaccatattttttaatactcttttcatctgtgattatttgaaatttaggcatatccttgctatccataagcatagcattaaaatcctttttatcttcatttgccataatgtatcacctccaagccaatcatatctcaataaacagactcatgcaatgagacgcttttataatttctcgcaaaacattaaaatttccatttactcttctttcatcttttcttccagttcaagtaaatatctgtcatagtcagacataaacaatctgtcctgaatgatgcgatatttctcaaattccgtttctgcgtgaagttttgcctgctctgcacttatctttcctgctcctgtgagaatttcagtaccgttaaattcgaggaaaccgtcaagtcttttcgcccaatcctccatactcataggaatatgacgttcggcttgtaactctgcataatcgagatacagcgatacaatgcgttccaaaaaagacaattctttttcagtaagatagttttttgctacagatacatcgcttttcactattttaccatcaggagcattttcccaagaggttagtcccatatgttccttttccgcatccgctcgttcaacaatcagttccgcagcagtatgtctgtgcgtagcatagtgcattttgttctgcacagttttgaaaaagagtcttgtggtttttgcatctttatcatagtcgaaagctgttgcataaaggtctgtaaccttttggtagaattttcgctcagacaggcgaatttcacgaatgtattctaactgacggtcaaaatattcatctgtgaacatcgtgcccttcttcagacggtctacatccattgtccagccctgaatggtataatcttttacaatttgacctgcccatttacggaatcgaactgctcgttcattattaactttaaatccaactgcaataattgcctgaagattataatgttttgtttgataattcttcccgtcgtcggcagttgttaagtatttcttaataactgaatcctcgactaattcgccgtcttcaaagattttttttagatgttgattgattgcaggcacagaaacatcatacagcgttgccatcattttctgtgtgagccatatattttcgtcctcataacgcatttcaaagctatctgcctgatttcccacagaagcaacatatgtgagatattccgcagcacttgagcgaatacttatttcatttttcttctttgccattttgtgcacctccatcaaaaagcatcaccatcggtgtcactttttctttttaaataagtcaattcaatatcgtaccccaaaccccaaacatatttcattttatttgttgcactactcaataatcataataaatatgttacttttgactttcattaattacagaaccttcatcatataccttggttcatattctatatatccgtgtttcggataaaaagcataagattcaaaccactgctcttttggtgtccccaaatgtacttttgaaacagcaataccgttttcacgcatccataactctgccgtattaagtaactttgagccgattccctttcgttttaatgacggttttatataaagcctatgcaaaaatgcctgatctgtatcagtaattcttgaacatccaatacatccgactaccctgtcattttcatctattgcaagccaaaacatatcattgcaatcaagatagtttgccttaatatcaagaaggtcaggatttatagtaggttttctacccaaagcatcttttgcctgtaaaaccgtaaaaatcatatcatcacgatagatttcttcaaatttaataattttcacacttttactcctgtactttagtcaacagagccacgctctctacatgggaggttccggagaacatatcgcagggggtgatttctttgggggtgtagccgttttctgtgaagaattttaaatctcttgcgagggttgccgggtcacaggatacatagactacacggctcggcgacattcttgaaattgtctttacaagctcttcgccgcaaccttttctcggtgggtcaaggattacgcagtcgggttttaaaccctctttttcaagctgaaatgcggcgtctgaggcatctccgcagatgaatcgtgcattttcaatgccgtttgcttttgcattttcatttgcatctttcacggcatcttcaacaatctccgcaccgataagctgtttacaggaatccgccattgtaagacctattgtacccgttccgcagtataaatcaagcagaatttcgtcagatttaagatttgcatattctttggctttgccgtaaagcttttcagcctgttttctgttgatctgccagaacgaaaacggtgaaattttaaactgcaatccgcaaagtgtgtcggtaatatggtcacttccgtagattgttctgttttttctgccgagaacaacattggttttttctctgttagaattaataatcacactttttaactgcggaagttcggatttgagcattttcacgagtaaatcttcctgtttaagaccgtttgcgttgacaacatagcacaccataagctcgcccgaagcctcgccgattctgatataaatgtggcgaagtctgcccttgcctgttgtttcatcataaatttccgtgttagtttttgcgataaaatcttttgtaatttcaattacccttgcaaaaatttcgggctgtaaaatacagtcggtacaattgattatgcggtggctgtggaatgaataaaagcccgtcacaacatttccgtcacggtcaagaccgacaggatactgcgccttgttgcggtatcttgtgatattatccgacgaaattatcggcttgaaaacaacattatcaagaccgccgatgcgtgttacggcatcctcaactctctgctgttttattttgcattcttcttcataagaaatatgtcgccatgtgcaaccgccgcacttcataaagttttcgcagtcgggagtaattctcgccttggacggaacgagaatttcttcgattttgccgaaagcgtaggttttcttaacctttaatatacgcaccttgagttcgtcaccgattgcagaaccctgtacaaaaacggcaatgccgtcatctgttcttccgactccgctgccctcggcagttgccgaagttattgtaaggtttacaatatcgttcttttttaaagtcat

SEQ ID NO: 9 - DNA, 6355 bp, unidentified
  source 1..6355: mol_type = unassigned DNA
atgaatcgtgaaaataaacgcaagacctttgaaaaaggttactataagacccacgcctgcaacgacacctttacctgcaaagtctgcggacgggtctgcaccccgcaaaatgccggcagcgaccaccgcaaccattgccccaactgcctgtccagccttcatgtggacgaagaacccggtgaccgcgcctccgactgcggcggcatcatggagccggtagctgtctgggtacgcaagggcggcgagtgggccatcatccaccgctgcaaacgctgcggaaagctcagttccaaccgtgtggcggcagacgacaaccccatgaagctcatgagcattgccatgaagccgctgtgctctccgccgttcccgctggactatattgaggaaatgaccgccttgatgggcggcgatggacggatgcggtaagccgcaggaggaactacaagatggagtatatccgaatcacaaaagaaaacatcgacaaggaacacatctgttgtgccatgtccggtcaacagagccttgccaagaaggaatggctcaagcagcgctttgaggaggggcttgtcttttaccgcagtgcggagcgcggcaaatgctttatcgagtacatcccggcggaaaacgcatgggtgcccattgaagcggcaggctggctttatatcaactgtctgtgggtctccggttccctgaaagggcacggctattccagcgaactgctggaagaatgccttcgggatgccaaggcgcagggcaaaaacggcgtttgcatcctgtgtgcagaggggcgcaaacgggagtttctcgctgacccaaagtttttgacccataagggcttcaaggtttcggacacctccgattgcggcatcaacctcatgtacctgccccttgcagagagtgcccaatcgccaaaattcaaggcctgcgccaagcatcccaaggtggaggaaaacggctttgtcctctactataccgaccagtgcccttacacctattattgggtgccaaaggtgcaggaggccgcaaaggaacatgggattccgttcaaagccatccacgtcacagagaaagagacggcacagaatgtgcctgcacccgtcaccacctatgcactgttccgggatgggaaattcgtgacacagggcatccagtcggacaagaaatttttgaaattagcaggcgcagcggattgagagattcaggaggaaaaatgcaatacgatcaaacggttatcacaccaaaaggactgatcgtccacatccgaaacggcgtggcatccgatggaagcgctgtgcttgaaaactttgatctgacacacgcagaaacagattatctgctgagttatcccgatgaaaatcactttgatgcggaacaggaaagccgctacttggagaaaaaagcaaccagtccgaatgagatcgaactgatcgcctttgtggacggtaaagtggcaggaactgctggaattgatgcaatcggagcgcagtataaagtggcgcatcgcgcggaatttggcatcggtatcctaaaagagtattggggtctggggatcgggcgagccttgatggaagcctgtatccattgcgctaaaaccgccggatacgctcagttggagctggaggtagtggcggagaacgcaagagcaatctccatgtaccagacggcaggatttgtggaatatggcagaaacccaaaaggttttcgctctcgaaacgctggatatcaggaactgatctctatgcggctggaattgtaaagcttatcgactaaaacagccctcctgaccatgacggccgggagggctgtttttggtagggaggttgaccagtatgaggacgatacccggactaccgcaaggcgcggaacgagaggcaggaactggttcgggcacagaaaaatgtagaacgtttttttgcagaggaaaagaacaccaccgagaaaacacagacacgttaaaaaagtcgccgaggagcttcccagttgggaggcatcctcggcggattttttagtttatatagcagtttttcggagcaatgcgcctgttacccgtatattttccccacgatctttccgcgtgctgcggcgggcagaagcttgcacagcaggctcaggaacttatactgtgcaccggcaacataaacgaccgccggcttctttttctccacaataccggcgatgtaccgtccaatgcgtgccgggtccatgccgttttgctcgtcatgctccatctgactgacgctccgggagatgcgcccgccgtattcatcatcgccgagaatgcttttctgacgtgcttttgtaaaaccggtacagatgtcacccagttctacgacggtaacatggatgccgtagggcttgacttcatttgccagagcgtaagagtaagaagaaacggcggctttgcttgcggagtagaaggtctggaacggaatgtgtgctacggcggcaacagagctgatgttcacaatatgccccttcccctgacggcgcaggaaggggagaaccgctttatttacagtgactgtcccgaagaaattcacatcgaactgtgctttggcttgttccatggacgtaaactccaccgcaccggaaatgccaaagcctgcacagttgaccactgcatcgattttagtttctttttggatgacctgctgcacagcggcgttgaccgcatcttcatcggtcacatcgacagacagatgggtaacgccctccatagggatatttctgcggctgaactcatagacgatgcagccgttctccttcagagcggatgccgtgcaccgcccgatgccggagcttcctccggtaacaatgaccaccttgttgttttctcccaccatgattttcctcctgaaaatgttgatctggttcgagtataccgcatcgcagggcgactgtctatacggatagccggatcgtggaaaagtacagggatcaacctgcgtaaattttcacgcagattggcctctctttgttttacacaaccaatgccaattagcgcttgaaaacgaaacgctgcgcaagtatactatactagttatactgtacaagcttgatcacaaatcagtatgccagttgaccataaaaggcataccagaattgaagcgtgcggcggggtcaaaaccctacgaggatgaaaatgaaattcgatagaagacttacagatgaaatctacacttccgatacggtaaggctgggaaaaaatgcatttcaggccatgcaggagacgatctatcataatggcggtgtcggaaccattaccgggtactatgatgccgaattgtcgatcctgtcggtcagtgatctgttgctgcataatctgaaccacagctatgcatccctgatggaacagacaaagggttcgctgaagaatcttttctataagaaagatgccgcattcctcgacaatgcacgctttcgtcagattcaaggcgaaggggaaggccggatcctcacggcagatggggctcccgtctatgtgcgtctctacaaaaaagatgcagtcgatacggatggaacaccgatctggatcatgtcagtacagatgaactgggcgtatgagaaccttgcgctggttaatgaatccatccattctgcactatggtattttgagtgtaatgaaaacggtgagatcgttcatgtgaactggagccatgcgttccggcagatccttggttatcatgacattctggattttccgaacaaactggattcgtggtcgaaccttctgcacccggaggactatgaccgggtaatgcagctgcttttggaaacgattgcggacaaagccaatactacaaagtataatgttgagtaccgactgaaaatgcaggatggccaataccactggttccgggcatcggcggaggtgatacgccgtctggatggttcggccaatcgaattgccggaatcatcagcaacattgacgcggaaaaaagaagccggatgcaggcgcagcgggcagcggcatttcaccgtgcatttaccagcgcaaacctctgcgaatactatgtaaatctggaaaagaacacctttgacactttcaaagtggagccctctttgatgacggcctttgagcagaaccacacatgggatggactagtcagattccttgtggataactatgtggttgaagaggacaaaaagtctgtaacggatttctacaatcgcgcctacatcacggaaaaactaaaggggcttgagacggagctgcgtcaggagtgccgcatcgttctggatggggaggaacgatgggtcagcaacgtggtcatgcgcggcgagattgaagattccgaatatgcgatgatttttctgcgggacatcacagagtccaaagcagagacggcacggcggatgcagatggcctcagataacgcatcgatggatcttttgatcaagagtatggtgcgtctgctggatcgctttgtcgtctgcgatctggagaatgaccggtatcggttctataatctgcaaggtgaaatgatatacgcgccgacgggaacctaccatgattttgtggagcaggtggctgtaaggtataagacgttggagccattggcggcggtggacgcattgttctcaccggaaaatatccgcaagaatctgcagggcgagaacgacatctacaaatttgaatactgctccatagacgaaaacacctataagatcgcttccttcattccgctggagtgggatggcacaaagctggtcaaagcactgttggcatctatggatgtgtcacaggagaaaaaggccgagatcgaatcccataaggcactgaaggatgcgtaccgggcggcggaaaacgcaagccgtgccaagacggaattcctctccaatatgtcccatgatatccgtacaccgatgaatgcaatcattggcttgaccgccattgcgggtgcgaatatcgagagtcaggacagggtggtcgagtgccttggaaagatcacaaagtcgagtcgtcatctgttgggactgatcaatgaggtgctggatatggccagaatcgagagcgggcgaatgagccttgccgaggaggatttcagcctgccggagctggtcgataacctgctcaccctcacaaaaccggcaatcgacgagcacaagcatcagctcgaagtccatgttgagcacatcgagcacgaagctgtctgcggcgacagcctgcgcatccagcaggtctttgtgaacctgatgagcaacgccgtcaagtacaccccggatggaggaaacatcacccttacgatcaaggaaaaaccgaatggcttctcggagcttggctgctacgagttttccatcgaggacaacggcatcggcatgacgccggaattccagaagatcatgttcgagccgttcagccgggcagacgatcaccggacgaccaaggtgcagggcaccggtcttggcatggccattgcaagaaacatcgtcaacctgatgaatggtgacattcaggtcgaaagcgctcccaacaagggaacgaagatcacggtcacggtctatctgaagcttcaggagaacgagaaggaacaggaaaaagaactgctcgatctgccggtactggtcgtggacgatgacaagacctgctgcgaaagcaccgttgcaacccttcaggagatcggcatagcgggcgaatgggtcctgaccggcaaggaagccgtggaacgctgcgcggcgcggcacaagaccggccgcgactattttgcggtgatcctggactggaagatgccggagatggacggcatcgcaacggccagaaggattcgggaatgcgttggggaggacgtcacgatcatcatcctgacttcctttgatttcagcgagatcgaagaagaagccagagcagtgggcgtgaatgcgtttatggcaaaaccgctgttccgttctcgtctgacggcaactctgcggcagtttacatccgggaagaaggagaaaaacgctcggaactatctggaagactttgcgaaggaaaactatgcgggtaagcggattcttcttgtggaagacaatgcgctgaaccgtgagatcgcaaccgagattataggcatgacgggcgtgaccatcgacagcgccgaaaacggaaaaattgcagtcgaaaaggtgatggaagcgccagaaaagtggtacgatctcatttttatggacatccagatgcccatcatgaatggttacgaagccactgctgcgatccgtgcgcttgccggaagccggggcaaagtgcccatcattgccatgacggcaaatgcctttgccgaggacgtgcaattggcaaagaacaccggcatgaacgagcatatcgccaaaccgcttgatttgagtaagctgaacgatgtgctgaaacagtggctgtga

SEQ ID NO: 10 - DNA, 7737 bp, unidentified
  source 1..7737: mol_type = unassigned DNA
  misc_difference 4228: note = a, c, g, or t
  misc_difference 4229: note = a, c, g, or t
  misc_difference 4230: note = a, c, g, or t
  misc_difference 4231: note = a, c, g, or t
  misc_difference 4232: note = a, c, g, or t
  misc_difference 4233: note = a, c, g, or t
  misc_difference 4234: note = a, c, g, or t
  misc_difference 4235: note = a, c, g, or t
  misc_difference 4236: note = a, c, g, or t
  misc_difference 4237: note = a, c, g, or t
atgataaacaaagatatgacgattatggaagcgctcgaacaaaacagagcttccgccactgtttttgcgggatacggcatgggttgcataggctgtcttgccgcgagcggcgaaacaatcgccgaagccgccgcccaccatggcatagacgtggacgagttggtgaacaagctcaacgaaacctgcaaataaggccggtttagttttttaacgcggaaaaagggcgaagcttccgcttcgcccttttgttaaattggttttcaatacgattcgttttttgatttaagcgcactttttttccaagccggcaacaaatttttccagtctgtccaaggccttgactatggtatccatgctcacgcagtagccgatacgcatatatccttccgcggagaagcacacgccgggtatgaccgcaaccttgcattccttgacaaggcgcgtgcaaaattccatgctgctcataccgaatttgcttatattgggcatgatgtaaaaggcgccttcgggcttaaccacgtcaagtccaattgccacgagtctgtcgtagcagtagtcgcgtctttttctgtattcctcgacaaagggtgcggggtcgaatctgagcgcttcgattgccgcatactgtataaaggtgtttgcgcacactgtcgtatactgatgcaccttgaacgcctgctcgatgaattccttgcttgccatcatgtagcccagtctccaccccgtcattgcgtaaggcttggaaaagctttggcaatacacgattttttctctcaaatcctgaaacctgacaaagcccggtctgcgctcgttgtaaaccagctggttgtagcattcgtcgcagatgacgaacatatcgcgttttttgacctgttcgtaaacattgaggagggacttttcgtcaagtattgtgcctgtggggttgttggggcttgtgagaatgattgctttggttttgtcggaaacgacggaggcaagagccttttccgttatctgaaagttgtcgggagcggtgttcaactcgacgtacctgcccttgcacagctcgatgacgggcttgtacatggaaaaggcgggcacgggaactatgacctcgtcgccctcgttgacaacggcaaagagcgcgctcattatggcttccgtgctgcccgtagttatcataatttcgttttcgtcgtaatccactccgttgaattttttctcgaaagcggaaatttccctgcgaagctccgccacgcccatagtgggcgcgtaaaaggttttgttgttttccaacgcgactccgcaggcgtccttaacctgctgaggggtgtggaaatccggctcgccgagagtgagaaacagctcggcgccctccttgtgcgccatatcgttgaaggcgcgcagcgggctgggttcgatacgtgtaacctgttcgttgaatttcatagattgttatctccttttctttgaattatatcatatacgcccgaaagcgcaggtgtaatttgtttgaaaaaaccttttccttttttgcggtttagcgaggcgttgtccttttcgttctgtgcgggaagggcattttgcggacaactcttctttttttgtttttctcggttgccaacgcgcctttgcggtgctataattgctgtcggagaaatttacatgatttacaatatgctcggaaaaaccaatcttgtcatatccgcggtgggcttgggcggaatccccttgcagcgcttagaccgggaaaaagcggtggaaacggtgcgttacgccttggagcgcggagtcaattttatcgacacggcgcgcggatatacggtcagcgaaagctacataggcgcggctcttgcgggcggactgcgcggggacgtggtgcttgccacaaaagcgccgccgacggaccgcgggggtatgctcaaagaaatggagggaagcttgaaagacctcggcacggattacattgatttgtatcaggtgcacaacgtgaaggattgcgcgtcgattgaccgtgtgttcggcgacgacggcgcatataaagcgtttctggaaatgaaagccgcgggcaaaataggccacttcggcgtgacaagccacaagcgcgaggtgctgacttatctgctggaaaactacgccgacaaaacagaaacaataatgtttccctacaatatcgtggaaacgcagggagaggagctgtttgcgctggcaagcagtctcaatgtggctgtcatagtgatgaagccgcttgccggcggagcaatcggggacgccgcgcttgcaatgcgtttcgcgttgtccaatccgcacgtgtcggtcgtcatacccggcatggcaaatcaaaaagaggtggacgaaaacacgtcgcagcccgccgagctttccgacgcggacagggaaaaatgcgcgttgcttgcgggcgagctgggttccgagttctgtcggagatgcagctattgcgcgccctgccccgcagggcttgacatacccaccattttcactttcgaggggtatctcaaacgctacaaccttgccgaatgggcaaaggacagatacatgaatctgaaaaaacgtgccaaagactgtcttggatgcggtgagtgcgaaaagagatgtccttacgagctgaaaatcagggagagacttaaaaacgtcgcacgtgagttcgaggacgccgaaaaggcgttttccgactccgaaaggagttgaaaatatggcgttgttcgagtgcaagctttattcccatgtactgcacgagccgtcgcaggtagccgtttacgcgccggaccgaaaaaacgctgggatgtccgactttaacgtcgtgcttttgctgcacgggatgtgctgcgacggaaaggattttttcatgcgcacgggcgtagccgcttatgccgacgctgcggacgccgtgcttattgcgccatcctgcggcaacaactatttcgccgacgggcagaacggacttaaatacgaaacgtatctgttccgcgagctgattccttttttgcaaaaaaccttttctttaaacacctcccgtgaaaaaaatttcattctcggcacgtctatgggagccttcgccgcggtgcggctggggctgacttatcccgacaggtttaaagccgtttgttctttgtccgcgccgttggacctgaaaaccgcggtggaaacgctgcgcgacaatatcagggactgccgccgccgcgctttttgctcggtctacggctcctgcgagcagttcggcggctcgtcggcggacatactgcatctgattgagcggactcctcccgcaacggctccgtttctttggctgtatgtggggagaaacgaccctcttttgcaaatcaataaacaaactgcggaaaaaatcagagaaaaaggctttgccctttcgcttgaaacggacgacggcgcccacgactgggcaagctgggacaggcaggcgaaaagatttttcgacttgtacgtgggaaaataatattccgtaatataacgagacttaaaaggacgcggaagcgtcctttttttgccgtatgcgtttgatgtcgaatttggacgaaaacgcgccaaatcgcttgacaaaccgccccgaaactctcataatggttgtaacgacaaagttttgccgccgcacaacaggggaaacaaaggaggagacaattgaaggagaatttatttgaagcggcgcgttccgacgagaagctcaggagcgctgcgtttgatacaagctgcgcaatggatgaaattttgtggaggctcaaggatttgagcctgattcacaacgacatttccgagctgataagcgtgggctgcggcttcggcgacgttgcgggcgaccttaaaaacgtctccgacaagacgcgcgacagaatacgcgaggctttcagatacagagagatgaacgacgcattgaaccgcgttttgggatacgagcttgagagggtgtgcgaaagcatagaaaatctgatttatcccgcgcccgacgcgcctgaggaataatattgcgtcccgctttgtcaaagcgggatatttttttgtcggcacgtctaaaacgattgacaaacccgattgaggctgataagataacacgcgaagaaacctatcgagagtgtcggagggacggacccgtcgatgacacagcaaccggacgaaatgtcgtcacaggtgctaaattccgcagggcgaggctctggaagataggacggcgtcaaaagctgtttcgtagatcggaagagcgtcgtgtagggaaagnnnnnnnnnnccccgcgctgtccgcggggttgttttgatttagaggttttaacaatcgcagacgaaggagaaaattaagggaatgacaggaaagagattttttacaagcgagagcgtgacggaggggcaccccgacaaaatgtgcgaccagatttccgacgcgattttggacgcgatactcaaagaggacaaaaacgcgcgcgttgcttgcgaaacgcttgcttacacggggggcgttgtggttgcgggagaaatcagcacccgctgctatgtggacataaagagcattgtccgcaataccgtcagagaaatcggctacacgcgcgccaaatacggatttgacggcaacacttgcagcgttttgacgtctattgacgagcagtctcccgacatcgcgctcggagtggacaaaagtctcgaaagcaaggaaggcttcggcggcgaggcggagcttggcgcgggagaccagggcatgatgttcggctatgcctgcgacgaaacacccgagcttatgcctgcggcgcacgtttacgccaatatgcttacaaagcgccttgccgaggctcgcaaaagcggggaaatagagctgttgcggcctgacggaaaagcgcaggtgactgtcgaatacgacggcgacaaggtcaaacgtatagataccgtcgtggtttcctcccagcacgcggcggaagcggatatggaaacgctgcgggaggaaattctcaaaaaggttattctcgccacgctgccggcggagctggttgaccgaaggacgaggtatttgataaaccctacgggaaaattcgtcataggcggacctatgggcgactcgggactgacgggcaggaaaataatagtcgacacctacggcggctattgcccgcacggcggcggcgcgttttcgggaaaggacccgacaaaggttgacagaagcgcggcttacatggcgcgttatatatgcaaaaacatcgtggctgcgggcgcggcgcgcagagttcagcttcaactgtcttacgccataggggtggcgagacccgtttcggtttgcgtggacaccttcggcacgggagccgttccggacgaaagcatgacggagctggtaaagcgcttgttcgaccttcgtccgcaggcaataatagaaaagctggatttgcaaaaacccgtgtacagacagattgcgagctacgggcatttcggcagggacggcatgacgtgggaaaatacggattcggcgcaaatgattgccgccgccgtcgaggaatataaatcgggcagatgacgttaaagggagcaataggcaacatagtttttttcaacgcggaaaacggctacaccgtttttcagttgatttccgacagcgacggcggggaaacgacctgcgtggggtatcttccgcagctcaacgtcggacagcaaatcgaggtttcgggcaaaatagttactcatcagaagttcggcgagcagttttccgtcgaaaaattttcccttgccgcgccgacaggctcggaggggcttgtcagatatcttgcaagcggactgataaagggtgtgggagaggctacggcgcgtcttatagtaaattcattcggcgacgacactctttccgtgctggaaaattctcccgaaaggcttgccgagctgcgcggaatcagtctgaaaaaagcgcgcgccataggagaggagttcaacgggcacagagccatgcaggagcagattatgtttctgcaaagctacgatattaccctcaacacggcaataaagatatatcgcgtttacaaggacaagacggaaagcgtattgaaaagcaatccttacaggcttatagacgacgtggacggaatcggctttttgtcggcggacagaatcgcaggcagcatgggcataggcaaggacagcgagttccgtctgcgcgcgggcatagtttattgtctcaaagacggggcggaaaagtcgggcaataccgttattgaggagcagactctcaaaaaatcggtgggcgagcttttggggtacgacgtgtccgaaagggcggagctttacgaggaaacggtagacaacctgatattcgaccttatggcgcgccgtttcgaggacggagagaaagcgggactggctcttacgaggtattacaatatagaaaaaaacattgcgggcgcgctggtcaggctggacgaggaggcgcccgccatttccgcgtcgtttaagacgctcatagaggattttcagtcggcgaacggagtcaagctgcactccaatcagcggcgggcggtggaggcggcgtttgaaaacggagtcacggtgataacgggcggaccgggcacgggcaaaaccacaatcgtcaggtgcgtttcgtatatttgcgacgctcttgacataaaggcggagtattgctgccctacgggacgcgcagcaaagaggttgggagcctcgacgggcaaaaacgcaaagaccatacatcgtctgctcggcatggaggcgagggaggacaggctggttttcgcttacgacgcctccaaccctctcgaagccgacctcgttgtggtggacgaagcgtccatggcggacgccgtcattttcaacagtcttttgaaggctttgcggcgcggctgccgtctggttcttgttggcgacaaggaccagcttccctccgtaggcgcgggaaacgtgcttgccgacgtaatcaagagccgtctgttttcagtaaacgagcttacccacatttacagacagtcggaggacagctatatagttaccaacgcgcacctgataaacagcggaaaaatgcccgtcatagaaaaggacagcaaggattttttctttatcgcgagggacaatcaggaggatatcctaaacgaggttacgggacttgtgacgacgcgtctgccgaagtttacttccctttctcccgcggagattcaggtgcttgcgccaatgaaaagcgggcttgcgggcgtcgccaacttaaaccgcacgctgcaagccaagttaaatccctttgagcgttcaaaaagcgaaatcaacgtcggaggcgtggttttccgcacgggagacaaggtcatgcagacggtcaacgactacaatatggagtgggaaatcaacgactcggagggcgtgaggtcgggcaagggcgttttcaacggcgacataggttatattacgcgaatagaccgcacagaaaatcttgctgaaattctgttcgacgacggcaggcgggcggtttacacctcggcggatatgcccgacctgactctcgcctacgcggttaccgtgcacaaaagtcaggggagcgagttcgacgcgctggtcgtggcggtgacaaacggaccgcccacgattttaaaccgcaatctgctttatacggcggtcacgcgcgcaaaaaaaaccgtggttttggtatgcagcaaaaggatgctgggaatgatggtcaaaaacaattatatcgaggagcgcgccaccatgctcaaagcgtttttgaaggaagaaaaacagaagcgctcggcgctttacctgtga

SEQ ID NO: 11 - DNA, 14073 bp, unidentified
  source 1..14073: mol_type = unassigned DNA
atgaaagaagactggaaacccggaacaatgatttatccgctgcctgccgtattggtgagctgcggaagcactccggaggaatataacattctgactatcgcatggacggggacgatttgtacgaacccgcccatgtgctacatctccgtacgccccgaacgccactcctacgacatcatcaagcggaatatggaattcgtcatcaatctcaccacgaaagacatggcccgtgccacggactggtgtggcgtacgctccggaaaggactacaacaaattcgaggaaatgcatctgacaccggggaaaagcaccgtagtcagcgcgcctcttatcaaggaatcaccgctttgcatagaatgccgggtaaaggagattatggctctcggttcgcacgacatgtttatagcggatgtggtaaatgtacgtgccgatacccgtaatctgaaccctgaaaccggcaaactggaactggcggaaacgaatccgctggtctatgtgcacggtggatattatgagctgggagaaaagataggcaaattcggatggtcagtagagaaaaagaagtaataatgcgataaaggttttaagagatggagttgcgacgaatcttgatgggcttatatctgttggccttccccgccatgatgtggggacagactccggttgtgcccggtactgccgacgaagagcattccagacaccgcaaggaaactccggtcaatttcggtttcaaaggcggtttcacctcttccttgttccttgtatcccagttcagcgtcaacggagtgcccattgacgaagtgcagaacaattacaaaataggatatttcggttcccttttcatgcggataaacttcgaccgccacttcctgcaaccggaaatatcctacaacatcaaccggtgcaacatcaccttcgagaaacctctgcccgaagacgccgcatcaggagcccggccggaggaagcctccattacatcgtccatccacagtatagacatccccgtcatctacggatacaacttcatcaaggaggggccgtacagccttgccgtctttggaggacccaaagtgcgctatatatgggacaggaaaagtgacatcgacttcgagaatttcgaccaggtgaatatccgtgaaaggctgcgtccgctcaatctcagtttcaccgtcggcgtatccgtcaccatctcacgcgtctttttcgacttccgttacgacatggggctgcacaacatctccaagagcgtgacatacgatattccggccgacaacaacgctgctgacgaaaacacgaaaaacgaaatccgttttcaccgcagggacaatgtgctgagtttttctttcggagtgttcttttgacagtaaatttcttccttttctttcaatttattcatttatttcccgtaaatttgtgcgcttaataagagaacacagatttatcaaacttatctaataagcagaatgaaaagagatgatttaattttcgaacttatcgaaaaagaacaccaacgtcagctcaaaggcattgaactgattgcatcagagaactttgtaagtgaccaggttatgcaggcaatgggctcctgcctcaccaacaagtatgctgaaggataccccggcaagcgttactatggtggttgtgaggtagtggaccagagtgagcagattgccatcgaccgcttgaaacagatcttcggcgcagaatgggccaacgtacagccgcactccggtgcacaagccaatgcagccgtattcctcgccgtgctcaatccgggcgacaaattcatgggactgaaccttgcacacggcggtcacctctcccatggctcactggtcaacacttccggtattatctatactccctgcgaatacaatctgaaccaggaaaccggacgtgtggactatgaccagatggaagaagttgccctgcgcgagaaacccaaaatgattatcggcggcggttctgcttattcccgcgaatgggactacaagcgcatgcgcgaaatcgcggacaagataggtgccatcctaatgattgacatggctcatcctgccggactgattgcagccggtgaactggataaccccgtgaaatatgcccacatcgtgacctccactacccacaagactctgcgtggtcctcgtggtggcgttatcatgatgggtaaggacttccccaacccctggggcaagaaaactccgaagggagaaatcaagatgatgtcccagttgctggattcagccgtattccccggtatccaaggtggtccgctggaacatgtcatcgcagccaaagccgttgccttcggcgaaatcctgcaaccggaatggaaagaatatgccaagcaggtgaagaaaaacgccgctgtcttggcacaagccttgatagaccgtggcttcaccatcgtttccggcggtacggacaaccactccatgctggtagacctgcgcagcaaatatcccgatttgaccggtaaggttgccgagaaggcgttggtatctgccgacatcaccgtaaacaagaacatggttccgtttgacagccgctcggctttccagacttccggtatccgtctgggtactcctgccatcacaacccgtggtgccaaggaagacctgatgctcgaaattgccgagatgattgaaaccgttctgtccaacgtagacaacgaacaagtcatcgcagaggtacgtgcacgcgtcaatgcgaagatgaaagaatacccgctgtttgcttattaataagcaaacagaattaaaaattaagaattaaaaattaaaggctgcgcagttcaaagcgaacattgcgcagcctttaatttttaattcttaatttttaattctaaacgcgctccgcgcgtttagctcagcccttctatatttccgtccacaatatcaatgtgttcggcttgtggtttcttgggtaatcccggcatacggagaatttcaccggcgatggctacaatcatttccgcaccgttattgaccacaatatccttgatgtggaactcaaagttgttgactgcaccgtatatcttcgggtcggcagagaaggagtactgcgtcttggcaatacagacggggtaatggctgatacccatctgctctatcagtttgataaccttgcgggagtggagactgtaagtcactacgcttgccccgtagaggttgcaggctaccttttctattttacgttccacgcaatcgctctcttcgtaggtgaaggtcagcggttcggatggtttgttctcgatagtatctactaccagattggcaaggtcaacggctccctctcctcctttggcaaaggcgttgttcacggcaaaacctacctcaagcttttcttcgcaatggcggcggatagcttccacctcctcgtccgtatcactggcaaaacggttgaatgccacgatgacctgctggccgaatgaacgcaaattgcgtacatgcttgtccagattgccgaagccctctttcagtccttccatattgggttccttgatgcggtccagactgacaccgccatgcatcttcagtccttgtgcggtagcaacgattatcgtcagcttgggctgtaggccgctcttgcggcacttgatgttgtagaacttctccgcacccaggtcagccccgaaaccggcttccgtcactacataatcgccaaatgtcatggccatttttgtggcaagaatggagttgcaaccatgggcaatatttgcgaacggtcctccatgaacaaaagcagcagagccttcggtagtctgtaccaagttggggttgatagcatctttcaacagtacggtaatggcaccggctactcctaactccttcactgtgaaaggagtaccatcgaaacggaatcccagaataatattttcaatacggcgacggaggtcgtcgaggtctgttgccagacagagaatagccataatttcagaagccggggtaatatcgaagcccgactcctcggtaatgccgttggtgctcggtcccaatccggtgacaatgctccgcaaggaacggtcattcacatcaagtacgcgccgccagatgatttctttcagtccgaagccgtccgcctgatgctggtacaagtaattgtcgagcaaagcggaaatcatgttgtgtgcggaggtaatggcgtgaaagtcgcccgtaaagtgcagatttatcttctccatgggcagcacctgggcatatcctccaccggcagcaccgcctttcatgccgaagcaaggacctaacgagggttcgcgtaaagccacaatcgctttcttgccaatcttgttcagccccaatgccagcccgatggacacggttgttttaccgatacccgctttcgtagccgtgatagccgtcaccagtatcagattgctcttcttcactttctcttcatcaatcagatgcgtaggaatcttggctatgtaacggccatagttctctacttcgtcacgcgggatatccacactttcagccacctgctttatcttcttcagctctatgctgcgggctatttcaatgtccgatttcatacagagtcttttctttaaataacaactttaatgttttgaaagttgcaaaagtacgaaagatgtggcaaagtacaaaagaataccgtattttcacctgaccacctgcatcttctatctatttgaaccgcgacgtatccaccgcctcccgttgcttctccttatatcctccgaatttataggtaaacgatacgccgaattcgcggaagcatgagtaatgattcgtcacattctgcgtcttgaaacggatgcggggagaaatctgtcccgtctcaaaaatatcgttgcagtagaggttgaggatggctttgttcttggcaaagccgtagcgcagggcaatattcacattgcccgacgtaggcaggtcgtagatgccctgaatggctttactatgcacaaatccggtcaccgtcagcttcaagtcgggtttggtggagagagtaaaagtattgttcatctgggcaatgccatagcattgctttctgtcgaaaggaatatcccagaaatcaccatccttttcgcgatgccacaagccgatgagggtaaggcgagaattcaaccaatccttcaccttaaatgggatagaggcttgtattcctgcttgttgctgataatcaaaattgagtgtcttgtagatttcaaccagacgttcggaagattggtaaagcgtctgtacggagtagtctttggtgtggttgaaccaggcgctgaagatgtatttgcttttcaaaatataggtcattttcagctcatactcttgtgccggtttcagcaacggattaccatgcagctcagagtatccgccgccgatgtaagagacggcatcctgcacggcccagtagtcgggatagtccttgtcgctgctcaaggagagctggaggatatgtcccggtgccggcatatagttcaagttgacaatgggataccagtcccactggtcccagacgggagtcttgtaatgctccacagccagagaagcgtccaaagcaagtttgtcgccgaaactcttgctgaaacctgcatagatattccaagtttgctcgcggcggcgggacttcatattgctcaaggcatctgatgaggtcaactgttcaccggtatcgggatcgtaataatattggtagctattgtcaatactggtagtgtagacggctccataattcaagtcccagcctttccccaagttatgctcctgggccagaaagaacttccagcggttgatgcgctgacagtcttccgtgtagaaatcgagttcctcatcctgcatacggctatgcagtagttggttggacggagagcggtagtaggtcagttcggcaccggctttgaggccgaaaggggtacgatagtccagacggccgttgtgcagccagtcggtgctattgctatgagttgtggacacctgcgtgcccgtcacgcccttccagttgtgggaggtggaatagccaccgttatagacgaaactcagctgatggttcttggcgatactatagtccgcccctaccctgaaattatgggtatggctgcggccacggcccacctcatctgttgtcatggggtgaaccgagccgtccgccagggtgtgcacagcctctttgtcggtagtagagtagccccggccatggctgtgcgagtaaagaaaatctgctgagaatttatttttgctgaagagcaggctggcgcgttcctcaaagccttcgttgtgcttctggcgatacttgacgtagagttcgccttgccaggagccggggccgcctgccgattgtttcaaggtgatattgataagtgcgccacgcacctggtagcgtgcaggggcgttgtacatcacttccgccttctctatgcggctggcagggatgctgcgcagcaaggcatagagctgccctgtgctgagggtggttactttaccgtccaggataacggtgactccctggcctgccaactgcagcccgccattcatctcgatgacgccgggaagctctttcacggcatcgtaggcattgtctacggggaggttccggataaggcggggcaggtcgtacaccagcttgccttgcgctgcctttacgatggggcgttcaccggtaatcatcacttccggcaaggtctgataaaggctgtccagacgggcatcggtcgtgataaggctgtcggcgctgaggatacggttgtcgtccgcaccggaggtggttgcagtgccgttgttctcttgtgccgaaaggctgatgctcaatgcacagcatacaagagggagtaaatagaatcgtttcatgttcttctttttatttatgttcatattcttcttctgtaaatcttcgtctgcaaagtacggcagaatcagcagaaacttgtgttatcagcggcttaccaagtgttatccagtgttatcgggagtgttatttagtcttatcggatgatagggttcacaatattagtcttacctttgtatgtataaaagtaaccggaaacaaacatgaaactgccattcaaatatattgccatacttgtcatcgtctccctggccggcatcttcgcctaccaagcctactggctgacggggctctaccataccatgcacagtgaaatggagagggacatcaccgaagccatgcgcatgagcgactataacgaaatgatgatacgcgtggataaaatgaagcaggacgacataaaccacggtgaagtcagcgtatcagccggatacagcgatgacggaaaatcatttgtccgtagcagtaccaccatctcccgtgaagattctttggacaacaccaccctgcacgaaaccttcatgcccaaaggagacagtgtttacgtgacccacccgaacgattcaacccgcgtggaagtcagtgtcagggactcggacagctctccccaatccgcattgagtgccaaagggggactggatgtgattttgcgcgaccaaaacagtatgctggaactcgccacctacttccagcgcggactgcattcgggactggacatcatttccgaccccgacgtagtgctttatgacagcctgctgacttcattcctgcacgaccgtaacatcaatcttccccataggctgctacatcttcacaaaggcagtaaatgggactctaccattctctatatagatacattggtaaacatcggtactcccggctatgtgcctacctcaaaagctgtggaatataattattctttcgacatcaatacaagtcaaagctaccgtctcatcatggaaccggtcggcatgctggttctgcggcagatgtcgggcattctcaccacgtcattcatcatcttgattgtactcgctttctccttctggttcctgatacgcaccatcctgaaacagaagacactggaagagatgaagagcgatttcaccaacaacatcacccacgaactgaagacccccatcgccgtagcctacgccgccaacgacgctctgctcaacttcaaccaagcggaggaaaaggcccaacgcgacaaatacctgcgtatctgccaggaacagcttcagcgcctcagtggactggttgaacagatactttccatgagtatggaacgccgcaggactttccgcctgcacccggaggagtttgcaatacgtgatattctggaaacgctcatcgaacaacacaagctgaaagcggaaagctccgtccacatatcggtggacatcgaaccggaagatttgagcgtacttgccgaccgcacgcatttcagcaacatcatcagcaacctgatagacaacgccatcaaatattcgcacggagaggccgaagtggccatccattgccgcaaggtaaccgtcgaagggcagaatgaacagaccgaaatctccgtcagcgaccacggtatcggtattgctcccgagaagcagaagcacatcttcgacaaattctaccgcgtacccacgggtaatctgcacgatgtgaaaggctatgggctgggattgttctatgtgaagaccatgatagagaagcatggtggcagcgtatcggtaaagagtgagttgggaaaaggaagtacctttacgataaggatatgataacattatttgttagggtactttacattacttgttaaggagctttacattacttgtaacaaaagcgacaattatggaaaagataaccgtacttctggttgaggacgaacagaccctcgccatgattatcaaggacacattggaagggcagaacttcatcatccacaccgcagcagacggtgaagagggattgcgcaagttcttcgacctccgtcccgacgtgctggtggcagacgtgatgatgccccgcatggacggctttgaaatggtgcgccgcatccggcagaccgacaaacagaccccggtactgttccttaccgcccgctccaccatcaacgatgtggtggaagggtttgagctgggtgccaacgactacctgaaaaagcctttcggaatgcaggaactcattatccgcataaaggccctggtaggcaaagctttctcctttacagaagaaaatcccaaggaaactaccgtttttgaaatcggtgactaccgtttcaattccgtcactcaacgacttgcttttgcaggcagcaccccgacttcacctgacgcggatacggaagtggaactctcccaccgcgagtccgagatactgaaacgtctttgcgagaaccgtaaccaggtggtcaacacccagaacgtattgctcgacctctggggagacgacagcttcttcaactcccgcagcctgcatgtgttcatcaccaaactgcggcataaactggccggagacgagcgcatccgtatcgtcaatgtgcggggaataggatataaactaatagtaaactaaactaaaactaaactactatttatgagaaagttattattcattacttttatctgttcctcactctgcgcctatgcacagagcgagattccggaagacacaataaagaaccggcctcccgtaaagaaagagcagattcccttttctccaaaagagaacaagcgtacaggccttgatgaaagccagccccaacaaagtctgcagggcgaacagcaggaagagataaatctccatctccctccctccgactatgtggagcccctgccctggacggacatgaagaagatacactttcagaaaaacatctttgaatgggacttccagcgtttcgccgatttcctgctctcgccggaagtcgtactgacgatgtacggcagccataacacctatcctgcaatgggctccatcatgcaggctggcgcaggagttacttattacagtcccgacggacattgggaattgagcggaggggtatatgccgcccattattccatctcccaaccttcatccattaccggtgcccagtatgccaaaagggatgccccccgaggtactcaatgggacataggctacaatgcctccgtatcctaccgcatcaatccctacatgcgcctgcatgccttcggccagtattcgggctacgggagaagcaactcctttcatggatatatgaacccgatgtatccgcaaagcggttatggcatggtactggaactgaaagtgacggactggctcgacctcaacggaggcctgggacggagctacgaccccaccaaaatgaaatgggtgacttcgcccgtcttcgcccctaccattcgtataaagaaatagaaataatacaaagatatttccggaaatagagggaaacgagtatctttgttcagtccgcccctatgcggcagacagcaactgaaattgtgaacaaagaactatgaaacgaatcttcttctgcatcatcattttacttgcaggcatgtcatccgtcagcgcacagagcgagatgcctgccgatacggtacgtactgcagtacgtggcgaagcgtctcccgaaggcatgtctccgtctgaaaaggagcttctgccggacgtgaagaattacgacggcttcctgctggatatggggctgatgaatctgtctgcccccactcttcccaaattcactttggagataccggatgccagcaaggactacagccgcatcttccggttaaacccgaacgtgacttattcacaaggcctttcgaacatattctcactcagcaactcccggtatttcagttcgaatcccttcggactgacgggcttctggggctctactgacaacctgcaaatgggaagtttcactttgaagaacggcatgcgcatccatacgtacggcgaatatgacaaggacggctggaaagtgcccaacccttccgcactgccttgggaaaagaacaatttcaaaggggcgttcgagctgaaatcagccaacggagcctttggcatacgcatcgaggtacagcagggcagacacgtgccctattgatgcccatcacttaacaacagaatcaatgacaagaaagaaaatactggtgataggcgccaacggttttaccggcagacgcatcctggatgatttgtcccgcaacttgtcttaccagacaacgggctgttccctgcacgacgacatctgtccccattcgggcgactatcgctttatccgtacggatatatgcaaccgccaggcggtggaaaagcttttccaggaagtacagccggatgttgtaatcaatacctccgccctctccgtccccgattactgcgaaacgcaccatgcagaagcggatgccgtcaacattactgccgtggagcatctggcagaatgctgtgaggcgggaggcagccgttttatccatctttccaccgacttcgttttcggtggtgatacggaccgaccctatacggaggagaatattcccgctcccgttaattattacggctacaccaaactggaaggtgagaaacgtatcgccgccgtttgcagggattatgccatcgtgcgtgtagtggtagtgtacggtgccgccctgcccggacagcatggcaatgtgctccaactggtggcaaacagattaaggaacaatgaggaagtgttcgtcgtatccgaccaatggcgtacgcccaccttcgtgggagacgtgtcgcaaggagtggagaagctgataagtcatccgcaaaacggtatctatcatctctgtggcagcgagtgcctgaccattgcagacatcgcttatcgggtagcggacgtattggggctgaatcgctcgctcatccgtcccgtcactacgaaggagatgaatgaaaagacgccacgtccccgtttcagcgggctgagtatagaaaaggcaagccgggaactggggtatcagccgcacacgctggaagaaggaataaagcagatgttcggatggtaaataatgcaggtgcggatggcagcagattcgactacagcaactccggctctgccagtcctttctctttgcgatacacacgtaccatctccagaatcacatctccatatttctccacccctttttttccgaaatacggaatgcgtacaagcatggccttatccgaaggaagcagattgctgatgcctagaattgccttctgctgaatgacggtgtatacgggcagccctaatgcggaagcttctgcattgcgccatgctaccaagcggttgtaaagttccggatgcagcacatccgtgggtacttcaacagccgcagcatcgcgtttccgctcacgcggacgtttctctttatcagcctgcttactgcttccctgcccttctttggcagaagcacttctccctttgcctttacccttctgcgaagccgaatcatcaatggaaagcagtgctttctgcttcaagtatcctgccatatggaaaccattctccagcacataatccagcaaatcagtcttcatgtcaaacacttcctccagctcctccatggcatcccggagcttcttcttcaactctttattatcagaagttaccgtactcgccatcaccgcatccagcggttgcaactgctcttgaaaataagtggcggcagagtgtatgcgcccctgcaaagtcgggtcggctgcatagtcctgcgcagtatcaatcaggcgggtatactggatactgaacttctgggctactttcgtcactttgtcgtgaaaacgttccatttcctccttgcaggctgcgagttgcttgggaaagagcttgtacaagtgttcgtctatcagccgcacataccgccgcaaagcctgctccatgggctggaaatcgaacaagcccgacagcagttccaggaaataggtctgctgcaaggaacggaagcgtttctcgtccggctcgtttctccgtgcctccatcgtgaaggtatctactgcatggtcactgataacggcctttgcagaaagcggggcactgagcaccactccctccaatgtcttgcagcgactcaaagccacatacgcctgcccatgcgcaaaggaggcgctggcatcaatcacggcacgttcaaacgtcagtccctggcttttgtggatggtaattgcccaagccagtttcaacggatactgccggaatgttccttcaatatcttctgtaatctccttggtttcctcatcgagcacgtatttggcattcgtccactcttcctcctgaagtaagaaggtagcgtcgcttcccttactgcgcacttcaattccatctgccgacacggctgtcacctctccaatcatgccattgtagtaacggtgctcaccggaggtgtcgttcttcacaaacattacctgggcaccgcgtttcagttccagcacctcatccgtaggataggaatattcgggaaactttccgtcaatcttggcgcgaaaggcatacgagcgtcccggaagttgttccagctcatggtcattaatccgttgggcctgataattgtgggtcaccaggcggatgtatccttcttctttatctggtacgaaattgggaatataccggcggttcaaggcttccagcacttgcccgtcacaacggttttcgcgaatgcggttcagtaattcaagaaaagtcccatcgttctgccgatagactttctttagttctatggtgcaatattccgtctgcttcaaggcctggctggagaagaaataaggcgtgtcatagtatttgcgcagcatctgccactcatcgtctttcactacgggagacagctgctgtaagtcgccaatcatcagcagttgcacgccgccaaagggtttgttccggtcgcggaaccgcctcaagacggcatccaccgaatcgagcaagtcggcacggaccatactgatttcatcgatgaccaataaatctatgctgcgtataatgttgattttctctttcccgtaacgaaaacggtaggttgccttgccatctgcgctgaatgagctttcgggcacataaggagcaaaaggtacttggaaaaaggagtggatggtgacaccgcctgcattgatagcggcaattcccgtcggtgcaagtacaatcatccgtttcggactctctgccctcagttttcgcaggaaagttgtcttaccggtacctgccttgccggtcaaaaaaagatgagtgcctgtgttttcaatgaattgccatgcaagcgctatttcgggattattctccat

SEQ ID NO: 12 - DNA, 9529 bp, unidentified
  source 1..9529: mol_type = unassigned DNA
atggcaaagaaagttgttttagccggtgcatgccgtacagcgatcggtaccatgggtggctctttaagcacaacccctgctgctgagcttggcgcaatcgtaatcaaggaggcacttcagagagctggagttgctccggaagcagtagatcaggtatacatgggatgtgttatccaggctggacttggacagaacgtagcccgtcaggcatctatcaaggcaggacttccgatcgaggttcccgctgttaccatgaacgttgtctgcggttccggtctgaactgtgtaaaccaggcagcacagatgatcatggcaggagatgctgacatcgttgtagcaggcggtatggagaacatgtccctggcaccctatgctgttcctcaggcacgttatggatatagaatgaacaatggtactttagttgactgcatgatcaaggatgccctttgggatgcattcaatgattaccacatgatcacaactgcagacaatatctgcagagagtggggactgaccagggaagagctggatgagttcgcattaaagagccagttaaaggctgaagaagcacagaagaatggtgctttcgagaacgaaatcgtacctgtaatggttaagaagaaaaaagaaatgatcgagttcaaggtagatgaaggaccccgtcatggttctaccatcgaaggacttgcaaagcttcgtaccatcaatcctgacggatttgttactgctggtaatgcatccggtatcaatgatggtgcagcagcagtcgttgttatgagcgaagagaaggctaaggagcttggcgttaagcccatggctactttcgtagctggcgcacttgcaggtgtaagacctgaggttatgggtatcggacctgttgctgctaccaggaaggttatggctaagacaggcatgaagatcgaggacttcgatatcatcgaggcaaacgaagcattcgcagcacagtctgttgcagtaggtaaggatctgggaattgatgttgacaagcagctcaaccccaatggtggtgcgattgctcttggacatcctgttggagcttccggatgccgtatccttgttacactgcttcatgagatgcaggcaagaggagccaagaccggtcttgcaactctttgcatcggcggtggtatgggatgctctacagtcgttaagattgaagactaagcatattttaaggaaaataagtaagcaggcttaacttcttaggtctgcttacttctgtgaacaaaataaaaaggagttaataccatggaatttgtaacatatgagcagaagggtgcttatgccattatcaccatcagccgtgagaaggcactgaacgcactgaattctacagtactggacgagctgaatgcagttctggatgctgtaaaccttgatgaagtaagagcactgatcctgacaggtgcaggacagaagtccttcgttgcaggtgcagatatcgctgagatgagcacactgaaaaaggcagagggcgaagccttcggtaagaagggaaatgatgtgttccgcaagattgaaaccttcccgatccctgtgatcgctgcagtaaacggattcgcacttggcggcggatgcgagatctccatgagctgtgatatcagaatctgttctgataatgccgtatttggacagcctgaggttggtcttggcatcacacccggatttggcggtacacagagacttgcccgtcttgtaggcgctggcatggctaagcagatgatctacacagcaagaaacatcaaggctgacgaggcttacagaatcggtcttgtaaacgctgtttatacacaggaggagttacttcctgcagcagagaagatggcagcaggcattgcaaagaatgcaccgatcgctgtccgcaactgcaagaaagcgatcaacgaaggtcttgatgcagacatggatcaggcaatcgtgatcgaagagaagctttttggtgactgctttgaaacagaagaccagaagtacggaatggcattcttccttgacaagaacaaggaaaaggtaaaagagcccttcaagaactgctgatttctgaaagcacagatctgtaaatgacagtcggcgtagtgcctgcggcaggaaaccggctgttaagaataaaagataatgaaaatctcaggaggaaaagaaatgaaagtaggtattatcggtgccggtactatgggacagggtattgcaaaggcatttgcccaggttgacggatatgaagtagcgctctgcgatatcaagcaggagtgggctgacggcggaaaagcaaagatcgccaaaggctatgctaaattagttgaaaaaggaaaattaacacaggaagcagtagatgctatccttgcaaagatcactcccggtctgaaggaagacctctgtaaagactgtgatctgatcgttgaagcagcatttgagaacatggaagtaaagaagacaacctttgcagagcttgacaagatcgctaagcctgagtgtgtattcgcttccaacacatccagcctttccatcacagagatcggaaacggactgaaccgtcctatgatcggtatgcacttctttaaccctgctgaccgtatgaagttagttgaggttattgccggtgtaaatactcctgcagagacagttgataccatcaagaagatttctgaagagatcggtaagacccctgtacaggttaacgaggcagctggtttcgtagtaaaccgtatccttgttcccatgatcaacgaagcagccttcatcaagatggaaggtgtttcagatgtagccggtatcgatgcggctatgaagcttggtgcaaaccatcctatgggaccccttgagcttggtgatttcattggtcttgatatctgccttgctatcatggatgttctttacaatgaaacaggtgacagcaaatatcgtgcatgtcctcttctccgtaagatggttcgtggcggtaatcttggtgttaagagcggcaagggcttctatatttacaatgcagacagaacaaagacccctgttgatgcacagtaattttaattgaggattccctcaataacatatatttaatggaggatataaaaatcatggattttacgttaagcaaacaacatgaaatggcgagaactcttttcaaagagtttgcagaaaaagaagttaagcctttggctcaggaagtagatgagacagaagtgttccccagaggaacagttgagaagatggctaaggctggcttccttggaattccggttccgaaggaatacggcggacagggatgcgatcctttaacctacgctatgtgcgttgaggagctgtccaaggtttgtggtactacaggcgttatcgtttctgcacacacctctctttgctgtgatcctatccagacctatggtacagaagagcagaagcagaaatatctggttccccttgcaaagggtgagaagcttggtgctttcggtctgacagagcccggagctggtactgatgcacagggtcagcagacaaaggctgttcttgatggtgacgagtgggttctgaacggatccaagatcttcattaccaatggtaaggaagctgatgtttatgtaattttcgctgtaacaagcgttgtaaccgatgctaagggcagaagcaagaagatgatctctgctttcatcgtagaaaaaggaactcctggatttaccttcggtaccaaggaaaataagatgggtatccgtggttcatccacatacgaactgatcttcacagactgccgtatccccaaggaaaacctgcttggtcaggaaggcaagggctttggtatcgctatgcatactctggatggcggacgtatcggtatcgctgcacaggctcttggtcttgcagagggcgctcttgacagaaccatcgcttatgtaaaggaaagaaagcagttcggcagagcaatcggtgctttccagaatacacagttccagttagctgatatggctaccaaggttcaggctgcacagtacatggtatacagagcagctatggctaaggctacccagaagagctacacagtagaagcagctatggctaagctgtatgctgcagaggttgctatggaagtaacaaccaaggctgttcagctccatggtggatatggttatatcagagagtacgacgttgagcgtatgatgagagatgccaagatcacagagatctatgaaggtacatctgaagtacagagaatggttatttccggttccctgctgaaataagaatgaaagaataaggagagataatacaatgaaaatcgttgtttgtgttaaacaggtacctgatacaaagggcggcgttaagttcaatcccgatggtacacttgacagaggtgcgatgcttactatcatgaatcctgacgataaggcaggtctggaagcagcacttagattaaaagaccagtatggcgcagaagtaactgttctgacaatgggtcttcccaaggcagaagaagttcttcgtgaggcaattgcaatgggcgctgacaagggtatccttgtaacagaccgtgttcttggtggtgctgatacctgggctacctcccagacactggcaggcgcactgcgtaaccttgagtatgacctgatcatcacaggccgtcaggctatcgatggtgataccgcacaggttggacctcagatttccgagcatcttggaattccggtaatctcctatgcacagaagatcgaagtagaaggcgacagcgtgatcgttgagcgtcagttcgatgacagatatcacgtattaaaggcaaaaatgccctgcttaattacagcacttgctgaattaaacgagccccgttatatgactcccggcggaatctttgatgcttacaaggctgacatcaccgtatggggaagagcagatctgaaggatgtagatgattccaatttaggtctgaagggttcacctacccagatcgctaaggcttccgataaggtaagaaagggagcaggcgagaaggttaaccttgatgcagcagcttcagttgattatattattgacaagttaaaagttaagcacgtgatctaattaaggatgataatggaggttccaaaatgaatattcaagaatataagggagtttttgtctttgcacagcaggtagacaatgaactcagcggaattgctttagaattagttggtaagggaaaagatcttgccaaggatttaggcacagaagtaacagcagttttagttggcagcggaatcaagggtcttgctgacgagcttgctgagtatggtgctgataaggtcatcgttgtagatgatcctgaattaaaagagtacagaacagagccttatgcacatgcactggcatctgtgatcaatgaattcaagcctgaaattttcctggtaggtgctactgcaatcggccgtgaccttggacccagagtttctgcaagaatccatacaggtctgacagcagactgtacacagcttgatatcggagatttcccgatcaacccgatccccggcaaggagcagcttcacaaccagctgttaatgacacgtcctgcattcggtggtaacacaatcgctacgatcgcatgcccgaacttccgtcctcagatggcaacagttcgtcctggtgttatgcagaaggctgagagagttcccggagcaaaggctgaggtgatcgaattcaatcccggattcacacctgacaacaagtatgttgagatcttaaagatcgttaagtccgtatctgacgtagctgatatcatggatgccaaaatccttgtatctggtggacgtggtgttggaagcgcagagaacttcaagcttcttgatgatcttgcagaggtacttggcggtactgtaagctgctcccgtgcagttgtagatgcaggctggaagccgaaggatcttcaggttggacagactggtaagaccgttcgtcctaacgtatacttcgcaatcggtatttccggagcaatccagcatgtagctggtatggaagagtctgatatcatcatcgctatcaacaaggatgagtcagctcctatcttcgatgtagctgattacggtatcgtaggagatctgaacaagatcgttcccgccctgacagagaagctgaaagcagagcttgctaacaaataagaatatctgaaacagagataaagaatgccctggtgccatgcaccggggtattctggtataaagtgtattttatatttacagaaatattgtttcagacaaaagagataaaaaagcatgaataaatttgaagaaaaaattgatattacctattctatggggatcataagagagctgtcaggaattgttgataatgaactgacagggaaccgctcatcggcgtcggatgcggagcacagggcagcagattttcttgccttggaaatgaaaaagatcggacttcagaatgtaacaaaggatgaatgtccggttgacagatggcagtatgaaaaaggtaccctgtcctttcaggatcctgaagggcatatgtgtaccgtaccccttggaggctatgcaacggaggctgatttttcacaggaaacgctgcagcttatatatgcgggaaagggaaccgaaaaagactatgaagggctggaggtttcgggcagggcagtcctgatagatattgatcagatgaatgaatggtggatcaattttccggcctatgaggcagctatccatggtgcagcggctgtgatctgctgtaatacaggaggctttggacagactggtgatgaaacgcttgtttcagaggatatctgcggtccctgcaaactgccggtattttccatagggaaaaaggcagcagggctgctgaaaggactgcaggaaaagtctaaagagggaatcagtgtctgtattgatgcaaagagcgtagtcgagcgtgataagatcagctacaatctgtggggcgaaattccaggagaatccgatgaggcgatcatagtcattaaccattatgatgcgtattacagaaccgtttttgatgatgtacagggagtcggatgggccatgggggtagcaagggcactgatagattccggatataagccgtaccggacaatccgttttgtgatgcatgcatctgaagaatggggacttattgacaataaatatgactgggcgatcggtgcatttaaacagatccacagaatacggcctgagtggaagaagaaaggctttgctgttgtgaatatggacgggggctatgtctgcaccggggaaacgaaattcaatatttcatgctgtaaggagttatatggctttgtacaggaaagcatcctaccctatacggagcatgcgaaatatacattcgaggcagatacggcgttaaccactctgacggaggatttcagctatgagcttgcagggattcccagctttgctgccggaacctatgatggctgtctggctgaccggactgtactgcattcctcctggtctggatttcagaccggctttgatgaggagctgttccgtatcattcattccatgtttctgaagctgatcctggagcttgaccggctcgcagtgagacctgttgattttaccatgcggataaaagaaatcgctgatactatgccggagggatatgcagaagggcaggaagagttcctgaagctgtccgctctggcaggggatatccacaccagcatagaagatatcaatgacaggctgcggtcagtccggcagacagaggcattaaaagaggcagccaaagacaccaatcttgccctgcatgaaatttttaaatatcttatgcagaattatgtgaaatttgactggaatgaccggatgctggtaccccatcagagatatgtggataatattaagctgctggacagggcagacagggagcttacagaaggaaacagggctggagtgatatcggcattggaggctgtggattacaattattatgcatcatatttcagcagggaaacctgcagatactttgtcttgcaggtaacagagaataccgcagatacatggggaaagggcatggtggaaaacggaaaccaggatctttatgatacgctgcggcttctggaagcagagggcggcatgatggatacgggtgtgatcaggaaaaatatttctgatgcgcggaaaatgcagacgtcttatctggagacagctcttgagaagggacgcgaacagctgccggagctttccgggctcatgaagcaggccagaatatgcctgtcagagctaggaaagcttgccgccacgtgaatgaaagatagaaaataatgagagcaatattatttatagtattcctttcgttgggaaaacatattttatgtgagtgtatctgtcagactcttaagtatcagggtcggcttattgagaagtttttcaattgccagagcagctgcaccaattaatgcaggatcctgatgaaaggatgttaatctgatctgaagtttttcaaaggctatggacagagtatgctcttttattaccttagatattatatttagtagaggttctccaatgcatgataattcatctccaataattatcatatctggattgtaagtattaactaaggatgagaggccaaagcctagaaaccaagctatttcttcaaatgatgtaacggctaaagaatcacccttcaatatagcattttttatatcgctgagagaacagtcaggggaaagaattgtgggctgtccagacgctataccaatcttaattttattttgtaatgcaagtaccgaacaatagttttcaaggcagccgcgattgccacattgacactttggaccagcataattgatgctgatatgcccaatttctccggccatgccatgagaaccatgaataatattgccgtttatggcgatacctgcaccaattccctgccctgcagcaacatatatattaacgcctgtttgcattctatatttaccaaaccaccattctgctaaagcacctgcattggcatcgtgttcgatgtaaattggtatggaaattttatgagaaaagtgctttcttatattaatattattccatccagaagtaccgctgagcattacaatatgttcttcattcttatcaataaatagtggacctggaacagaaatgccaattgcaagtattttatcgtctgattcatcaatcaaatttctgatatggtctgttataatgtttaatgtatattctgcactttgatccatattaatgtttgaagtaatactcttctcttcatctccaccaatattgaacttgctgattgtaaaggagtgtctggttaaacggagagcaaggattttgaatgcattatagcggagctgaattccaatagaacgccgacctttttttccttcaatacttcctacttcctcaacaagaccgcaggaaattaactcatttattatattggttatagtagattgttttaatcctgattcttttgctaattcagatctgtaacataatcctcgtttttgaagtagtttaattaccatgcttaaatttgtttcatgtacttcttcaagatttctgatagacaattgatatcccat

SEQ ID NO: 13 - DNA, 5544 bp, unidentified
  source 1..5544: mol_type = unassigned DNA
atgaacaagaaagtaaccgaaccttatttggtagacgcactcagctttacagaagcagaagcacgcatcatcgaggaaatgactccgttcatctcaggagagtttaccgtatcagacatcaaacgggcaaattatagtgaattgttcccttgtgaagaagacgcggccgaccgttggtttaaatgcaaattggtcttcatcacattggatgagaaaagcggtgcagagaagaaaacatctacccaagtactggtacaggccgctgacttacgcgatgctgtgaagaagttggatgaaggtatgaaaggcacaatggccgattatcagattgcatccgtagcggaaactgccattatggatgtatatccgtacagtgcagaaccgaatgacaaacctgaagtatagaaaagggagaagcaaataatagaaattgaaaattctattgtgtatacattattatattatatacgatgagtattgcagaaaacattaaaaaagtgctgaacgagttgcctcaaggagtgcaactggtagctgtttccaagtttcatcccaacgaagcgatagaagaagcttacagcgcaggacaacgtgtgttcggagaaagcaaagtacaggagatgactgccaaatacgaaagcttgccgaaagacatcgaatggcatttcatcggacatctgcaaactaacaaaatcaaatatatcataccctatgtagcactgattcatggcgtagattcctataaattactcaccgaaatcaataaacaggcagccaaggcagagcgtaccgtaaactgcctgctacaactgcacatcgcacaggaagagacgaaattcggtttcagcttcgacgaatgtcgggaaatgcttgctgccaatgagtggaaacagcttaagaacatccggatatgcggcttgatgggcatggcaacaaacacagataataccgaacaaatcaaagccgagttttgttcattaagtagcttctttcaagaagtaaaagccacatggttcgctgatgcggaatggttccgggagttgtctatgggaatgtcacacgattatcacgaagcaatcgccgcgggcagtactttagtacgtgtaggaagtaaaatatttggagaaagaatatattaataactaataactattatcatggcaacattagaaactacttttgcagggttgaaacttagaaatccgattattatcagcagttccggacttactgacagtgcagccaagaatcagaagctttatgaagccggtgcaggcgctatcgtactcaagtctctttttgaggaacaaatcatgatggaagccgactggctgggagatcctaatatgtacccggaaggaagcgattatctggtgggatatatacgcgagcacaaattaggtgaatatttgaatttaatcaaagagagcaagaaagtttgtgacattcctatcattgccagtatcaactgctatcaggatgctgattggattgaatttgccaaaaagatagaagaagccggcgcagacgctttggaggtcaatatccttgctttgcaaaccgatgtacaatacacatacggtgctttcgagcaacgccacatcgacattctgagccacatcaaaaaaacagtaaacatccctgttatcatgaaattgggagacaaccttaccaatccgatagctcttatcgaccagctttatgccaacggggtagcggcagtggtaatgttcaaccgtttctaccaaccggacattgatattgagaaaatggcccaaagcgccggaaacgtattcagtacagatgcagacttgtccaagtctttacgctggataggcattgcctccgcagcagtcaacaagctggactatgcagcatcgggcggcatacatgctcccgaaggagtagtgaaagctatcctggcaggtgcttcggcagtagaactatgcagcgcactctatctgaattcctatgctgtcattagtgaatacacccgcttcctgaacacatggatggaccgcaaaggaatggaaaatatcaatcagttcaaaggcatgctgaatgtcagcgacctgaatggtgtaaatacatttgaacgtacacaattcctgaaatacttttcatcacacaaataaaaaggagttgataccataaaaaaacggatgatgcatcttcaatgaacgcatcatccgttttttaattcataacctcgttaattcaaatccttttttatcttcatttcttcttatccaacacttcaaaacaagaattcttgctgacaaattcgggaacgatatccttcatggcagctacgattttcatctgatcataagtatagctgacatcaatcaacttctggatacgctcattcacttcatcatagtcgtactcgcgcacagtagcaatcataattttttcatgataagtgggcttagtaagttctttgacattcagcaactcctcgtacaacttctcaccatgacgcaaacccgtaaattctatcttgacatccgtacgcccggaaaggctgatcattcgcttggccaagtccacaatacgcaccggcttacccatatcgaaaatatagatctctcccccatttcccatgcttccggcttcaagtaccaaacgacaggcttcggggatagtcataaaatagcgtataatttcaggatgcgtcacagtcacagggcctccacgctgtatctgatcgcgaaaacgaggaatcaccgaaccattcgaacccagcacattaccaaaacgcgtagtgatgaactgagtgacatgtccgccctctgccagcaatttctttgccagtgactgcacatatatctcacaaatacgcttggagcatcccatcacattagtaggattcacagccttatccgtagaaatcatcacaaacttctccgcaccatacttcacagccaagtcggcaaccgttctcgtaccgtaaacatttacctgaatagactcggacacattgtcctccatcatcggcacatgcttgtaggctgccgcatggaaaatgtactgaggcttgtaacgtctgaagatttcctccatacgcgtcacattggaaatatcggcaatgatagtctcggcatcaatatccctccaacggtcttgcaactccagacggatatcatgcaaaggagtttcagcctggtccacaagaatcagtttataaggattgaaagaagccacctgacgcataatctcactaccgatagacccggcagcacctgtaatcatcactcgcttgccttccaaatgagaagcaactttgtgaatatcaatttcgataggattacgttgcagcaaatcctctatttgaatttctttcagctgggtacgatccagaaattgattgttccactcgctcaatggaggagccgtcatcagctttatgttatgtgccaacaggcggtctgccatatcagaatgtttgagcgcttccatttttgcaggagaaatgataatggtatgcacatcccggtcatccagattctcaatcaacgtgtcatcattagggaaaaccttaacccccatcatcaccttgttgatcagttccggttcatcggctatgaaaccgcgcaggcggtaatgattacgaagactgacgcgcaatgcctttgcaatatttactccggcctctttggctccataaataaacacattggcactgcgagaaccatcaaaattcaacgcttcgaagaagatcttcacaacaatgcgggaacatgccatcatggcaaaactgatgatataggacatgaacagcaccgttatgggagccacatttatgtttgtaaagcttttcaccactatactcgctatcagcagcaatgcatacgacacagtcagtgccacgaagatgcgcatgatatctacaaacgatgaaaagcgaaggacattagagtatgtacggaatgccctgaaaaatatcaggtttacggctactgtacatacaatcgttacgtctatggacgacgactccgaaaaaagactccgaaaatcatatcgcagtgcataagccagcaaactggatacaacaataataaggacatctatcaatagaacagtccatatcggtaatacctttgctgaaaggtaccgatgaaaaaagtttcgcttcatcacgtttgacagtttttgttttaggcaccgcaaagatacactattttttatcaaagcgaagaagaatttgataaaatattacatcaggttacttgctaactcactcaactggctacgctcccctttcaccaaattgacatgagcaaacaaattctgatccctcatgcgatctatcatgtagacaagcccgttggactggctatccagataaggttggtcaatttgctgaatatcacccgtaaacaccatcttggttccctctccggcacgcgttataatggttttgatttcgtgaggagtaaggttttgcgcctcgtcaatgatacaataagtctcgctcaggctacgtccgcgaataaatgccaaagcctcaataacaagctggtcacttttctgcatatcttccagacgtttcacctcgctcgaattggaagcgaactgatgcttgattacgttcaaattatcaaacaaaggttgcatgtaaggagccaccttttcattggcatcacccggcagaaaaccgagatccttattggacaatgcaacgataggacgtgccaacaaaatttgtttataatccgtcagtttgcctaaggctgcagccaatgccaacagggtcttacccgtccccgccttgccggtaagagctaccaacttgatattcggatcattcagcacttcaaaagcaaaactctgttcggcattgcgcggttcaataccataattcttcgtcttgtttacgcgacaaatggaatgggtaaaaggattgtaacgggcaagtacgctgctacggtcgctcttcaatacaaaacattcattaggatgaataatatctttaaaatcgaactcgctaatatccaatccttctttagaggaatagatacgatcgatcaaagtggggtcgacaccttcgaacacctcgttcgatttttcaaatatatctacatttattaccttatcattgatataatcctcacacagcaacccgatagaacgtgctttcatgcgaagattgacgtctttggtgacaagaatggacttcattttcggtttcttctccgtcagccagtcaacgacggacagtatctgatgatcgggaatccgttccgggaaagagttgtgcacacgcgatgaatctatcgaaccggcaaccacaaacaaacgtcctaaaccttcacccaacggagcacctttagtaaagaggttgtcgtcggtgatcatgtcaagttcccgaacaaactcacgagcattgaaatttatctgttcgtttcctttcttgaatttatcaagttcctcaagtactacaatgggaagataaatgtcattctcttgaaagttcttcaaacaattatagtcgtgaaggataacattggtatcaatcacaaaattttttttagctcccat

SEQ ID NO: 14 - DNA, 13527 bp, unidentified
  source 1..13527: mol_type = unassigned DNA
ctattgatggatgtaatccagaatctgctctgcatgaatcttggtcttgatctctttaggagtgaagattttctcgatgacgccttcttcgttgacgagataggtggtgcggaggatgccgatggtctttctgccacaggttaccttctcgccccagcagccgagttcctgcagtaaggtggtttcggtatctgcgataagagggaactgcaaacccttggtttcggcaaacttcttctgcagagcctgcttgtccttgctcacgccgataatctcgtaaccggctgctgccagctcctccttatgtgcttgcagggagcaggcttcggcagtgcatccgctggtgttagccttcggataactgtagagcactatcttgcgaccacggtagtcgcttgcctttatctcacgtccgtcctggtcaatgccaagaatctctggtattttatctcctatattcataattctatatttattaattatatgtcttgttatgatgcaaagataataaaaataatgcgaaccgatgtgattcttatgatttttaacacaaataatcgttgtttatctttctacctggaagtttaaacgaatctttcttttggataaaaaaaagaaaaatatagggatgatatttggtaatatgctgatatttacttacttttgtgtgatgaacgttcatggtatgaaacagggagcgtgatactaaacaggtaaaaaaggaagaaaatgaagaagatatttttgtttatattattctgtctttccgtatgcagcatgtcggcttacgactttctgcgagctgtgaaagatgagattccgggaggttacaacttctgggtttatacgccagtagattatttttattcgcaagagcagacaccggtcatcatctttctgcatggagccagtctttgtggaagaaatctgaataaggtgagaagatacggaccgcttgatgccatcgtcaaggggcgcgatatcgatgcgctgaccatcgttccgcagaatccgggaggagcttggaatccgaagaaaatcatggatatgctagactgggtgaagaagaattacccatgcgattctaatagggtttatgtcttgggcatgagtttgggcggttatggcaccatggatgtctgtgctacttatcccgataggatagctgccggcatggcgctgtgtggcggctgttcgtataaggatgtgagtggattgggcgatttgcctttctggattatccatggcacagcagatagggcagtaccggtcaagcaatcgaaggtggtggtagataaacttgtgaaggatggcaaggatacccgattgatatacgactggtggaagggtgccaatcacggtacccctgctcgcgtgttttatttgaagaaaacctatcagtggctcttctcgcacagtctattaaataaagatagacccgtgaaccgcaacatcagtattacgatgagtgatctgggcagagcatatggtgatgtaaaccgaaatgcccctcagcctgaactcatcgatggtccgagtgtgatcaagcaagagggaaatgaatattaaggaatcttttataataagatgttctgccatgatgtctttttatttgattaaatccctttatgcgaatgatttttatgccttgcaaagatactgttttttctaaaattagggacttagaatgggttaaatcttctaaaattaggggctaagaataggttagcctgacttaaacaagatatttttcaggtctttttctatgttatctggcgtttttttattaattttgcaatcgaaatcataaaaacaaactataatgaatacaaaaactattttaatggctatgacttgcctttgtgcattcaacagccttcagggaaatgctcaggtagcaggagggaatactttggttgctactgccattgagcagcgaagagtcactcttcgtgacagtatcttgaaccatatttctggtgcaaagattgcagcgaaatcattacagattaagaactttggagccaagaacgatggtaagaccgattgtcgcgcagcttttgccaaggccatcaagaaggcttcggcgatgaagggtgccaagattgtggtgcctgcgggtacctattatattaagggacctatcgtactggcaagcaatatctgtctggaactgcagaagggagctaccctgaagtttgcgccagaagagaagtactatcctatcgttaataccagttgggagggaactttcctctacaactattctcctctcatctatgcctatggctgtaagaatgtttctatcattggcgagggaaccatcgacggcaacgccatgactacctttgccaagtggaagcctaatcagaagaaagcgcagcagttgagccgcaagatgaatcacgaggaagtgcctgtaagtgagcgcaagtttggagatggctactggcttcgtcctcagctcgttcagctctacaactgccagggaataaccctggaaggcgtgaagatcaccaattctccattctggtgcatccatctcttgaagagtgagaatatcatctgtcgtaatttgcgatatgatgccaagcttatcaataacgacggtcttgatccagagtgttcccgaaacatcctgatagagggcattgcttttaataatggtgacgacaacgtggcaattaagagtggacgtgacaatgatggctggaatgccaagatgccatcagagaacatcatcatccgcaactgtcatttcaagggcttgcatgcggtggttatcggtagcgaaatgtcttcgggagtaagaaacgtcatcgtagagaactgcgattatgctggttattgcaagcgtggcatctttatcaagaccaatcctgatcgtggcggttttgtggagaatgtatttgtaaaaaactgtacgtttggtgatgtggaggatctcttctacgtaaccagccgttatgcaggtgagggacagacaaaccatcatttctctaccgtgaagaatatcttcgtggatggtttgaagtgtaacaacgtgagtgctgcagccttggttttgcagggtacagaggctaagcctgttactaatgtttcattcgacaagattgaagtaaaaaatgctaagacaggcatcagcttcgagaatgtgctgggtgtgaacatgggtgaatgcagcataggcggcaaggtgggaactcctacccaggatactccaaaggataaagttttcgaaagaaataacaagtaagttatttgtttttcaatctttttttgtacttttgcatcatcaatttaaatgaagaaaatccagttttttaaaggaagtaagaaaatggctgataaagatatgaaatggaagacgctctcgcagaagtatctgatagagaagccttggctcacggcacgagtggataaggtggaattgcctacgggagccattatcgatgaatattacgtgctggaatatcctgattgggtgaacaccatcgccattacgaaggacggaatgttcgtatttgtgcgccagtatcgctatgcgataggtaagacggtgaatgaactctgcgcaggagtgatagagaagggcgaggacccgatggttgctgccaagcgagagctgatggaagaaactgggttcggtggcggaaactggcagaagtggatgacgatttcggctaatccgagcactcataccaatcttacccattgctatctggctacggatgtggagcgcatggatgttcagcatcttgaccaggctgaggatatcgagattcgcctcctctccagggatgaagtgatggatatgctggagaagggagaaatctggcaaagcctgatggcggctccgctctggaagtattttgcgaaagcaaagtaagctgcagggcttcatttataaaagccaagtaaatattagacattaaacaataaacattataaagatggtaatagatttcgaaaagattgctgaggctcacttggagggcttcaagggtggacagggtaaactcgatactcgtaactatgtggatgacaaggtgaagattatgtattctaccttgcgtccgggtgcatcaactggtcttcatactcacgagggcaactgcgagattatctatgtggtaagcggcactgctactttccattatgatgatgccgtagaagaggttcgacagggacaggtgcattattgtcctatgaaccatgctcattatatggagaatctcaccgaccatgatctggtgtatctcgccattgtgcctgagcatcattaatatcccttattagggaaaatcacatcatatttctcctgaggaaaatgaaaaaagaaagtccaactcggatgcctctcttataaaaaggctccaagctggactttcgtcattcttatctctctcttttatgttgctatgctaatctttgtttatctaaaagccaactggcgggttagagtttttcacagaactcgattttctccttgtttggcccctcgatggtgaagaactttacgccgttttcccagaaaggaagaccatttacctgctgatccagcaacttgaaggttcctgcttccttcactaccaggaagagatcctctatgttctttacatcgatggcgatgtggtcgatggctccatattccatctttgcctgatggttctgataggtctcgatgatgagattgtggagctggaggaaggctacttcctcggtgccgtttactgtgcggagggctgtctcaaagcccagggcatgataaaactcaatggtcttgttgatgtcgttggtaggaatgccaatgtgctgcacgcctgttgtaaaatctttgatcttcataatgaatctgtgtttagatgattgttatgataaaacttttttgtgtattgaagatttagaagcggatgatttctgctccaatctggaaatagctctcgttgctctgaggattccacatgcccttggcataaaccggaacggtgtagttgccgagcttgaggtcgtgggaggcttgcagcgatacgtgtacgatgcctgccgtggttccaaagaagtgggcatcctcgccagctctgttcagggcgaaggctccaccaactcctgcatctaccttccagccatccttctggtagatagggtattccgcataggcgaaggtggaatatttctgcttcgtattgtcgctgttgcggtcgcgtccgaagactaccgttgaccagctcaagagcagtggaaacttctcgtcctgaaaccggtagcttaatgtagcatcgaggaatcggccggtggtatgagcagagtagttccagtattccttattattataggtggcgccaggggagaagttgtaggtgtcccacagggcgaatccccatccgccagccttcagattcagataatgattaaactccttgtaggagccttccgagttgcagccaccccaaagtcccacggtaacgtggtcattggccatcgtatagctcaggtcggtgaggaggacgatgccgtcggaaacttccatgccacgccacagatgattgttctgcacgttggctttcagatggagctgtgcctgggcatttcccaggcaagcagccatcatcaaaacaataactacaattcttttcatggttttactacaaaataaactttttgaacctaactaactatgaaccttatatacgttaactaattacttaaaccatatattaaagataaatataatttgcatataatttgggcaaataagggcttatcttgtaaattccttaggcaagaccggcatggctccgttctgggtacagacgaatgccgaaacctttactgccaattcatgagcttcctttacgctcttacccttcaggatgcttgccacgaatgcgcctgtgaatgaatcaccggcacccactgtgtctgccacttccactttcggtgtctcgataaaagaaacctcgccaggggtgaatacatagctgccgtttacgccgcaggtaagaatgagcatcttcagattgtacttgcccaagaggagccagcatttattctccaagtcgatgcccggatagccgaagatgcggcttacggtgatcaattcctcgtcgttgattttgaggatgttacatcgcttgatgctctcggtgataatctccttggtatagaagccttgacggagattgatatcgaagattttgaggattccttctccctcaggcatgtggtcgaggaagcggtagatagtgttacgggaaacctcgttgcgctgagccagtgaaccgaagcaggctgcggtgcagttctttgccaacttctccagggttggcgtgtaggggatgttgtcccaggctgctccctccttgatgtcgtagcaaggaatgccgttggcatcgagtgaaacctggacggtgcctgtagggtaggctaccttgtctatctgatagttgagatggtgatcgttgagttccttctccagttccttgcccaactcatcaccgcccattgcgctgaccgcacagctattgagtccgaactgcgaaacgtggtaagcaaagttggctggtgcgccacctagcttctttccttctggaagcacatcgaagagtgcctcaccgatacctatcactgattgtttcttttccattgtcatttttactttaagaatgttagagatgttatttgatttctgttgcaaaggtagcatttttcagctaccttcacaaagaaaaatcatctaaactttctgcaaacgttcccgcaatcgtttccaatttctgcaatcgtttgcagtatgtttcttctcttctatctttttacttcttctctccaggtttctgttcgaaatcgatgagaaccttcatgctggtttcgcgatgagtgtcgataaacttgtaggcatcatcgtattcttcgaaggcaaaacggttgcttacgagtggcttgaggttgacgatgcccttgcttacgtaatctatggctgtgagataatcttcgtggcgatacatcattgaaccgatgagtctcaactcatgctcgcccagatagaacatgctgagggctgggtccttggcaaagactgccacaaccacgatgtcgctacctttctcgatggtctccatcagcgaacggatggaaacttctacacctgctacctcgaaacctacctgatagccttcctcaccgaaaagttcctgggctgcctccttcaaggtcttcttggtgatgttgagggtgtgcttgatgccgcattcgcgagccttagccaggcggaggtcgcttacatcggtaatgagtacattcttggcgccacgagcaatgcagaactgggctatgaggttgccgatggttcctgcaccgctcacaactacattcttacccttcacatcggtgcggttgctggcatgggcaccaacggctgaaggctcaatcatggcaccgtagtcaaggctcatgccttccggcaacttagccacgcggtcgtcatctactacaaagaaatcctgtgctgcaccatctgcctggaaagcctgaacacgcaggtgctcacaaacattatactgtccgcgcttgcaagggttgcacttgccgcaaaccaactgtgggcgagcggtgatgtggtcgccaggcttgcagacggtaacttcgctgcctacagccataaccactcctgagtactcatgtccctgaaccactgggtagaaggtggctgggtgaagaccgtggtaagagtgaatctcgctaccgcagatgccgatgcgcttgatgttgacgagaacctgatgagcagttaagtctgctgcctttggttctgctacttccttgaattcgatatgctttggttctaccaatattgcctgtctcataattataatgttttgaaattgttattgttatgttggtgggatgaaagatcccgttttatctttgtattcttttctgaacccactttttaagtgggctcttttttatttcttcttattctccagatcggtcatgatctgcttgtattgcttcttgttgagcttgtagaagcagaggcatcctgcggtgacgatccacaagactcccggaatggtgctgaaggcgtggtgcatgatgttcaatacttctggattctgcacagcgttgcttacatatcctgcactgcccagggcaatggcgagaagcgatgtgccgagtgccattcctatcttgttgcccagcgagatgaaggcgtattggaatccgtcgtttctgatgcccgtcttccactcgccatactccacacagtcggggatgatggcatagatggctgtattgaagcctgagaagaagaaccacgacaaagctgagaacagatagaacatgatggcgctgccgttagggctgaagaagtacagacctatcatcgtaataccggtgaggaaagcgaagatggctgccgtgaaacccttgttgcccgtttttctgaataccaaagggaagcaggcggcacctatgatacttggcacgatgatggccatggaatagtaggagaagagtgttgctgaatcttccacataagtgaaatagtagagcatgtcggcgttgcgtccgtagtggatgaaaccgaagagcaactgtcctaagagggcgagcagatagggcttgttcttcatcacggaacgaagctgcacctttaatgggagcttctgtcccacaggaacttctaccacttccttggtcttatggaagcagaacagatggcaggcggcgaagatgatgccgtagagtactgccactgccagataaccatatttggtgtcgcctgcgccaaaccaactgatgagcggaacggttacgatgttgattactccgatggccatcatggcgctcaccgaacggctggtgttgagcttggctctctcatcgatgtcttgtgtcatggctccgcagagtgtgccgtaaggcaggttcacgcaggtatatcccagcaccaggatgcagtaggttactgccatatagataatcttggcggtctggctccattccggatgtgcccagaaggtgagtatcagtaccagtgccgtgataggagctccgaagagcagccatgggcggaatcgtccccatcgggtgtgggtcttatcggtaagtgtgccgatgatggggtcgttgatggcgtcccagaatcgggaaacaagcatcagggttgctacggcactcatgctgattccgaacacatcggtgtagaaaatcatgaggaagttgcccacgaacatccaactgaagttgcagcccacatcgcccattccataggcgagcttactgatgaagggaacctttccctgtgaattgttctctagcgaagtgttcgcttgaaatttagaatcttgttccatatttcttttttaggtttgattgtgatacttaatgttgtttattctttgtcttgtgaagaaatagagcgatttgagaaatcgtttttccttttcacgctgcaaagatagaatgtttttgctggtaaaacaagaaaaaaaacgattcttttttcgcaaccgttcccgcaaccgttcccattttccgcaaccgttcccaaaaagatttctcagttttttgttgttgctttcatagaaaataagtatctttgcagtcacatttaacaagaaagaaaaagtgatatggcaaaatatgtaaccatcatggatattgcaagggagttgggaatttccaagtccaccgtttcgcgtgctctttcgggagatacgggtaatgtgaagacggataccttgcagaagatattggcaactgccgagcggatgggctatcatcgcaacgaactggctgtgaactttcgccagcagagtactcataacatcggcatcatcatccccgaaatcgtaacaacgttctatatgacctttatcaatgatgctcaagccatcttgcgcaagcaggggtataaggtaatgattgccatctctaacgagaatcctgagcaggagagagagagcattctgatgatggagcagctgcgtgtggatggcatcctgatgagtgcatgcgataaggagcataatgtggacctatataataaggtgatagaaaggggcattcccattgtgtttttcgatagaacggtggagaaggtaaaggcttcacaggtgcacatggacgattacatcatgtcgtttttcatggtggagactttgttgcgcaaggggtataagcatattattcatatcccgggacctgcttatatccgaaacagctatgaacgattgaggggttatcgggatgcgctggaaaagtttcatatagagtatcaggcgcaagatgtcttgtcgccagcattgtcggctgaagagggtagttgggtgatggagcgtttcctggagaagaatgtgccctttgatgcggtatttggctttacggagactgctgtgttgggagctaagagtgctatccagaagcgtggcttgcgcattccggaggatgtggcgctttgctgcatgtctggcacagctctggctactttggttcatcctcagttgacggtagtggagcagcctattgagaaaatggcgcaggaaagttgccgactgctgctggagcatattgccgatggttatagaaggatagaggaaattgcattgagaggtgaaacagtgataagggaatctacttaataaaggtatcggcttcaggaatctgcataaaagaagctgtttcagaaaacagtgtaaaaggaagctgtttttgaaaacagtgtaaaagaaacgggtgtatcatctatattattgaatgatacacccgttttctatttctttatcttaagcttttaaacttaatctatttccttatcttaatcttcctcttcttcttcattctccagcaagtcggtgccgaggtgagtggtctgttcacgcttcaaacgatcgcgcacttccttaggcttggtggcgtaggtaatcattcggatagaatcgttatagcttacgtacttccagagccagttgagcattaccattactttgttctttacgccaaggatagagcggaggtgaactaccagccacaatacccaggcaaagaagccctggctgtggaacttgcctagttctactacagccttgtgtcttccgatggtagccatagaacccaggttcttgtagcggaaaggcttgagttgggaatcagtggctccctcggcaatcttctggatattcttagccaggagtgctgcctgctgaatggctacctgtgccaactgtggatgaccgccaggataagctgggtctgtggtctggatacactggtcgccgatggcgaagagaccgtccatgccagggatgcggttgaattcatctactacgattcggaaaccacggcccagatggtcaccatcaatacccgtgataggctgtgcctttacacctgatacccagaggaaggtgcgggtaggaatctcctgaccatccttcatcagtaccttgtggtccttgtagtcggttaccatcttgccaaactgcacatccacacccatgcttgtgaggaaatcgtatgctttcttagaagagtcctgtgacattccggcgagcagtctgtcgcccgcttccagaagatagatgtgcatcagagatgagtccatatccggataatcataaggaatcacgtagcgcttcatttcagaaagggctccggcaatctctacacctgtggcaccaccgcctacaatgaccacgttcaggagttcctgtcgctcctcttctgtggcacaggtcaatgcacgctccaggttactcagcacggcgttgcgcaatcccattgcctctgaaacggtcttcatcggaatagcccacttctcgatgttggcattgccatagaaattggtagtggttcctgctgcgaacaccaggtaatcgtactcaatcttaccgatggaagtctgcagaatcttcttgtctgggaatacggctctcgcctctgccatgcggaagtagaagttcttgcgcttgcggaaaatctggcggaaagggaaggagatggagcttgggtcgatacctgctgaggctatctgatagataagtggagggaactgatggaagttattcttatcgatcaacaccacctgcaggtttgaattgcagaggtcttctgccaaacgaagaccaccgagtccgccacctacgataactactctcttcaactgatttctcttgatattaatgctcataactactgctgtttttacatattaattacatatatttgctgaaaattctgttctctataaggcgtaatgcctggttcttgctgaaaattcgattgcaaaggtacaacattttgatgaggtggcaaaggaagatgggtagaaatatgggattgaagattgttgcaatcgttctctttttagattcaggaaaatgaagttgtaaaatgtaatattcagatagcattttatgagcactttttttgagaaatgttgtcggtttaaaggaaaagttgtatatttgcatcgacaattttaaaagacgaacgaatttttataaaaacatcatgatgaaacatgtaacaattaaggatatagcccattcgctctgcatctcggtttctaccgtttccagggcgttgacggatgacaagaacattcgcaaggagacgcgcgagatggtgattgaggaggcaaaacgactcggctacaagcgcaatccggtggcgatgaacctgaagatggggcgtacgaacaccattggtgtcatcgtgccggagatgcacactccttatgcttcgcaggtgattaacggaatacaggaggtactttacaagaagaaccagaaggtgatgattgccgagagcgatgagaaaccggagcgggagttggagaacctgaagatgatggagcagtttatggtggatggtctgattgtgagcctctgcagctaccgcaagaatatcgaaatgtatcagcagttggcagcagatggtatggcgatagtcttctacgaccgcattccatacggattgaaaatgccgcaggtgatggtggatgataatgtagattcttatttcatggtggagcatctgattcgcctgggcaggaagcgcatcgtctatctgcagggacccgacgacatttataatgcctatcagcgaggcttgggttatcgtgaggcgatggagaaattccatcttttcgacccggagctgattgtgaagacgggaatgaccttcaagaatggagctgatgccatcgaccgtcttatatataataaggtggaatttgatgccgtcttcgcctttactgatactttggcgataggtgcgcagaatcgactccgtgccttgggtagacgggtgccggaagagattttcgtggctggtttttcgggtaccgaactatctaccatcgtatctcctcagattactactatggagcctccgttggaggagatgggcagaaaggcggcagaactggtgatggagaaaatcaataatccagagatggaagatagacaggtggtgctgaagaccacgatgaaatgtagagaatctacgggagaataa

SEQ ID NO: 15 - DNA, 9013 bp, unidentified
  source 1..9013: mol_type = unassigned DNA
ctatttccattggaaaagaacaattccaccggctgcgatcaacaatccaatcagttttctccatgaaaatggttctttttccattccgaacattccggatagtgagatcagataagcaaccgccagctgggaaacaacaatgaaaagtgctgatcttgcaggtcccagagcatccacacttttaatgacagtccatgtgatccctgctccgatcacacctcccagcaacatatagcgcggctggacttccataagtgctgcaacagagtctcttcctgttgccagccagacaaacagacacaaaaaaaatgctgaaagttgcacccacccattgcttacccagattcctgtcgtctttgtcacctgcgcgttgaacactccctgtacactcatcagcgcacctgatagcagtgcaatcaaaaaaccggccataagctcatacctccctatagaaatagtataagcaaatgccggcttttttatgtataaaatttcttatgcaagtgcacgtttcagtttttcgatcatctcatcaatatgcttttcttctacgatcagcggtggaacaaaacggatcacatttccctgagcctgaataatcagaagtccttcctcaattgtcttcttattcacttcggccaacggttttgtgatctcgattccctgcatcagaccttttccttttcttctgactacacagtccagttcatccacaagctcatccagtttttttgtcagatatggagcaacctgatttacatgtcctacaatatcttcacgttcaaaaatctcgatcactgtcttaacagctgtacatgccagtggatttcctccataagttgcgccgtgatctcccggctgaagagaatattttgccacttcttccgtcattgcaaatgcaccgaccggaattccgtttccgattgctttcgccatagtcagaatatccggttttacaccaaacccctgccatgcaaacatatttccggttcttcccattccgcactgcacttcatcacagatcatcaggattccattttcatcacagatcttacggattccttccataaattcctgtgtcgcaagattgattccgccttcgccctgcagcggttccaaaataattgcacaagtcttatcatttaccagtgctttcacactgtcaagatcattaaactctgcaaatcttacacctggaacaaccggctcaaacggttcacgataagaatcatgtcctgtcacagaaactgctccgaagcttcttccatggaaagaattctgcatcgcgataaattcatatcttcctgtcttctttgtgtaagcatatcttcttgccgctttcagagcaccttcatttgcctctccgccactgtttgtaaagaaaactctgtccattccggaaatgcggtttaattcttttgctgcctctccacagctctcatggaaataaagatttgatgtatggtataacttatcaatctgatcttttaatgcctgattcagttctttattatcatatccaagtcctgacacagcaaatcctgctgcaaagtcaagatattcttttccttctgtatcatacagatacattccttctccgtgatccagtgcaatcggaaatcgattgtatacatggatcaggttctcttctgccgcctgtattttactgttcaccatcataatacctgctttctttctgatttaaaattgctgtaccgattcctttgtttgtaaagatttcaagcaacagacaatgtgggattcttccatccagaatatgaacacgggatacaccactttcaatcgcatcaatacaattctgaagctttggaagcattccacctccaatatatccgtcagcaatcaattccttggcttctttgacctccagttcagaaatcaatgtagaaggatcttttggatctttataaacaccttcaatatctgtcaggaatgcaagcttctcaactttcattgcacgggcgattgcgcaagctgcatcatcagcattgatattataagtattgtattcctcatccataccaaccgggcaaatgatcggaaggaaatctttttccagaaggtcatacaaaatctctgcatttactttcttgacatcacctacgaatccgatatcctgtccgtctgaaaacttcttctcaacctggagaagatttccatcctttccactgattccgatcgcacgcacgccaagactctctacaagctgtacaagactcttattcacgcgtcccagaaccatctcagcaatctccattgtctctgtatctgtcactcgaagtccgttgataaactctgcttcttttccgacttttccaacccacttgctgatttccttaccaccgccatgcacgatgatcggtttgaatccacacagtttcagaagtgtaacatcctcgattactctgcgtttcagactttcatccaccatggcacttccgccatattttactacgatgattttacggttaaagcgctggatataaggcagtgcctcgatcagcacctgcgctttatccagatatttctgcatattgcttgtcattttttctgtctcccttttttatcttttcagcgtctttaaagaaataataatttctctataaatcaacttctgtaatccgcattgatatcaatgtatccatgtgtcaggtcacagccccacgcagtagcttctgcatctccggcttttaagtcagcaatggctgtcactttttcctgtgaaagaatctctgttgccttttcttcgctataatctgttgctgttccattagcaatgatctgaagctttcctgcacagctctcgaagaaaagatctacctgctccggatcaaactgcgctccggaatatcccattgcacaaaggattcttccccagtttgcatcgtgtcctgcgattgcagcctttgtaagattcgagcatacaacagattttgcaagaacttttgcctgctcttttgtctgtgctccgacaacctttacttcaaaaagtgctgttgcaccttctccgtctcccgccattgccttcgcaagtgtctcatttacataatgaagagcctctttgaacgcatcgaattccggtgtgccttctttgatcttctcatttccggccattccattcgcgagaagaagtgctgtatcatttgttgaagtatctccgtcaacagagatcatgttataagtatcctcaacatcactgctcattgccgcctgaagtgcttttttggaaatttttgcatccgttgtaataaatgcaagcattgtacacatattcggatgaatcattccggaacctttcgccattcctccgatcgttacttctgtatctcctgccataaatgtaaccgcaacttcttttttcttcgtatcagttgtcatgatcgcttttgcagcttctgttccacttgccagatcagctttctttcccttggcaagttctgtaattccggctttgatcttatcgattgggatctgcattccgataactcctgtagaacctacaagaacacctttctcatcgattccaagaacttttcctgcctcttttgctgtctcttcacagtatttcataccttcctctccggtacacgcatttgcaattccggagtttacaataactgcctgtgatttctgtttgctctctacaatctgtctgtcccacttcaccggagctgcctttactacattcgttgtaaatgttccggcgactttacacggtttctcactgtaaatgatcgccatatctgtacgtccctggtatttgattcctgctgctgttgctgctgcttcaaatccttttgctgcggtaactccgccttcgataatcttcatatgatctgcttccttcctactgttcattaaatgctgtaatattttcttcatttaaaataaaatcataataattcacatcaagtcgttccgtccatccgattgtattccaaaatgcatttcctacattattctgtgcaaatgcgatcaggcagactttattaattttctcttcctgaagagctttcatgctatgcacgaccatgtcttttccgattccatgtcttcggtatgcctcattcacacatacatgatagagacttccttgtcttccatcatgaccacagagaatacttccgacgatttttccttctttcactgcgacaaaactcgttgtcggattccgtcgcagaaaacgttcgacaccttctttcgaatcatcgatactgcgaattccgaatccccggatcttcttccacaatttatatacttcatcataatcctctattgtcattacacgtatcatacataccacctttatcgttactgttcacacgatgtgcgaccagcaaccctttatctcactgttgtcctcactattatgtgatttagcaactttgttgcttctatatttatatatcttatgggaacatcggaacaagttcaagtccttcactctccggaagaccaaacagcagattcatattctgaaccgcctgtcctgcggcaccttttacaaggttatcaatagctcccatcataatgatccgtcctgttctttcatcgatcttaaatccaatgtctacatagttgcttccttctacccatttggtctccggacactgatctttctccagaacacgaacaaatttctcatctgcataatatttatcataaattgcttttacttcttcgtatgtaacttttttcgtaagctttgcatactctgtcgcaagaattccacgattcattggaactaaatgcggtgtaaagttcaatacaactttctctcctgctgcatatccgagctgttcttcaatctccggtgtatggcgatgtgtagctactccatatgctttgatattttcattcacttcacagtaaagattcggaagctttgctcctcttcctgctcctgaagttccagacttcgcatcgatgatcagagtgctcatatcgatcagtccttcctttgcaagcggatatgctgtcaggatagaacatgttgtataacatcccggattggccacgatacgtgcatcctttactttgtctcggttaatctcgcacaatccatagactgcttcatcaatatactgcggtgctttgtgttcgattttataccactcttcgtaaaccttcacatctttcagacggaaatctgcactgagatcaatgatctttgtctttgaaaggatttcttcattgatcagagatgcacacagtccctgcggggttgctgtgaagatcacatctacctgctctgcaagttcatccatgttatcatccatgcattttgcatctacaatctgaaacatgtttctatatacatctgcatatttctgatctacataacttctggatccgtaccagacaacctctgcatctttatgtcccatcaatattcttacgagctcgccgcctgcataaccggttgctccaataattccgaccttaatcatcgttctcaagtcctttcttttaccatttccatgggagccaatagaagttccctgggaattgcatatttactgtactgtggtaacgtgttaccgcaatcatttctccttataatataccactttaatcgggatgtaaagtatttcctgaaattgaatgtataaaaatacactttccctgctttacttgcataataatacatctttcatgtataatatgcaagcgttttttcaaaaaagtttgtagatagtattttcctactatataaagatatataaaaaggcgatgatattggcctaaatatttttttgactttcttcttatttcattcttttcatcatatcttgtatattttttcttatagcctattgttttatgcattctttttgtttattatgtgtgtctttatgcattttattcatttttttaaaataatacttgtataattataaaatgtggtgtatagtatgttttagcttgttaaagcagaaatctttagaactcaagaaactgagaaaacagaaatttataaaatacattcaggaggcaataaaatgagtaaagaaaaagttgtattagcatattcaggtggtcttgatactacagcaattatcccgtggctgaaagaaacatttaactatgacgttatctgctgttgcatcgattgtggacagggagaagaactggacgaactggatgaaagagcaaaactttccggagcttctaaattatatattgaaaatatcattgatgaattctgtgatgacttcatcgttccttgtgtaaaggccggagctgtttatgagaacaaataccttctcggaacttccatggctcgtccggcaatcgctaagaaactggttgagattgcacgtaaagcaggcgctgttgctatctgccatggtgcaacaggaaaaggaaatgaccagatccgtttcgagcttggtatcaaagctcttgctccggacattaagatcatcgctccatggcgtatgacagatgtatggacaatgcagtcccgtgaagacgagattgattactgtaaagctcatggaattgatcttccatttgacgcaaagcacagctacagccgtgaccgtaacctgtggcacatcagccatgaaggacttgaacttgagaatccggcaaatgagccaaactacgatgatcttctcgtactgagcacaacaccagagaaagctccggataaagatgaatacgttacaatgacatttgaagcaggtgttcctaagagcgtaaacggaaaagagatgaaagtttctgaaatcatcacagagctgaaccgtctcggtggaaaacatggaatcggaatcatcgatatcgttgaaaaccgtgttgtcggaatgaaatcccgtggtgtttatgagactcctggtggaacaattcttatggctgcgcatgatcagctcgaagaactcgttcttgaccgtgctacatatgaagttaagaaagatcttggaaataaatttgctcagatcgtatacgaaggaaaatggtatacaccacttcgtgaagcaatccaggcatttgttgatgttacacagcagtatgtaacaggagaagttaagttccgtctctataaaggaaatatcatccgtgccggagagacatctccatactcactgtacagcgaatcccttgcaagcttcacaacaggagatctgtatgatcaccatgacgctgacggattcatcaacctgttcggacttcctctgaaagttcgtgctatgaaaatgcaggaagtagaatcacagaagaagtaagaggaatttgttgaacttggattcatgcaattaaatcgaatactttctttagaatgatacgcaaagacagtactactattgccataggcaccggcccgctctacctcatccctttgaaagtatgtaacataaaagccaaaacagttaccgtgtgtggtgcctgttttggcttttattaacatactgaacaaagtgtattcggaacgctcctgccttacatgtgcctatggcaacagtagtactgtccttgctcacataactcaaaataaagatttctgttccaatcggagtgaatccagaaaacaaatacgagcatcaaaacgtaaagtgaaaaagaaacgttatcaactacgattatgtttcagaaattatctctcaccccaaagttcgtccgcttttgttttccactctttggcgtaatgttcgcattttccgcaaaggtgttctacagtttccggggactggaggtctgttgattttgcgccggtttcgtgtaccatctgctgcagtttttctggattttcgagcattgggcacgggcgcagatgattgttgttaaatggctgattgttatggtaagccataaacagtggctggcgtaatgcatcaagcacgctcacttctttaatgtttgcacttgaataatggataaatacgcatggctctgcatctccatttgcattaatatggaagtaatttcttccgccggcaatacatcctcctacaaactctccatcattctggaaatcgaatgcaaagagctgttttccacctgtcaatccacggatctcacggatgcggtgatacatgtattctctctgctcttttgttggaagcagatccagtgctgcatcatttccaaccggcatataatggaaataccatgcataacgacatcctttttcaatgatcatatcaaggaatttgtcggatgttactgtgtcaatgttagcgcgtgtatagcagattgatgttccaaagatcaatccgtatgttttcaaaagatccattgcatgcataactttctgataaacgccttttccacggcggccgtcgttgacttcctcatatccttccagacttatggacaatgacagattaccaacacgctgcatctcctggcagaactcttcatctacaagtgttccgtttgtaaatgcgtggaatacgcagtcgttgtgtttctcgcacaaacggatgacatctttctttctcacgagaggctctccgcctgtcagcatataaagataaattccaagttcttttccctgtgtgatcacacgatccatatcttcaaaagaaaggttcagaagatgtccgtactctgctgcccagcatccggtacatttcagattacatgcgctggttggatccatcagaatcagccatggaatgttacactgatatttttcacgtgactcgtgcattaactttgttccataaagcattgcatcaaatccaagattcaatgctgttgtcttaaggacatgcggatccacttcatcaagaagtctgttcagatactgaacccatttgttgtccggatcctgaatcatctttcttgcagcttcataagaccctggctggaaacgatcttttgcaaaattttctgtaagatctacaagcttaagaagtgctttcgttctatcatctgtcttgttcatatatttaagtactttatctgctgccaaactaaatgctgctctttctgcctgaaattttaatcctgccatttttttcaccttttccttacttttcaa

SEQ ID NO: 16 - DNA, 8913 bp, unidentified
  source 1..8913: mol_type = unassigned DNA
tcaaagctcctgcggcatctgccatgcttcgatatcggtatgcagcagatggtgagaacgttcggacagcggctttccgagatactctttgtaaagcgcctgcacatcggggttttcatgcgagaaacgaaggagcatcttgtgatcaagtctccacaggacatttccgcgcgcctcggcgcactcctcgccgtcgtgaatcggctggccgccgcctgcgcagccgccggggcaggccatgacctcaacgaagtcatactgcacgtggccggaggcaatcgcctccatgagcttcctggtgttgccgagtccactgaccaccgccgtgcggaccgtgcctgcaccgggaacgtcgaaattcgcttccttccagccctgcatgccgcgcacagcggtaaaggcatcggggtccggattttcaccggtcacaagatagtacgcgctgcgaagcgccgcgtccatgacgccgccggtcgcgccgaagatcaccgccgcgcccgtaccggagccgagcggcgaatcgaagctgccctcctccaaggccgccgggtcgatcatcgagcagcggagcatccgcacgagctcgcgcgtggtgatgaccacgtcgacatccgcgtcgccgcaggcatctttcatcgtgggaagcgccgcctccgcctttttggacgtgcacggcatgacagagatgacacggagatttttgggatcgatgccgattttttcggcaaaatagctcttagccaccgcaccgaacatctgctgcggcgatttcgcggtagagaggttctttgcaaactgcggaaactgcccctttacgaaccgcacccagccgggacagcaggaggtaaacatcggccaggaatatgcatccttatgcgtaaagcgctcgatgaactcgctgccctcttccatgatggtgaggtcggcgctgaaattggtgtcgaatacataatcaaagcccagctcccgcagcgcggaggccagaacgcccggcgcagcctgttcgggtgagagaccaaaatattctgtccacgccgcgcggacggcaggtgcaacctgtacaacggtcgtgagggtgggatcggcgagcatgcggtagacgtggtcggtatcgtcgcgttcctccaatgcaccgaccggacagtgggtcacacactggccgcaataggtgcagagggactgggaaaggctgtccgcctttgccgtaccgacggtcgtccgggagccggtgccgaccagatcccagatatgcacgccctgcaccttatcgcacacctgcacgcagcgcatgcacttgacgcagcggttttcaaagcgcaaaatgggcgcggagtagtcgaccggcgccggacgcagctttttctgatagggcgcgccgagcagattatagtcgttggcgagcttctgcagcttgcagttgccgctgcgcgtacacttgacgcagtttacctcgtgctggctgagaagaagctggagattcacgcgccgcgtcatgcgcaccttctgagaattcgtgtggacgaccataccctcgtgaacctcattgtcgcacgcggcaacaagcgtatcctgtccctcgacctcgaccatgcagatgcggcaggcgccgatctcgttgaggtccttgagatagcagagcgttggaatgtcaatattggccgcgcgtgccgcttccagaatgctggtcccctccggcacgcagacgggtttgccgttaatgatcaagcttaccatcgttcgatcctccctcccttgaagatgccgtagccgaagtggtcgcagcgcaggcagcggccgctttccgcgcaggcctcctcatgcgtcatgccgcattcgatgtcttcaaaatcgcatttacgctgggctgcctcgcgctctttggtgttgacgcgcccgcgcgcgggacagacgtccagatgcggcgctggaatttccacatcggtgcgaatttcatggtggaagccgagctgttcatcgatgttggctgccgcgaccttgcccgccgcaattgcacggatggcggtagcagggccggtcacgcagtcgccgccggcaaagacgttttccatgttgtcgatctggctggagctttcagccataaacgttccccttttgatggggataccggcctgctcaaagcccgcgatctccacgccctgcccgatggcgacgacgatgatgtcagccggaatgcgttcttcgggctggtctgccgcgtccgggcggggtctgccggacttgtcggcaaggccgatgatctgcggctgcacccagagggcggcagcctcgcccgcttcgtttgcctcgatgcgcaccggcgcagaaagctcgcggatctccgcaccctcggcaattgcgccctgcacctcgtcgggaagcgcagtcatgtccgcaattctgcggcgatagacgcaggtgacgctggcagcgcccagacgcacggagcttcttgtcacgtccatcgccacgttgccgccgccgatgaccacgacgcgcttgctggcgaagtccggcatgatgtcgtcgccgatggcgcgcagcatttcgacggcagacatgacgtttttgctgtcctcgccgggaatgccggttttcttgtccgtatgcgcgccgatggcgacatacaggcagtcgtaatccttgtgcagctgttcaaaggagatgtcttttccgaccgtcacttcggtatgtacctccacgccggtggacagaatggaggcaatttccgcgtccagcttttcgcgcgggaagcggtaggccgggatgccgtagcggagcataccgccgagccgcttcttttcttcaaaaatcgtcacgctgtggcccataaggcgcagataatacgcgcaggaaagcccgctcgggccgccgccgatgatggcgacgcgtttgccggtcgcctccccgcaggcaggattcgggacattgcccgcatgatcgactgcatagcgcttgaggccccggatattgatgggcgcgtcgaccatgttgcggcggcagcgcgcctcgcacgggtgctcgcagatgtacgcgcaggcggtcggcatggggttatccttgcggatcaggcgcaccgcgtcggcgtaccgtccctcgcgcaccagcgcgacatagcccggcacgtcaacgcccgcaggacagagcgacacgcagggcacggggttctgaagcgaggcgaggcaccggtggtgctgcacatggttcacatagtcgtcccggaagccctcaaagccgctcaggaccagctgcgctgcgtcgcgtccgatggcgcagtcagcagaggcgacgatggcccgcgccgttttttcgatggtgtcgatggtcagcatggtgcccgttccgtcgagcacctgccccatcagcgcggcaagctggccgagtccaatgcggcagggcacgcatttgccgcacgactgcgcgtggcacagctgcaaaaatgtcagcgacatatcgatcggacacaggcccggaggactggacgcgatcctgcgttccatgtccttgtagaggcggtcgacgaccgtctgggccttgcttgcggttttgatatccaatctgctcaaggctggctcactccttctgcttttctgatctttttattctattttttgatataaatagcattttttaatccaaaagaatcatagcatatccaccggataccggtcaatacttatcgataaattcttatcaaaccgttcattcttcttttgcggaccgtctattcgtaatttgatatgtcccatttcaaaagccggaggcagccctaatacgcgccggagcagcggcgttgttttgcgccgctgctcgttttgtttattcagcctgtacgttttgctcggtatagatctttgtgtcatccttatgaactgtgttcagtttgggctccgccgtcttctgcccaggaataaaaatgggtcgagtgcgtatccgacgccagcggtgctgggtcgaggcggaagccggagatcccaagcgcctcttccgggcgaacccagggttttccctgtatggcgctcgtttcctcatgtgtcagaagcccccggtagatcgtcagtgcccgccggtaatagccgtcgcggatgcaggtctcctcctcgccgtcattcagcaggtgcaggatcagcggcagcatctgtgctgcgtaggcaacagacgcagagtgtgcgaccgcgcccggaatatttgcaacacagtaatgcacaatgccgtctacaatgtaccgcggatcttcatgcgtggtcgcgcggctggtctcgatcgcgcccggctcgtcgttggaaatatccacgatcactgagcccttttccatgagggaaagcatgtttcgggtgatgaggaactctttgttctccttctgccatttgacacagttgagaacgatatccgttttcggcaattcctccgcaatatgcgcccgtgagcagcgcctaacgcggacgcggccattatactgtgctgagagcgcacggagcctgtgcatatttctggccatgaccgtacagttggcgccgagcgcctgtaagacctgcagagcgcctctgccgacttttccgcttccgagaatcagcgcatggatgcccggctcccccgcaaagccgccgacatattttccctttccgccgtggatggtcagcagcgattccagcccgaacagcgccccctgcttccccgctgcctcacagttcggggagccatatcgatgggaatcctccgccgtaaatgcaatgcagccgcttttcatcagcgcgtcgacctcctccggatttgccgccggatgcaggcagccgagaagcagctgccctgtccggatcagcggccattcctccggcgtaaactccttgaccttggcgaccatatcgcatactttgaacagctcctgcacagagtctgtcagaagcgcccccgcagattcatacgcttcatccgaaaaaccggctcgttctccgcagccgcgctgtgcataaacggtgtgtcctgcgctcgtgatggtctccacctctttcggcgtacagatcactcgattttcgcccttcttcgtctcacgcaaaattcccaaaatcatatgctgctcctcctttcatcaaattcttttcctgtcgtgctgtgtttttctatctttatcatacaagaaaagtgacggattcgcaacactaataatacaaagtctcattttaatttatgcatcaggccgtcgctcgcgtatcacaataaaaaagcgcaggatccgggcgattctccgctcaaatcctgcacctttcgggtttctgttccgtgcttacttttcgtgcccggccttctggcacgccggacaaacgccttcaaaaatcattctgtgccgcgtgatccgatacccggattccgctgcgatcgttttgtccggcgttgggtcgtatgaaaacggggcatcacagactgcgccgcagcccgtgcagatcaggtgatagtgaaagtctgtcctgccgtcataccgatccgctcccggaacctttacatgcgtgatctgcccctcctcagaaaggatattcagattccgataaaccgttccgcggctgattctcgggtcttttgcacggatctccagatagatctgatccgcgctcggatggtcatggtgttcctgtaccgcttccagaacaattttacgctgccgtgtgtttcggtactgcatcttgcttccgcctgccctcatatcattcaatttcatcgtctgccatgaaaaatccggactttccgcccttatccatgagcagatatatgaattgtaccgcaaaatatatcggctgtcaacattccagtaattgcggtttttggcagcagatttcctatcgttttcccctcttgtcaaacgaaactgaatcagatatacttaaaatagaggagagaaaccgaagttccggaacaaatcctgcaacggagcctctgttttcctgtctataaacagagcgacaaacgaaaggagattacactatgaaaaaggatcgccaacttgtaattctgcttgccgccctgctggttctgatttttttatccagctgtgccgcgggcaaaaacacgtccatgacccctgcggccactgattttgcctacgccgaggactattcctaaagcaaaaaaggctgccgccgaggctgctgcaaaggagcaggaaccatgatcaggcggagcaagactactgttttttataaatcgcttgctatcaggactcggtatctattataatataaccaccacaggaaacccatatgaaagcagctttgccccgcctgcacccgccgccattccgacgtgaatatgcaaggaggtattgtctatgagtacacaagccatccgttccagagagaatcctaatctcgaactcattgcattccatggtcattttgcaacccggcattcccataacagtcattaccttgacatcacacggctgaagcacgaatacagtctggcgcacgacactgcgcttgcgctcgcgaaccattacatctacgaaaagtcgatcgacaccatcatctgcatggatggcagcgaggtcatcggcgcgttcctggcccgacagctgacgcagaaaattttgttctctgtcaacaataacaagagcatctgtgtcgtcacaccggaatacgactccaacggccagcttctgttccgcgaaaatctggttcccatgatccatggcagaaacatgcttttattgatctcgacagtcaattccggaaaaactgcgcggcgcgcccttgattgtatccaatattatggcggcaaaacgcagggcattgcggcggttttcagcgcgatcccagagctggacggcatcccggtattaagtctgttcacgcctgccgatatcccgggctatgaaacctatccaaccggcgagtgccggatgtgcaaagccgggcagcgaattgacgcactggcgaacagctatggtctttccaccttccgatgatccttcagacgggcagcgcacccggccttcgtgtccgggtgcgctgtttatatgatcagaaaacatcttttgcgaaaccgctgacgaaaccgtttgtcagcccttgtcggcggcaagggtctggtcaatgagtttctgcagcgtctccgcctgctttttttccgtgatggcgcctacgatggggtcacccacgatgttgccgttgcggtccaccacataggtggtgggataggcgaagatgttggttgtgaattttccggcctcgccgtcggaagcgaaatacacgttctgataggttgcgcccttcttggccagcacatccttcgcctccgagattgccgtttcgtcgccgtcaagcgtaaacgtattgacgccgatgagcgtgccgcccttctctgcgagctctttgttcagtgcgtccagctcggcaagctcacccacgcagggattgcaggtggtgaaccagaaattcaccacggtgacagcgttgccggagaacagctcatcgctcttcaccggattcccatccaagtctttgccctcaaatgcggggaacttctgcatgctgccgtcgtcgggcggattggtcatatcgctgcctgcgggcacgctcatatcgccgtccacggattcctgcatgatctcggggtacttgttttccagctcggtcagcttgttttcgatattgctgatctccgtggccgattccttcagcatcttatactcttcgtcggtgaactggtctttggctctctcgatggtatccagcaggaaatcaccatagtttttgccgtcctccaccatggccatgcccttgtcggcctccatgaaaaccttttcccagagcgcagtgttctgcgacaggatcgtgttctcctgttccatcagctttttgtgcagggcaagtgcctcctcggcgtttttcggctcgccggtcatggcagagctgtctccgctcatatctgccattttgtcgttgtcctttgtgccgcaggccgccaaagacagcaccagcagggccgccagcagcagcgcagtaaactttttaaacttcattttgattcctccgtattgatttttgttgtattttctttcccgttgccaaagccgcagcggaagcacacggcgtttgtgggacaggcgcggatgcacatcccgcagcggatgcattcgggatggtttggcgtcttcgtcacgtccacgtccatcttgcaggctttggcgcattttccgcaggagacgcacttgttcttgtccaccttcatctggaacagcgagaccttgttaaaaagcgcatagaatgcgcccagcgggcacagccacttgcagaagggacggtagaacagcacgctcagtacgatcaccgccagcaggatgccgaatttccatgtaaacaggctgcccagtgccgcccggatgccggaattggcaagggacagcgggatagccccctccagcacgccctgggggcagaggtatttgcagaagaatgggtctcccatgcccacatcgttcacaaggaacgccggcagcaggaataccatcaccagcaaaacggcatatttcagatatcgcaggggcttgagctttcttgtggagagtttcttggtggggatcttgtgcagcagctcctgaaaccagccgaagggacagaggaagccgcagataaagcgtccaagcaggactcccagcagaataagaaaccccgtgatatagtaggaaaagctgaacttcgatgagcccaccactgcctgaaacgccccgatggggcaggccccggacgccgccgggcaggagtagcagttgagtcccggcacgcagacggtcttccccgcgccctgatacagtccgcccttgagaaagttcggcagatgcaggttggtcagcagcgtcgctcccgcctggatccagccccggaagcgggacatggtctgtgaaacgcctgaaaactttttacccaa

SEQ ID NO: 17 - DNA, 8009 bp, unidentified
  source 1..8009: mol_type = unassigned DNA
tcatttcaaataatttttactgatcgtattaagcacttcctgcgctttttcaacttcctccgcctcttgtcctaaaattcctttttcaatttttactgccagttcagcctcttttattgcatcctcatattttcccagcaatattccctggcaccaggcatcaatcagcaggcattctgcataccagacactcttttttccatatatctctttcactctttccgtgatctgtgcccacatatccatgtgcagatctatgtctcttcctgctgttttcatatagcaaatcataagatttttttttatatacaattcatgttccaatcgatgtgaattactttttaatatgattttttcacacttctccagaattgttatcgcttgttcatatttttccatctgtatataacaagccgccagattattttgagttttacacatctggacaatattttcttcttgtttgtgctgaagttgaattatctcgctaataattttttctgccttttcataatttttcagtccatattcacaaaaagcaatcccttctagtccttgcagggaactaaaatcttttttgcgttctttttcagatgcacaaatcagaattttatgaaatattttttccgcttcttcataaaattgctgatttgacaatgccaacgccattagaatatttatatctgcctctaattttttcttttcttcccccgatgcatattgtttaatttcttgtatggcctccctatatgctggccagacaaccttatccatattttcttttgtcgctacacatgcatttatcaacgcagccgcatataaacgtagccgcctcacctgatctccctgttgtttctgctttttatatagagtaaaagtaatatcaaacttttctttttttctaaaatgcttttcaaacggagcatcatattccggctggaatggaatttgttttttagggttatactccaaaaacagaccgatataatctctcagattgggttcatacctttgaatttggtttaccataaacgttggcatgataaaaaccagacgaatcacattttttaacagttcccgggaaatatttaaacttttcaccacatttacagaatcaaaatacgttggaaaattataaatgcagatacatttctcctgctcattttcagaatttcctatttttctgagatactcaacgatcccctcttttaaatccatataatctacacattgtaaacaataactggtatgcatatactcacatatctgcatgccaatttccttatagttacattcaataacaacgattcctatacttgcatttttcatataaatgtcaaaaattttattctgttctttaaactgttctttcagatcaggcatttattctacctttttccctcaaaaaatctaccaataccggatgcactccacaccaacgttctccgttatattcaattactgcaagtgtttttaataattcgcttaaaatctcatctgtattttccggatgtggatcattataaatttcaatcaatcgctcaaattgttccggtgacgtaataaatctttcatacgtgcttttcagccgcatagctgcaactgttgcatcttccatggaaatctgctgtggttcggtttttgaaagttcaagtattgcacaatttgtaagcatggaaaaaagatccctgattgctcctcctgattttaatatcatatatttgagtgcatcttccgcaacaagtttctctttcatccgcttgtatacaatttcttttaaaactgcaattccttcttcattttccgaccgatcactattattcactttgatcatgctatacaatacatctttgtcaaaatcatcattgatcattccaaactctgcagtataggccatataaataggaaaagagaagatcattttcaaatgtagcgccagcaaagtttttctgtgttctacaaacaaatgtcttgcatccgcaatatcaagtttatccagatcttccacaacgataagaagttccttttgctgcttctctttaagctgatcattcatatcctccagtgtttcattcatcaaactgatcaggtaactgattttcggttctatcgatttacgaatcgtcttttttgtttcggttcctgttttaaaaatgccctttccatacaccgatatttttttcaaaaatccaagtccgacctctcctccggcttctgcctctgcaaattcattttttgtaaattcaatggatatttcatttttccaatactgtgtcattttatctaaaatttctggctttactttaacagcctgagaggttgaaaggtattctataatctggctcataactgcaaaaatcacatcaatatactgtattccaatcagttccacttcctgcgcaatcgaaaaattgatgatttcatactgatctttcaattcttctgaaatctttaccatttccgtggattttccactgcctttatgccccattaacaatatttttgtatatggattaatcccatatttcaaagtgttaataatctcacttctggcattgatcacgctccggatagaacttgtatccacataaaagtcttcaaaattttccttatttaatggaaaagaattaaaaactgatatcatttcctctaaccgttctgcttttttcatcttttgaatcctccatgcacccaaatacatttcctgctctcctatcacatctttttattttcttttgtgatagatatctaaattttagtatacgaaaaaaggtgccctatttcaagacacctttttccatccatattctattcgtattctattatttctccagccccggccactcctggtccttctccgaaagtgtcagcggtgtcccatctgccatacaatatccttccgccgacggcgttccgtgatactcacctgtcacatccggccaccggatgccgatcactgggtcattccatgccagaccgccctcgtcgttcgggtgccagaagtcattgactttatagcagaactctgcctcatcggacaggaccagaaagccatgcgcaaagccttccggaatcagaaactgctttttgttttcctcggaaagttccactccgtaccattttccataggttgcggaatcttcgcgaagatccactgccacatcaaatacgcttccgcgcacggcgcgcacgagtttgcactgcggatagttgatctgaaaatgcagtccgcgcagtacacccttgacggacatcgattggttatcctgcacaaactggatatcgaatccggcttctttcatttccctctcattgtatgtctccatgaaatatccacgggcatccccgtgtacggccggtgtaatcacacacagcccttcgataccgccgacatttttttccactgttatctgtcccactgttttttcctctttcatgctgatttataactattcagaaccccctcagaatagttacgctgattttaatatttcactctgccctctgcgactgcttttaaatgctctccatacggactctttccgtagcgtgcggccgagtccatcagtttttcttttgtgatccactgattgatatatgcaatttcttccggtgcggaaatggtcacaccctgccggtgctcaatcatctgcacaaatgccgccgcatccagcaggctgtccatcgttccggtatccagccatgcaaagccacggccgagcagctgtacatttaggtttttctgctgcagatacatgtcgtttaacgtcgtaatctccagttcgccgcgagcagatggctttacctgttttgccatcgcgctcacgcctgccggatagaaatacagtccggtcacggcatagttgctcttaggctgtgccggtttttcttcgatggatacggcttttccgttcgcatcgaaatccacgaccccgaaacgctccggatcgttgacataatagccaaagacggttgcctgtccttctttagcgtcctttgcagcatttcgcagaatttttccaaatccgtttccgtagaaaatgttgtcgccgagtaccatggcgcaggcatcctctccgataaattcctctccaagcaaaaatgcctgtgcgagtccatccggagacggctgcactttgtaggacagatgaagcccgaactgatttccatcccccaaaagtgcttcaaatctcggggtatcttcctgcgtggaaataactaaaatatcacggatgcctgccagcatcagtgtagacagcggataataaatcatcggtttgtcatataccggaagcaattgtttactggttaccatagtcagcggatacagccgtgtacctgcgccgcctgccaatataattcccttcatcttaaagttccccctgtcgctttaattcctgcagataccgccccagtgcgtcctgccaggttggaagcggtgtaaatccattttctttcagtttctttttttccagtctgctgttaaacggacgcgctgcctttgacagaccgtattccgcggttgtcacgggctgcacttcggtagaaagccctgcctgccgataaatttcttttgtgaaatcgtaccaggatatataaccaccctcgtttgttacgtggtaataaccatatttttcggtttccatcatgtcaacaagcagtcttgccagatcgtaagtataggtcggtgtgccgatctggtcatttaccacgcgcacctgcgggtgattttttgctacctgcaacatggttttgataaaattctttccgtttaatccaaatacccaggcgatacgaacgataaaatacttttccagtgtctgtgccactgccagctcgccccccagtttactctgtccgtatacattgagcggtgcatactctttgcagtccggctcccacggagtctcgccctgtccgtcaaacacatagtctgtgctgatatagaccatcttggcatctgctttttttgccgcgtccgcaatatgtttcgttccatctacgttgatggctctgacttttgcctgattttcttcgtcctctgctgcatccacagcggtccatgccgcacagtgcacgatggcatccggctgtacttgcatgattgtctgttccactgctgccgcatcggtgatgtccagcggcacatacgatgcacaggattccagtgtcggtgcaatatccgaaccgactgcctgatgtccgcgctttatcagttcgtttaccacgtcatgtcccagctgtccggcaacgcctgtcacgaatactttcatatttataagcctttctttccgtacatttctttgtaataattctggtattccccgtttacgatgttctcccaccattccttatgatccagataccactggatggtcaggcggataccatctttaaacatcgtctccggcagccagcccagctcgttgtggatcttggtcggatcgatggcatagcgcatatcgtgtccttttctgtcctgcacatgctcgatcagactctccggcttgccaagatattcacagatgagttttacgatatcaatatttttcatctcattgtgtccgccgatgttgtagacttctccgacggttccgttgcgcaggatcagatcaatcgccttacagtgatcctcgacatacagccagtcgcgcacattgagtccctctccgtataccggaagcggcttatctgccagcgcatttgcaatcataagcggaatgagtttttccggaaactgatacggaccgtagttgttggaacagcggctgatcgtcaccggcaggccgtacgttctgtgatatgccataacaagcagatccgcagatgccttggaagtgctgtaaggactggaggtgtggatcggtgtatcctcatggaagaacagatccggacggtccagtggcagatctccgtacacctcatccgtggatacctgatgataccgtgaaataccatacttcctgcatgcgtccatcagcacggaagtaccgataatattggtctgcaaaaagacttccggattctcaatggagcggtccacatgggactccgctgcaaaattgacgatcacatccggtttttcttcctcaaaaagggtatatactcccggacggtcgcagatatcgagttttacgaaacgaaaattcggctgatccatcaccggtgcaagcgtggacagattgcccgcataggtcagggaatccagacaaacaatgcgatcctgcggatgttcctttaacatatagaaaataaagttgctgccgatgaaaccggcaccgcctgttacaataatggtcatgagtgtttcctcctgtgtgcgtttacgattcctgtatttgtttccattataaaaggtgacgctaggtcaccttcaagtcttttttatagatttttctaattattttctgcacaggaagattccggcatcttttgtgatatgaaatccatctgccacgcgggcagaaacaaattcccgaaactctttgtactggttcaaaagcagctggttctggtttccgtgacaggaaagaatataggaaatcagcggttccgcttctgctatttcaatcgcatcctcgtatcttcgcatctgaatttccgggaaatacggtgctaacaggttttctccgttttcaagcccgaaccgctcatacagcacctccgctgataaaacgatttctttatggaactgctgcaccagatcggtaatttcccacatatgctgctttccgtaggtactgcatagaaaccgtcccccattttttaagactctccgacattctgcaagcacctgtgggatatcttcacagtaaaacagcacatgatccgcgatcacaagatcaaatatttcctcctcgtaaggaattttttcgcagtcaaattttttataggaaaagcggctgtcctctcccagtgcacgccgggcatcctttagcattccttctgatttgtccgagagaacgacccaaagatccgcaggcagctgttctctgttttcggtccataatgctccatttccacagccgagctccagaatccgcatccccggctgcagattacactgctgcataatccacggaaaccacccctgcggattgacggaatactccctgtgcaggcgaatccgggcggaaatatttgccgcattctggtactggtttttcaggcttcgttccactgccgtcaaatgaatcaaatccagcatactgttccagtcaatcgcctgttccgtctggatggcttctatggtgcggtcaattgcctcatccatcgcctgcatttcgtccattttctgccgcagcagcttcttctgtatccgcatggattcgagaagatactgctggtctgccgcagcaagtgtcatctcccggatatcttccagcgaaaatcccagatattttaataaaaggatctgctggagttttgccagatcggcatccgtatacagccgcgcccctgcggcagtccgcgcacttggttttaaaatattctgtttatcataataccggatcgcgcgaagtgtcacatgtgctttttttgcaaattgtccggatgtgtaatacgcatcctttttcatctacagttctttcacctcatcccgcatttcttctgtcatattctgtacataggtcgtctgggaagaaatttcttccgtgtttgcggcaatcgttgacaccttctgcgtcatggtattcatgctttctaccagatctttgattgaatccatgctctgtgtaatctttgggataattcgccagaaatgccggtgccagtatcacggaaattttccttcccgatgcaaggtcttcaaagaaacggtccgtatcatcataatagtctctcgcttcatgtgggcagacatcaaaacattccccgcatacaatacatttgtccgggtctaccgttacataaccttcctgtgttgcaatatttgccgtaagtacaggacagctgcgcacgcatttgttgcatccggtgcataaatcagttgtgtaaatcagttccat

SEQ ID NO: 18 - DNA, 18291 bp, unidentified
  source 1..18291: mol_type = unassigned DNA
gctctcgcatcctgtcccacagtggcccttgggcttattcttttcatcggtctctctcagcgacaagtggtatcttatcacgggaaaagtgaattgtcaatgttttttgtgttttttatttttttcgcacaattcagataattcacttttctttttacttacagtatcatgctgctcatatgttgtcctttatttcgcccaatacaaaacagcagccttcaaaaactctgcacatcctgacacttcttcatcataaataacgcagtgtacgtgtactcactcctgtcatttctgccacttcctgaatactgtattccatctttctacctcctgccggattttagtatacaagttgacgccgtgtcaaagtcaatacattttcccgcctatttgagaaagaatttcaccagattcatcttcccttttgtaaatggaggataacagaccggaagattccagtcagccggtttataaaatacacttttttcatgagtaaatgtatcaaaactatactttccgtgatattgtcccattccggatgctccgactcccccaaacggaagatctggattgatcagatgactgatcgtatcattgacacacacaccgcccgaagacacccgttccaaaacgaacttttctgcagatctttttttcgtaaacagatacagcgcaagtggttttgctcttttattcacaaaacgtactgcatcttccagcttgtggtatgacagaaccggcaatatcggaccgaacagttcttcctgcatagacgccgcattctgatcctttccgagatccagaatggccggctcgatataacgttgcagtgtatctgcctctcctccgcagaacaaatatttcgcatcctgctccagtattttctgcagacgttccatatgccgttcatttacaatcctgccgaaatctggattcttttttatttcttttccatatagatgagaaaatgctgttttcatctctgttaagaactgctgttttctgctctcatccacaagcacataatccggcgccacacaggtctgtcccgcattcatgagttttccccacgcaattcttcttgctgcctcttttatatttgcagttttttcgataataaccggactttttccacctaattccaatgtcaccggcgtcagattttctgctgccgctttcataacgatccttccgacacgttcactccctgtaaaaaagatataatcaaatttctgagaaagtaattcctgattgacctccactccaccttccacacaggcaatatattcttctttaaatgtagagtgtacgatctgatacattgcttctgaaacatgtggggtaagttctgatggtttgagtactgcacagtttcctgccgcaatcgctccaaccagaggctctgccaacaactgtaccggataattatatggtcccagaataagcacacttccataaggttctttttgaatcttacttttgcccggaaataaatacagcggtgttctcacacgttttggagccgaccatttctgaagattttgaatcgtatatcgaatatcagcaagtacaaatccaatctctgtggcgtaagattcaaatgcagattttccaagatctttctttaatgcctcccccaaaaccgtttcattttttcgcattgcatctgccaacagttgtaactggcagatacgaaatgcaagatcccgagtccgtccggtttcaaaaaattgtttttgtgcctctgttaactttgaaaacattctatttttctccatatctttttacacattagctcctttcttcggatgttcatatttctcaattataacactgccgtatcgccttctcaattcatctttgattccttttcgcacgatcggcaattttatttttgacaatttctttcatttcagtcgggatatgatataatcattttgcgaaatgttgttcaaaaaaatgatacagaaagaaggaccatatatttatgaaaacaaattcaaagaaatggttgaaacgcctgggaatcttcctcggaactctgatactgatcgtagtcggctatgttgtttatgtattttccagttactatcgtctggaagacaagcaaaaactgacgatcaccggaaaatctacagaaaaggcaaaaaccaaaaaaagttaccgcatcacatctggaaatatcggtttcggcgcatacagtgacgactattctttctttatggacggtggaaaagaaagccgtgcccgttccaaagatgccgtcattgaaaacgtcagcagctatgcagaagctgtagctcaattaaacccggattttatgctgttccaggaagtggatattgacggaacaagaagttatcatgtggatgaacgcaaattattgctttcacagacactttcaaccgataacacctcacgaaactacacatttgctcagaactatgacagcccttatctgttctatccgattctggaaccacacggaaagaacaaatccggtatgcttacagtttctaacatgaagatcacggaatccatcagacgctctttaccgatcgaagatggatttatgaaactgctggatctggatcgctgttatagcgtcaaccggattccgacagaaaacggaaaggaacttgtcctgtacaatctgcatctttccgcttatacatctgatccgagcaccgcggacaatcagctgcggatgctgtttgaggatatgaaagaagaatatgacgctggaaattatattgttgcgggcggtgatttcaacaaagatctgcttggaaattctgctgagatttttggtcacaaggaattagaagacaactgggcaaagccgatatccgaagaactgattcctgatttcatgcagttgatcgcaccgtttgatgagaaaaatccggtaccatcctgccgaaatgcagatcagccttacagcgaatctgattttgttgtaacagtagatggttttctggtatctgataatgtgactgtagaagatgcactggttctggataccggttttaaatggagtgatcataatccggtttatatggattttattttagagtaaaaaaagtacaggctgatgttttgcaaagaacaccagcctgtatttctattcataatgtgtttttacatactcatccatcgcatctgcgatcattttcgaatacttcaccgcctctaccacggtctttgcaccggtcactacatctccggatgcgaaaatccccggcatggtggtctctccatttgcatctgtcttgagcaatccccgatcatctacctgcagctctttatcccggttcacgatccgatcctgcggtccctgagaaatcgaaataatgatactgtcagccggaacaagcctggcagtctcttcttttttcaccagttttccatcttcggtccattccacatcacagataatggctccttcatccccgatttcaatggccgtctgcagatattcgaactctactccgtccagttttgcatactccacctcttttggggatgccgccggaatttctgtgatggaatagacggttacatgccgggagcctttacgaattgccgttcttgccacatccattgccgcattccccgcaccgatgacaagtacccgttctcccagatcatagacatccggattgttcagataattgattccgtagtgcacatttccaaatgtttctcccggtatatgcagctgatacggtctccaagttcctgttccgataaatacggcatgatatccgtctcttaaaagatcttccacacctgtggaaccacccagcgcaaaattgggcctaaataagatacccagctctttcatttttacataatagcggtctaaaatggactttggcagacgaaattcaggaattccataacgcatgattcctccgatcttctcttttacctcaaaaatcgtcactttatatcctctgcacgccatcaaaatagcgattgtgattcctgccggacccgcgccgacaactgcgatccgtttgccgtttttcggaagctgctccagcttcatccggtcaaagcaggtatctgaaatataattttcaatcgaagaaatatgcaccggttctccttttatgcctttcacacaatgcccttcacactgtttttcgtggtcacagaccagagaacagatgacagacagcggattgttggcaaacaccatttctgccgcctccggcatctctccttgcagcagcatctggatcatcacaggaatcggggtatggatcggacacccttcctgacatctcggttttttacagtttaaacatctttttgcttcatcaatgacatgcagtcccattgttattacaactccttactttacgatctgttatccggatagatgatttgtatttttatgcacaataacaatttatcacacaaaaaaagaaagtcaacaatcgttattttgttgactttcctgttattttattcacttattgaagatcttataatctgcatttaaaatcttcatatccgaacgatttcacgatctcacattctccactttcgcgttcccacacaatatccggaagacgcattccattgaatgtattattttttacagtcgtatagatcgccatatctccaaatgtgagtctgtctcctactttcagcggctgatcaaaagaataacttccgatcacatctcctgccagacaggtcggaccgccaagcagatacgtatattctttttccttcgcctctccagaatcaaacagaggcgggcgatacggcatctcgatcacatccggcatatgacacgctgcagagacatccagtaccgcaatatcattatgtacaatatcttccactgttgtgatcaaatggcccgcatttaacgccaccgcttctcccggttccagatagacctgtacattgtaggtgtcctgaatcctgcgcacacaggagatcagaagctctctgtcataatccactcttgtaatatgatgaccgccgccaaaattcacccattttaactgtttcatccacttgccgaacttttcttccactgctttcaacgtgatttccagagcatctgcattctgctcacagagtgtgtgaaaatgcagtccctctacgtaagatggcagtgtttccggaaattcggataccagaatcccaagacgggagcccggtgcacaaggatcataaatcgcatgctctccctgcgtggaacattccggatttacacggatccccacactttttccggcttttgcagcacgttctccgaaacactcaagctgtgaaaacgaattaaacacgagatgttcgcagctttccagcacctcttcaaattcatcttcccgatatgccggagaaaaaatatgattttctttgcccatacattctttcccgagctttgcttcatacaagccgctggcagtcgttccatccagatactctccgatgagaggataacaggaatacatagaaaatgctttctgtgccagcaggatcttacatccgctctgctgtcggatttcctgtaaaatctgcagattctttttcatttctgactccatgatgacatagcatggagtccttaattcttctcttttcatttctgatgtccgtttcttaatctaccatctgagggttttctaccactttccatggaagtccaaactcattgagggcatccataaacggatccggatcaaactcttcgatattgtaaacaccgtctttgtcccatgtctttgtcatgagcatcatagcaccgatcattgccggaacacctgtagtataggcaacggcctgtgatcccacttctttatagcactcttcatgatcgcatacattgtaaatatagatcgtcttctcttttccgtctttctttcctgtaaaaatacatccaatatttgtctttccttttgttctcggtccaagagatgccggatccggaagaacagctttcaaaaactgaagcggtacgatttcttttccttcgtacataatcggctcaatggatgtcattcctacattttccagacatttcagatgtgtcagatagctctgtccaaatgtcataaagaaacggattcttttgattcccggaatattcagtgccagagattcgatttcttcatggtgcagaagatacatatctttcattcccacttccggaaaatcgtattctctcttgatctccatcggctctgtctctacccagtgtccgtcttcccagtaagaaccttttgcagaaacctcgcggatgttgatctccggattgaagttcgttgcaaacggatagccgtgatctcctccattgcagtccagaatatcgatataattaatctcgtcaaaataatgtttcagcgcatatgcagaaaatactcctgttactccgggatcaaatccacttcccaacaacgctgtaattcctgctttttcaaatttctcacggtatgcccactgccatttatattcgaattttgcagtatcttccggctcataatttgcagtgtctacataatccactcctgtcgcaaggcaggcatccataattgtaagatcctgatatggaagtgccagattcagtactacgtccggtttttccctttcgatcagtgcaatcagttcttctgggttatctgcatccacctgtgcagttgtaatcgttccgttgtaggaagcctgcagtttttctttcaatgcctcacattttgaaaccgtacggctggcaatacagatcgcatcaaacactttactgttctgacaacatttgtgtacagctacacttgcaactccgccacatccaacaatcaatacttttcccatttttttatctccttctttcttgttttttcttctattaaacttgcagtgcaagtaaaaattctctgataatctttccggctactgctgtggaaactccacttggatcataaaccgggctcagttcattcacatcacatccgaccacgttgactccctgtgctgtctggatcacagcattcatcagttccacaaatgtgacaccgcccgcctccggagttcctgttcccggaaatacagacggatccagcacatccagatccagtgtgatgtataccggttttccctgcagtttctcaattacttctgccagtccgtcaagattgaacttatgcatcttcacatgcccttctcttgcccagcgaaactcttctctgtcaccggatcggattccaaactgatagatcctgtcatctcccaaaagctcccaacatcttctcagtacacaggcatgagaatattgaacgcccagataatcttctcttaaatctgcatgtgcatcaaagtggatgatatgcagatccggatatttctctgctgctgcacggacacttcccagtgtcaccagatgctctccgccgatcataaacgggattttcccgctgcttaaaataatctcggtacaatcctgaatctcagccagcactttttccgtatctccgatcggcagctccagatctccactgtcaaaaatcttataatctgtcagatcttttccctgatacggactgtaagtttccagtccataagactcattgcgaattgcctgacttccaaatcttgcccccggacggtaggaagtcgtggaatcaaaaggtgcaccgaacaacacgatctctgattcattatactccgcatcacatccgatgaacgtcattacatttttattcaacatcttttacaagctcctccacatacgccggtaatgcaaagactccgtggtgcactctcggcagataatattttgtatgaatcccccgcagattccaggaaactccatccaggtcattgagcggatggtatttcttagacgcaaatccgaacagccagtgccctgacggataggacggaatatgggcctgataaatcttactgatcgggaaggattctataattctcttgtgcattctctgacactgaaatgcctcttctgtataaaacggactttcatgctggttgatcatgatcccgtcttcatgcagggcattgtaacaattgccgtaaaattcctttgtaaacaatccctccgcaggaccaaacggatttggagaatcaatcaggatcagatcatacacattggatctggaacgcacaaaccgcagtccatcttcattatagattgtcacgcgatcgtcatccaggctgcttgcaatctgcggaaaatatttccgacagacttcaaccagaagaggatctacttctacgacgtctatcttctgaatggtattatattttgcaagctcccgcacacatccgccatcacctccgccgatgaccagcacattctctaccttcggatgtactgccataggaacatgcgccatcatctcatggtagataaattcatctttttctgtcagcatcagatctccgtccgctacgagaatcttaccaaattcttttgattcgagaacatcgattcgctgaaactcgctctgcgcactgaacagctgcttgtccacacggatggacagtttcacattgtccgtgtgttcatctgaaaaccacatttccatcacttttatcccccttatatcagaacatttaaatattcgattgccgcatcttcaggtcccgtcatggaacaccccttttctttggcatagagaatatactcgattacatcttttgtgatcttctctcccggtgccagaatcggaattccaggcggataacacattacgaactcactgcagattctgccttctgactcccggatcggcactgcctctttttccgcatagaaagaatcctgcggactcatgatgacctctggttcaatatattcctggctgagcatacccgtcttgtctttctgatatctgcgctttacttctgccagtgcacttaccagacgctcaatctcctggatccggtctccgatagacagatatgccagaatattcccgatatctccaaattcgatctgaatatcatactcatcccgcagaatatcatagacctcgattcccgcaagaccaatttccagcgtatggatggacagcttcgttgtatcaaaatcataaatactgtctccattgatcagctcttttgaaaatgcataatatcctccgatccgattgatctcttctcttgcataatccgccagcgccgccactcttgcaaaagattccttgccgcgcaacaccagatttcttctggaaatatccagactggacagtaaaagataggaaccgctggtggtctgcgtcaggttgatgatctgtctcacataacccgcatgcatagacggacctacaagcaaaaaggaactctgtgtgagacttccgcctgatttgtgcatactcacagatgccatatctgcccctgcctccattgctgaaaccggcagattctctccaaaataaaaatgtgttccatgggcttcatctaccagaaccttcatgccgtgagcgtgtgctttttttacgatagaacgtaaatcagaacaaattccgtaatacgtcggattgttcacaaatacagctaccgcatccggatgcttctgaatcgccagttctacctgagacactttcataccaagtgaaattcccagactgtgctccacatccggattgacatagatcggaatcgctccgcataacaccaatgcgttgatcacactgcggtgtacatttctcggtaatatgatcttatcccccttcttacagcaggaaagtaccatcgcctgcaccgaggatgtcgttccccctaccatcagaaatgcatgacttgcatgaaatgcctctgctgccagctgttctgcatctttgataacagaaaccggatgacacagattgtccagcggtttcatggaattgacatcaatactgacacagcgttctcccagtaattccaccagttctttatttcctcttccgtgcttatgtcccggaacatcaaacggtacgatccgcatccgccggaaccgctctaatgcttcatagatcggagcattctcctgtgataaattcttcatctttctttcacctcgcccttttttgtcaattcccctttacttctgaatgtttgtgatataaaaaaagcgcagaaaaacgtacgttacatctacattctttcttgcgcttgctatgcttctttatataatgccaatctcctgcttaagtacaggagctttgtcttttcttctaagtataagcactacagatataaaggttttcgagtctatatagcaaatattttacttttaatactcttattgaccgtttcacaagttgatgtgctgtttacgcaccggttataaagtaaccaacttataaaatttaagcttttaacttaatcaataatgcagcttctgctgcgttaaatatttgcatggaactctcaatatccgttcgttctccatacgaatctattatacgtgcataggtttcgaattgcaagaactttttcctgagatttctttcaatcagatgagtgcctgttactgttcacaccaatccccgcctatccatgcgcaatcgtcgtgcttgcgcacaaactaaatgaaggagatgcatttaacatctcctcttctctgtgataaaacaatctctcttttataagtttccccgcatacgataggttctttgactctgtatcgtatgatgttctccgcgcttcccgcttcgaatctcgtgtttttcatgatgctttccaagcccattttgaagcagtgtcttattctctgacttcagcacttcctgcggatattctcttgcatcatcaactgcaaaccaaaagcgcatcctctgtgctgcaaaccagctcgacaaccgcggggtatttaatttttcctctgctgaatgttcattgttataaatctgatactctgaacatacccagacaaatatcactgtcgtaattgccaaaatacatgttccaatcaatgcttccgtcataaccgtacactccttcctcttactttatagtataattgtagctctttttaattcaaaattcaatgttttcagatatatttatcttttaaattttatttttctcgctttacaaacaaaataactaattgtaattataaccatcattactgttattacaatcaaaatatcgggacgtacccaaaatgtaatctttcccgcaagaaatacacttgtcggaccgtccgatcctcctgtaatactgaccgtctcattggcgatctctgtatggatttcggcaaattccgactttatacgatattcctgatacatcagatatccggacagagttcccgataaaagggtcaaaataattaaaacagaacctatccagccaattttgaactctcttttaactgcattttcccgcaaaatttcttctgcgatttttttgtctctccctgatgcgcaaccgcctcttcttccgaaactccgttttcgatcatatccgaaattatttcttcataatatgcaagatacttctcccgttcatccttttttaattttctcagactgtatcgaagattcttgataaactgttccttcttcatttctcatcctcctctgcaatataatccaatatttttaacaactgtgctctgtctttgtcaaaatttttcagatactgtcttccctcttctgttagatgaaaatatttccgcaatcgattattgtactgtgtggtataggattttacttttccacccatctccaatcttcgcaaaataggatacaaagtggattctgaaatttcaatcagatcagaaacatcttttataatctggtatccgtaggaatcttcctttctcaatactgctaaaacacataattccaacaatccttttcttaactgtgcatccataaaacacctccctatacatgatactatatattgcatagtatataatgtcaatgccccgattttgattaacctctacattaacaaagtaccttcctttttgatgcaaatcaccttgacttcatcgaagcatttgctataatttgcttatagaattcctctgctgatgggggaaataactatgggaaaacgaacattatctgtaaagaatctgatgaaacttctctggaagatggaagatgcattatttatctcagtacccgcggggagaatgcagaggaagttccaaaagaactggtaatatttttgaaatttgtaaaggcagacctgaaagaaagtcaggaagatttccacgatatctatgttaagcagttgcagaattctatccgacatattaaggaaagccgtgaaatggaggaacgtttcatgattttagaagagatgttgagagatgagcgtgcggccggacgcagagaagagcgtcaatctatattacgcagttttttagaagattttggatctataccaccagaacttgaaaagaaactctttgaggaatcagatgcaactgttctgaaaaactggttaaaaattgcagctacatcaaaaagtatcgaagaatttatacaaaaaatccagtaattctttactggactgtcaagttatcttatgcttttgggtattatagcgggacatcccccatattcaaaagcatgtcacaacgcaatctatgcctgatcaggcagtacttatcaaaaaagatgcagaggaattctattgttttttaacaacaaagtgtacaagcactcttttcagaatgcccgtacacttttctttttacaacccttttgtaatctctctcgctacatacacaccactcgctgatgcatgggacagagaatgtgtcactccacttccgtcaccgatcacgtacagacctttgtacatggtctccagatgttcatccagttctacttccatattatagaacttgacttccacaccgtaaagcaaagtatcatcattggctgtacccggagcgatcttatccagtgcgtagatcatctcgataattccatccaggattcgtttcggaagcacaaggcttaagtctcccggctctgccgcaagtgtcggtctgacaaatccatcctcaattctgtcatgggtgcttcgtcttccacggatcaggtcaccgaatctctgcacgatcacaccgccgcccagcatattggacagtctggcaatactctctccgtatccgttgctgtctttaaacggctctgagaaatgctttgccacaagcagtgcaaagtttgtattttctgtctgcttttctgtatcttcgtagctgtgtccgtttacagttacgattccgtttgtattttcatttactacgattccgtatggattcatgcagaatgtacggactttatcctcaaatttttctgtacggtatacaatcttgctttcatacagttcatctgtcaaatgggagaacactgctgccggcagttctacgcggacaccaagatctacacggttggattttgtcgggatcttcatgtcgcgacagacttcttccatccatttacttccgcttcttcctactgaaacaatacacttctcgcattcatcacggtcttctccatgtgtcacgatatagccgttttctgtcttctccagcttgtccacatagtaattgaaacggaattctactttatcttttaattctgcgtacagattttccaggactacatagttgatatctgttcccagatgacggacagatgcttccaacaactttaatttattctgcagacacagctttttgaacttgcttcctgcagtggaatacatcttggttccttttccaccgtattccacattgatctcatccacatagcgcatcagatcaatggcagtgtcttttccgatatactcgtacaatgttccgccaaaatcgtttgtaatattatattttccatccgaaaaagctccggcgcctccaaatccattcatgatggcacaggtcttgcagttgatacagctttttaccttcactccgtcaatcggacattttcttttctccagaggatttcccgcttccagaaccgcaattttcagctgcggtgcatctttcaccagctcatatgccgcaaagattcctcccggacctgctccaataatgatcacgtcatactgactcatatgtttctcctttcgttacggtcattttactctcactgtttctattatagccaaccatcacgaaaaaagaaactgttttccggattcttatgaaatccttccgttttccatctgatataccttttccgccacagccatggtcgattctctgtgggatactaaaataacagtcttgtctttccccatttttttcagagatcttaagataatactttcattcagagaatccagattgctggtcggctcatccagaagcaaaagcggtgcatcgtgcagaaatgctcttgccacgccgatcctctgtttttctcctccggaaagggtatctcccaactctccgaccagcgtatcgtatccatttggaaggctttctataaattcatgcagagatgctttttttgctgcctctacgatttcttctctggaagcccccggctttgcgatcgcaatgttgttggcgattgaatcgtggaacagacacgtctcctgtgtcacatagctttccatatcacgcagctcgtttgtattgataccggacagttttctgtctcccattcggatcactccgctgtctacatcataaaaacgcatcagcagctttaacagcgttgattttccggaaccgctttttccatggattccaatccgactgcctttcggaatcgagatcgaatagtcttttaaaatctgttcttcttcataagcaaaatcaatgttttcacaattgatatctgcaaattctgcggttgcctgaccagatacttcttcaatctgcggttcttcttccagaagggataacacacgttctccgcttgccagtgtctgcatcagattgttcgacagactggacagagcaacaaccggtccgaaagaactcatcatcaggatcgtacagagcagtactgcgtcaaatccgatttcaccctgctgatgtagccacgttgtaaggaacagcattccaaaagagaaaatcaggatcaggacatttgttcctcctctttgtgttccttccagtttcttcatttctttctgtttcgcatccagttccacacttttgcgttccatctgctcttcccgtttttctccgcatccatactggatcgtctcatccagtccacgaagactatccagaacgaagctgttcagatccccgaaacgggtacgaaattccattcctttttctgaacctcgtctggaattccacatgggcatcagaactccgatcgcaagatatcccccaagggcgaacagaccgatcagcacatgatatcggaaaaagaaaatttccatgatcagggatgtcaggaatgcgattgcgatcggcgaaatcgtgtgtgcataaaatacttccagaagctcaatatctgttgtaatgattgagatcagatttcctttgtctcttccgtccagttttgcaggacagagctttctcaaaaccgcaaatactttgtgacggatcagtgccagcagcttaaacgcaatataatgattgcatgcctgctctccatagtgcagaattccacgcagtactgcgatcactgcaaggcagacaaacaatgtcgtcagagaagctccctgccatattcccataatctgcaggattccaactcctgccagtacggtgagaaagatcgcacaaagatatcctgtgacacctagcagaatcgccgctgccataacgtgcatcaggggacggatcagtccgatcagttttcccataatctgtattccacttcttcgcttcatgctcttccctcccttacctgacacaattcctgctgtttctgatacatatttgcatagcttcctgcttttttcataagttctccatgtgtgccgctctctgtaatctgaccgttttccaacatataaatctgatcagatgccaccacatttgcaagccggtgagagatgaacagaatcgttttcgtctttgccagctcccggatcacttccatgatctgatcctcactttccacatcaatattggatgccgcctcatcaaaaatatacatcggcgtatcatgaagaagtgctctggcgatggcaagacgctgtctttgtccgccggaaaaattacttccctgttcttccagcatcgtattcaatccattttgtgcctgcaaaaactcatacagatttacctgtctgagcgctgcttccatctgctctctcgacacagacggatctgccattttcaggttttcttctaccgttcccttgagcagataactgttatgtctcaccagagtaatcttatccatcagactggactctttgatttcctgaatcggcacattattgatctggatctgccccgaaaatgtacggttcttccctgtcaaaagtgccgcaatggtactttttccacaaccggacagccccaccagagagacaaattttccggatggtatggtcagtgaaatatcctgtaatacctttcgctccggctcataggaaaattccacatgctgcagtgtgacgtccatttgttcgccctcaatctcgtgctctccccgttttggctcttccatatccagaatcttaaaaatcttgtcacttgccgacattccgttcatggcaatgtggaagaaagaacccagcaaacgcagtggaatgaaaaattcagatgcaagcagaataatcgtaaacgcccctgcgagtgatacatttcctgccagatactctttgacagtcacaatcattccaattgctgccccgccatatgctacaatatccatcacactgacagaattaagctgcatagtgagcactttcatcgtgatcttacgaaaccgctctgattcgtcgtccatttctttggctttttgctcatctgcctgataaatctttaaggttgtgagtccttgcaggttctctaagaaactgtcaccaagttctgtatagattccccagtatttgctcagcagtttctttgcgaatttctgtactgccacgatcgacatcggaatcagcggtacacatacaagaagcacaatacatgccttgatgctgatcggtgacaataccgcaaacaatgtgatcggtgcaagcagactgtagaacagctgcggaagatatctcccataataaatctccagctgctcgactccttccgcagacacctgaaccacctcggaagtagataccttttctttataggccgctcccaaacgcagcagcttctcataaatctgctttcttaaaaccgtctttacatccgcacttgcccgataagaggcatatgcagctcctttttcgcacagaaaacgcgcacagattgccaggatcacaattcctgccgtttgcagcatcacctgctgatccaatgttttttcaaacagctgctggatcatatttcctgccgcaaacactgctgcgatctgaaacagcagtgcgatccactgccagaaaatattagctccgatatattttcccgagcccttcaacagcttgagtagtctcgtcttaatcatatgtttctttccttcccattctctttttttcttttgcagaagtgatcacgtgccggattgccatgattggatgataaaataacattctcggtccggcaaaccgcatcacatttcgaatttcttctctcatctgcggcttgtaacaatgtaccctgcagttactgcagaatgtctttgtctccataaacggacatttatccacacgcattgcggcatagtctctgagtttttcacactcctcgcacagtccatgatgtttttccacagttttatgttttttccggcaataaaggtggatcatcagatccacgatctgcttttctttttcccgtttgttctgcacttgctgactcttttttatatctttcatttaagccgcctcaattctgatcgtcttgatttttgtaaagaaatatacatatttaaaaaggatcagcagaagaataaaaatacgccccggcagattgctcatcataaaaaatgcacacatcagcattgcggatgccggaagcagaatacacagctttgtctttaatgtcatggcacgctcctttacaaagctgtccagatgatttttgtaaagcttcgtccccataaaccacttgtgaaatctttccgatcctcttgcaaaacaaaaagatgccaccagcaagaatggagttgtcggcaaaatcggcaggatcactcccactgctccgattccaagacataaaaacgctgctgccagccataacattttcaatgggttttttctcat

SEQ ID NO: 19 - DNA, 7686 bp, unidentified
  source 1..7686: mol_type = unassigned DNA
tcagtcattatttattctgcggattaccttacagggatttcccactgccaggcagttcggggggatatcctttgacacgacgctgcccgcgccgattacactgttatcgccaatggttactcccggcaggacaatgacgcctgtacaaatccagacattgtctccaatggtaaccggatgggtatattccagtccttcgatccgctgttttacgtccatggcatgttcttcggttatgatactgacgcccggcgcaataaaaacattatttccgatggtgatttttccgctgtccatgagcctgccattgacattcaggaaaaaattatctcccactgatgtattatatccgtatgtgcagaaaaggggctgctccacgacgcagttttctcccacatggcccagcagttcccgtatggcggcctgccgtgcttcacggtcaaggggatgtatattattatagtcatgcagcttttttacagtcacatcacggtctgccgccagttcaggatctcccggctggtaaagcatttccgcatgtgatttttctttttctgtcatagatttactccttccggttttcagatttatagtatttccttttcctcttcgtccgtttccttaaattccacacaggcagtgaataaatctgcctttatttcaatataaaagtttccctggcaggcctcggtaaagcttctcgctatggacagccccaggccgctgccgccgtcggtacggctgctgtcccctctggtaaaccgggccgtatagtcgattgtctcggaaagctcttcggcagaggtattcgtcacactggcagtcagaaggccttttttttcttccagggaaacatagactctggagccttccagcgaatactgcagggcattctggatcagattctggaaaacacggtacatccgctgtccgtccgcacggataaaatgctctccttcgggaatgcgggttcttacgatcacattggaatttttaatatcttcttccatatccgccagagtctgccgcagcagcttggcaaaatcaattgtttccgggttgacagggagttcgccggacgcggctttgctcacttcaaacacatcctgtaccatggttttcagcctctgggatttgctttccaatatggaaatatagtcttttacatgatccggtagctcttcctcttctttcagcagttccacatagctgataatggacgtcagaggcgtcttgatgtcatgggaaacattggcaatcagctccaccttcatacgttcgctgcggacctgttcatcaatcgcttccttcattccctcccgtacttcgttcatgcaggttaccgcatcatgaagatcggaatctgccggtaagttcaggggggcttccatatccccttccctgacggcatagatctggtctaccaaatcacccatatccctggcatcccgccgaagagaacgaatataaacggtctgcgccgccgctgcggccaatattgccaaggctgccgccgaccacaggatgacgccgttaaaggcaccaaaagatacccctttcccccataaaaacataactgtaaggagaagcgctgtcataataacggatatgacaggcagtttgcggaatcttcttaccagccgcttctggaacggatattccatttctttactggaaagattgcggcggattttcacgaacaggctgtttttccataccttactgttcaggcgggcatcgttaaccacaagccagataagccagaatacacagaggatcagcgggcgtaattccatcagtgataactgataataaatatcatgaaacaggtttccataattaagattttgggcttcagatgccgccatatcataagtcacaattaaggtggtatctaaaatcccggatactttggaattaactataggcaccaaataataaaccagaaccccaacaggaacaagcacagccaaaatcttgacttcataccataacctgcctgtaaaacgagccagtccgttccttacatccctgatatccttacggaagatgaaagcgatactcaaaaacagaaccgcagcgataaaactccgtaaaatccaagtgagtgaatttctggtatcctgcatggtttttactatttggtataacctgtttccaccggtataataggtatacccctgcccgtatacagcaacggtatactgtttggggtcctctgcagcggcaatggtaatcctggcatccttatatttatcgtccacggcgaaattttcataaccgggcacgaaccagcttccattatccgtatagataccattcccgtaaatatccagttctctgccgtccttttgaatatacaccttactgccgtcaaaataaagaaggaaattatatccttcgggaagaagatgttcttccccgttcagctgcagatctcctgcattactgtacagttctttatcatcataggtaattgtatacaaaagatttttacagtctttcagcatctcatgggcttcatcggccgcccttctgttttcttccttctgatcctgggatgacgttccggcaactgctgcatttgaactctccgcttctgcagaatcggtcgattcggaaccttccgaattctgtacagaccagtcggaggtattttccgcaacgacatcgttccaggctgattgttcgtcagacgcctctgccgccacactgtcggaagctccttccgaagatgttaccgtcacataggaagccgacgtcttaccctgatctccctggattccgaccaccgctatattaccgtcccctccgtatccaaaggattccaccccataataactgctgtaggaaatcccccttgtacggctgtcgttattccaggaaaaatccactttccctcctgaagccatggaaaggaaatcctccagataaccttccatatagaactggaaggcggaggtattctgataatccggctgaaatgcatccttcatatcctctgttgttatacctcctgcaatcatggcaataatgtgcagaagatttcccagaaaaagggtgagccccagaaaaaaggctgtaaagcctatccatcttttactttttttccattttgtatccaattccccataccacctttaaatattctggctctttcggattcaactcgattttttcacggattctccggatatgtaccataactgtattttccggggcataagcctcttcatcccatacacgccggtatatttcctcagcaggaaacactcttcccagattacgcatgaaaagctccataattttcgtctcggttgccgttagttttaccgcttccccgtccgcatacagaattctttcatcggtacggaatgtaagccggccgtttgtcagttcttccgtctgttccgaggcatggatgtctcccagcctggtatacctgcgaagctggcttttcacccgggccgccagctcctggggattataaggctttgtcacgtagtcatccgcacccatggacaaacccagtattttgtccgagtcttcactcttggcgcttaacacgataatgggcagatttcttttttcacgtatccgcattactgccgacaagccatccaggcggggcatcatcacatctatgatgagcagctgtacctgatttcccgccaggatatccagcgcttccattccatcataggcccgcaaaaccctgtagtcttctttttccaacagaatggcaatggccttcacaatctctctgtcatcatccactaccaatatacattcattcatatccggccagttcctcctttgagcttgtattcagtgtaattcagatgtcttacgaacttacggcgggaattcttacaaatatcttacattccaggattatccgcagccattttgtatcaaaataccgtctgttttcagtttactacagaacacctcgcggctcaatcaaaaaaagacagggtattctggtaattcaaaccaggataccctgtcactatgaaacatatcaataaaaagccctgttttacgatagaaacggacgcttaatcctcgtagccgttaggattctgagactgccatttccaggaatcggcacacatttccttaataccgtattctgccttccagccgagctccgcctccgctttgcccgcgtcagaatagcaggttgcgatatcaccggggcggcggtctctgattacataaggaatcttaacaccggtagcttcctcaaagttctttacgatgtccagaacgctgtagccctttccggttcccagattgtaaatgttcaggccggaattgtcttcgattttcttcagcgccttcacatggccttttgccagatccaccacatggatataatcccttacaccggttccgtcaggcgtatcataatcatttccgaatacattcagctctttcagctttccaaccgcaacctgagtaatataaggcatcaggttattagggataccattgggattttctcctatcgttccgctcttatgggcaccgatagggttgaaataacgaagcagtaccacattccattccggatccgctttctggatatcggaaagaatctgctccagcatggattttgtccagccataagggttcgtgcactgtcccttcggacattcctcagtgatgggaataaaggccggatccccgtaaacagtggcggaggatgagaatattatattctttacaccggctttacgcattacatccactaaagtcagggttcccgctatattattttcatagtactcccacggcttggcaactgattcgcctactgccttcagtcctgcaaaatgaatacaggaatcaattttttctttcttaaatacttcattcagggcatctctgtccagaatatccgccttataaaaaggtacatgctttcctgtaatcgcttctacacgctgtaaagatttttcgctggagttactgaggttgtctaaaacaactacctcataccctgcattctgcagttccactaccgtatggctgccgatataaccggcaccgcctgttactaaaattgccatggctgctcctatctgcgactaaaatcgctgttatcaggaaggggaaaaagttccttcaccctttccgcctgtccgccgtaaacacggcatctaatcattctaaaattaccataaaacctcaggataaacaccatctgctttcagctttgcaatggattccataacaaagggcttatcctctttataagttactccgaaccatttgtccttggaagaaagaacctcaacagtggctttgccctgctgcaaaagcttatctacttcaataggaaggaagcactccgacttcatgggattcttcggcacttcgttcgcaaagaagttattgacagcactctccagttcatccaggatacttgcggaaaagccccacatattcatggaaacaggagtgtccagcggaaggggaacccaggtggctccgtcatcttccgtataagcagcgccgtctgccgtttttacgatcttggtacgttcggcaatcgtcttcaggaatccgttttcatcagtcacacagcagcctcttgctacggaaccattgtctgtaagggtgtttcccagttcatagcctaccattgcgtaacggtatttttcgtcgtcctgatgcgtggtaagaaaatcgtataatgtctggaaagcgcttcttccgtaataatcatctgcattaatcactgcaaaaggtccgttcaccacacccttgcagcagagaatcgcatgtgctgttccccagggcttcactctgccgtccggaatgctgaagccttccggaaccttggtaagctcctggaatacatattccacttcgatatgcttgctgactctgtcgcctacgcattcccggaaatccttttcattttctttcttgataatgaaaacgaccttcttaaatcctgccctgacagcatcaaacatggagaaatcaataattttatgtccctgttcgtccacagggtcaatctgtttcaatccgccgtaacggcttcccattcctgctgccagaattaccaataccggtttgtccatatcctgctctccttctgcgtgctttaacacgcggcaaaaggcagtgaagcttgcgtccatcctgtgaagttgttggatcattttgtaaagtctgcaggcctgcttcactttaccctttcattttatccgggaaccagtacattccgcaactcttatttgttaggaagagctgtcaaaatgttaactcggtttcccttgtttttattatcctgccggcctgccgcaaacgcattctgggattgcagcgattgggggccggcgctataagttattatatcataagcacaaaagggaatcaaattcccaaaaatggctttttttgtcacgtttaattcgtaagacttgcatcgccgtcagccttgtgtccctgcggctcttggcccgccctgttatgtgccgtcgcaggctgccgcactgcaaggttcctgggcgggcacgctctcgctcggataactacgcagcggtactaaggttgcaaagaacgcaacctaaggaccggcgtatttatacggccctttcaggaatccttgcagtgcggcagcctgcgacggcacataacaggacgggccaagagccgcagggacacaaggctgacgacaatgcaagtccggaaagttatgagataaataattaaataattaattaatcagccggtgaccatatggcggaggatggggattttttcgaggaggagggtgaggaggagggctggtgtgatcaggagcagggttttgaggaggttggtccagatggagaaggtggggaaaaggagggccaggcgggggaccagcatccagccgaagatccagtggagatagtagattccaagggttcttttggcaacggcggtaattgctttttgggggatggggcgggggatggtgaggtctttgcagattaggaaaatgcctgctgcgaggaatacaaccgggaggtggcggtagccttgtacgaggaggattccgtcccaggcggggttctggctggtataggtctttacggcccacattcctgaaaggcctaaaagggatgacaggaggccgaggaggcgctgtctggtgaggctgccgcaaagggtcggggctgtgtgaagccaggctccgaacaggaaaaagccgagcatgttggcgtaggtgccgaatggattgagtatttccaatccttccagggaatatacgccaagcagaccatgggcgcagagggcgtcgagcagcatctgcagtccggtgaggccgttggtcatcagaatgccgtaggcggcgaaaaacagaatgatttttcttccatgggtgtgatcataggcgattcggaacaggggaaatagtatgtaaacggctaaaagtgcttcgatgaaccacaggtgtccggttcctatgccttccaggctgccgaaggcgaacaggtacaggaggatctggtttttaccgaaattggccactggtacctggcacagggcgcctatggaaaagaggtaaatcagtttccagagcacgagcactatgtagataagaagggttttgcggatgtgttttgacaggttcaggggcctggtaaaaagcagggctccgtttaccatgaaaaacat

SEQ ID NO: 20 - DNA, 9439 bp, unidentified
  source 1..9439: mol_type = unassigned DNA
ctacttttcttctatcttgatcttttccaggattttatttgctccgatcagaaccaggatcacatttcccggcagtggtgtctgcggatcaaaagagagatccattttttcaccctgcatgactccgactaccgtgatcccgtacttcttacgcacatccagctctgcaagactttttccttcccatctgcgtggtacggctatctccacgatgctgtagtcattggaaagctcgatccagtccacaaattcatttgctaccatgcttttggcaatccggctgcccatctcgatctcaggatatacgacagaatccgctcctactttttccaggatcgttccctgaagtttatctttcgcctttgcaacaaccagtggaatccccatctctttgcaaagaagtgttgccataatattggcttcaggatgctctgaaactgccacaacagccccgtccagatttcttgctcccagagcctgcagagcatccttatccgttacgtctgccttcattgcataagaaaccttatctgaaatttcctggatcttctcataagaatcatcgactaccatgacatcgcaccccattttttccaatgacaatgccacgcttcttccaaaacttcccaaaccaagtactgcaaattgcttattcatatctttccccttatccaatcataattcttccttccgggagagaacggaaatgtgtcgttctctccgcccttccggcaaatacaagtgccatcgtcaccggtccgatccgtccgatatacatcaggatcatcagcacgacatgactcgccctgcacagagacggtgtcaggtcggctgtcaaccctacggttgccatcgctgaagtcacctcgtacatcagattcaggaaatcctgtcccggttctaagatcgtaagcaccgtcactcctgacatccagaagaaaaaggtaaccagtgagatcgtaatgcctgaccgtaccaccgtttcatcgatcttacggttaaaacattccgtatcctttctgccccgcagtaccgagatcactgtgagaaccagcatggctgccgtagtcgtcttgataccgcctgccgttcctgtcggagatccgccaataaacattaacagacatccaaggagccttgaacccggccgcagtgcagactgagagaccgctgcaaatcccgcggttcttgtcgtcaccgactggaacagagatgccatcagcttcttcgtaactgaaaattctcccatggttgccgggttggaatattccagtaaaaagaataataccgttccaaataagatcagagacccggtcatgaccagcaccactttgctctgcagttccagccttgtaaacagccattttaacggtcttgttccccgttcccggactgctttttttatatttccaagaatatcataccacaccggaaatcccagtcctgatacgacgatcagaagaatcgttgtaaaattaatcaaaggtgaacccgcatacccgatcaggctgttgcttcccagcagatccactcccgcattacagaatgcagacactgaatggaagattccgtatccgacgccttttaccacaccataatcctgtacaaaccggatggaataaaagacggcaccgatcgcctccaccgtaaacgtccctttcagaacccggataataaacttcaccatcccggacatcgtatccagtccgtaagactgactgatcatctgccttcccctgaaactgatctttttcctaagcaacagaaaaaatgccgatgtacaggcgatcacgcccagtcctccgatctgaataagcaccagcatgatccctttgccgatcagtgtaaactgcgttgccggtacaaccgtcaccagtccggtcacacagacgcacgtaaccgcagtgaacagagcatccagaaacgaaattggctgccggtttgaaaatggcagccataacaaaagcccgcccgcaaggataatccccataaatccgagtgcaacgatctgcatcgtactgagccggagctttcgtgccgcccacccttcttcatctatatgaatttttctcatttctttcagatacactccttatcataataaaactctctatcatactagcacgttggacagggacaggcaagcaaagaagaaaaaggcgtgtgaaaaaacattcgtttcttcacacgctcctgttcaggtttttattcatccgtagattcaatctcacctgtaaatcctgcatcccggatcatcttcatcgtgtcgtcaattccctgaccacctgctgtcagataacctgatgcaaaaatagaatcaacaaccttgaataattccggctcaatccctttaaaataaacttctcttcccgcagcacaacggatatctgacttcgggatcatcagtcttgccaggcagagtaccttcatgcaatattccggtgtcagtcctgaaatatcgcggtctgcaagtcttgttccgggaatcggaagaaggaaattgatcggaacggactcaggggaaatcgctttcagatccatcagcatatctactacatccgctttgctctctcccataccgataatcccaccgctgcagatctcaaatcccagcccctgcaacattttaatattattgacccgctggtcatatgtgtgcgtggaacagatctcaggatagaaagaacggctgctgttcagattatggttgatccgatccaatcctgcttctttcagcatcttcgcctgcttttcggtcaggaatccgatggaacagcagatctgcgtattctttttcttcataatacgaatgcgttctgccaggtcctcaatctctgcatccgtaaacttgattccgctcagaccaatgcagtgccttgcaaggttcttttcatccaccagatcattatctccgtataatttctcatccgatacccggcggtacttctcgatcggtgcatgcgattcacaggactgggcacagtaggcacagttctgtgaacagtttccgctacgcacatttgtcagcaactgtacgctgacctttttccctttatattttgttctcaatgcatacgcacaggaaatcaggtcttccatctcttctttcggaagatcaaggatctttacagcttcctctctgctcaaggaacgctcctcgtcccagtctgctaataatgtatggatcatggatgtatctggcattgtttactgtaccttctttcatttagtatgatgtgagcggtgaaaagtctcaactgtaagattcacagattgcctcgtactgcacgctcccactggtattctagtataaaagtacagttttatattgtcaactatttcttgtatttagtttacatttatcttaaagatttttcactgcagtttccagttgtgtcagagccttttccagcgtctttcttgggcatgccacattgatcctctggaatccgcttcctgactctccgaacatttttccaccgtcgagccataatcctgcccggttttccacaaaatctttcaggttttcctctgcaattcccaatccccgaaaatccatccacaccaggtaagtaccctccgtcctggtcactttgatctgcggaatatgctcttccatccattcatgcaggaatgtgatattctctcccacatactttttcatttcctgataccattcttctccctgtgcataggctgcgatcaccgcctcgatccccggtgcggaaatctgactgtaaccggctgctgtgatctgctttgcaaatgcctcccggagtgcttcattcgggatcaggatattggatgcctgtaaccctgcgatattaaatgtctttccaggagatgtgcagataactgtaaagtctttgtattccggcttcagatctgcaaaaacctggtgctttccttcaaatacgaaatctgcatggatctcatcgctgaccacgatcactccatgcttcttgcagatatctcccagcttttccagttcttcccgtgtccatacacggctgactggattgtgcggactgcacaggaggaacagtcgaatcctcttttcaacgatctgccgttcaaaatcttcaaaatcaatcttataacttccattctcatcctgatacagtacattatttgcaacttctctgtcattggactcgattacttcccggaacggataataaaccggttcctgaatcagcacatagtctcccggttctgtatatgccttcactgccattgcaagtgcaaagacaactcccggtgtcttgagcagccattccggttcgatcttccagccgtgacgacgttccatccaggatcgtactgcatcaaaatatgtttcatctgtctctgtatagccatatacaccatgctctgcctgacgcagcagtgcatcctgaatataggaacttgtcttaaaatccatatctgcaacccatagcggaaggatatctgcactccttcctctctgcaccgcaaaatcatatttcaggcaacgtgttccctttcggtccacgccctgttcaaaattcagatttctttcactcatgttcttctcactttctgcctcttaccttgctgttctttcgtcagctttccctgttatgctttttgtcactctttcctgcaatttgtcgttcttttctgctcctgcaattcatcacatcactctgccagtgcctgttccagatctgcgatcagatcttctgcattttcaattcccactgacattctcagaaagtcttccgtgatccccagccgttctcttgtctcaaccggcacatccccatgcgtctgaagcatcggatacgtgatcagggactctactccgcccaggctttccgcataggagatcagctttacactctcaagaagttttctcgcacgcttttctgaatctactttaaatgagatcatacttccacagccgcttgcctgcttctggttgatctcgtaccccggatgttccggaagtcccgtataataaactgctttcacttccgggcggtctttcagccacagtgcaatcttctttgcattttcctgctgacgctccagtcgaacagacaaagtcttgattccacgcagtaccaggaaactgtcaaatggcggcagacaacatcccaccgtcttgtatgtataccgaagcttttcagaaagtcctttccctttgatacatacaaagcctgcaaggacatcattatgtcctcccagaaattttgtaccgctgtggacaaccagatctgcccccagagtcagcggtttctgaaaatatggtgtcagaaatgtattatctgcaatgatcaataacccatattcatctgcaatttctctcattgccgcaaaatctgtcaccttcatcgttgggttactcggagtttcaatataaagtgcttttgtttcttttctgatacttttacgcaccagttctatatctgaagtatctatataggaaaaggtcacgcctcttttttcaccgatactctcaaacattctcaccgttccgccatacaggtcttctgtgcagaggatatgagatccttcttcaaataattccagacataatccaatcgctgccattccacttgtgcaggcaatgctgtcatccgcttcttccaatgtcgacatcacactttcaagctcatgccttgtcggattgctctcacgggtgtagtcgtatccggtacttcttccaattcccggatgtgcaaatgttgccgtctgaaaaatcggaacagagactgccccgtaaggatgtccctccacaaggcctccgtttccgtgaatacatcgtgtctcaaatttatattcttctgccattttcactgcctccatcgtcctgcaggaacttcctctgcctgcttatttgtttcaccatcttcatcagatgtaatacattccctctacggaatcctgatacccctcaaatgcttccacgagatctttcagtgtaatatcttcaaggatttcccggttcttctcattgatcctgtctatgatcaaatgctggatcgcctcctgatctccccggagacctgacatatcgccttcttcgtcttcaagatagtaactgccttccagtgcttccacaatctccgccaccgtgatcagttccggcgctttttccaggaaataaccgccctgtgaccccttgatacttttcacaatatgtgctttacggagtcccgaaaatacatgctccaggtactgtgccgaaatatcatttctctgtgcgatacttccaagtgaaacctgctcagttcttgaatttacggcaagatcgatcaatgcacgcagtccatatctgctttttttcgataatttcattttttgccctctttcactcaattttgttgctcttaagataaacggcgggagtataactcccgccggatcatttctcagtttatgccttcatttttactgaattgccttaaatgcctcatccagatcctgaatgatatcatcaatattttcagtaccgatagaaagacggatcgtatttggtttgattccctgatccagaagctcttcctctgtgcactggctgtgagttgttgttgccggatggataacaagtgacttcacgtcagctacattggcaagcagtgagaacagctccagattatcgataaactcctgagcctttgctgcatctcccctgatctcgaatgtgaagattgatccaccgccatttgggaaatatttcttgtaaagttcctgctgcttcggatccggatctacagatggatgatggactttctctacctgtggatgattgttcagatactctacaactttcagtgcattctctacatgacgctctacacgaagggaaagtgtctcaagtccctgcaggaagatgaatgagctgatcggtgaaattgtagctcctgtatctcttaagaggattgctctgatctttgtaacaaatgcagccggtccgcaggcctttgtgaagctgattccatggtagctcggattaggctctgtcagtgacgggaattttcctgaagcctcccagtcaaattttccaccttcaacgatcactccaccaatggttgttccgtgtcccccgatgaactttgtagcggagtgaacaacgatatctgcaccgtactcgatcggtcttacaagataaggtgttgcaaatgtattatctacaacaagcgggattttatgcttatgtgcgatatttgcaagagcttcaatatcaactacatcagagttcgggtttccaagagtctcgatgtaaactgcttttgtattttcctgaattgcattctcaacttcttccagattgaagatgtctacgaatgttgttgtgattccgtagttcggaagtgtatgctcaagaaggttgaaagatcctccgtaaatgttctttgcagatacgatatgatctccctgctgagccaggttctcgattgtatatgtgatagctgctgctcctgatgcaactgcaagtgctgctgaaccaccttccagtgctgcaattctcttttcaaatacatcctctgtcgggtttgtcagacgtccgtaaatatttcctgcatctttcagtccaaaacggtctgctgcatgctggctgttacggaatacataagaggatgtctgatagatcggtaccgctcttgcatcagttaccggatccggctgctcctgtcctacgtgaagctgtaatgtttcaaatttgaattttctgtcttttctctctaattttgccattggtctgttctccttttatctttttattttgtctgttataaggtttcttctataataaatattctgtaacaatcttcgtatcacttactctgtgaagagtggtgtagagtagtatctgtctccgctgtccggcagcagggctacgatggtcttacctttgttctccggtctctttgcaagtgcgattgctcctgaaagagctgctcctgaagaaatacctacgaggattccttcatgctttgccagaagtttcgctgttgcaaatccttcttcgttatctgctttatatacttcatcgtaaacctttgtattcagtacatccggtacaaatcctgctccgattccctggatcttatgtgctccggcttttccttcggaaagaaccggtgaagatgcaggctcaagtgctacaattttcacatccgggttctgagacttcagatattcaccaacacctgtcagtgttccacctgttccgactcctgcgataaagatgtctacctttccgtctgtatcgttccagatctccggtccggttgtctctctgtgcatcttcggatttgccgggtttacgaactgtcccgggataaagctgttcgggatttcctttgcaagctcatccgcttttgcgatcgctcccttcattccttttgctccttctgtcagaacgatctctgctccgtatgctttcaggatatttcttctctcaacgctcatcgtctcaggcatggtaaggatgattctgtatccttttgccgctgcgatcgatgcaagaccgattcctgtatttcctgatgttggctcaatgatcactgaaccttcttttaaaagtcctttttcttctgcgtcttcaatcatggcttttgctacacgatcctttacgcttccagccggattgagatactcaagcttaacaagaatcgtagcttccagtcccagctctttttcaaggttcaccggctcaacgagcggtgtatttccgatcagtcctaaagttcctttataaatagccgccataatatatatcctctctttctttttcctacttggttggtatgttttatgagttgcattatacactgcgaatacctatctgtcaactatgttttatatgtttttttaaaccatttttatcgtacaccggtttcaccatacagagaatctgccaccgaaaacttctcacacatacttctgcacttaaaaagcagccgttcctgctcggaaacgactgcttctttcttcaccctaccttcaggcgaaacttctgtatctctttttcactggatactttctcgatgattccaccgagacttctcagtttttcttcaaatctctcatatccacgctggatataaacaatatcatccacgatcgtaataccgtctgttgcaagtccggcaatacataacgctgcccctgcacgaagatcgggtgcactgactctggctgctgaaaacttctccacgccctcgatcgtagcagaattaccttccaccttgatattcgctcccatacgtgcaagctcatcaagatacttaaagcgattctcaaaaatactctctgtgatcgtacttgttccacttgcaagtgcaagtactacaccgatctgcggctgcatatctgtaggataccccggatatggaagtgtcttcacctgcgtactcttcagcctgccctttgccactacacggactgcatcgtcaaactcttc

SEQ ID NO: 21 - DNA, 15736 bp, unidentified
  source 1..15736: mol_type = unassigned DNA
atgaaaaaaggaaataaatacggaacgcatagagtaatttcaccgaaaggagtattgccacaaccagctgataaactggataacaatatggacgaaatctatgataacgagattttgatcgatgtgcaaactctgaatatcgattcggctagttttactcagattgaagaacaagccggaggggataaagctaaaattgccgagatcatgctgggaattgtagagaaacaaggaaaacaccgtaatccggtgaccggttccggtggtatgttactgggaacggtggaaaaaatcggagatgctttagttggaaagaccgatctgaaagtgggagataaaatcgcaactttggtgtctttgtcgctgactccgcttcgtatcgataaaattaaagaaatccgggcagatgtcgaccaggtagatatcgatggtaaagctattttgtttgaaagcggtatttatgcgaaaattccgtcagatctgccggaaaagttggctttgtcggctctcgatgtagccggagctccggctcagactgctaaattggtgaaaccgggagatacggtattgattatcggtgccggtggtaaatcgggtatgttgtgttgctatgaagcaaagaaacgtgctggtgttaccggtaaagtaatcggtttgtgccatagccagagaagtaccgaacggcttcagaaattaggcttctgtgattatgtattctcggccgatgcaactcagccggttccggttatggagaaaattgccgaactgacgaatggtgaaatgtgtgatattacgatcaataatgtgaatattacggatactgagatgaccagcatcttgtgtactaaaaatgacggattggtctatttcttctctatggcgaccagttttacgaaggctgctttgggagcggaaggtgtcggcagcgatgtgactatgatcgttggaaatgggtataccaaaggacatgctgagattacactgcaggaacttcgtgaaagcgaggcattacggaagatatttacagagttgtatgcctgaatggtcgggattttataatcccgacgaattaaaaatatgtttttatggctagcagaagaaaagagtttttccctgaagtgaccgatgaacaatggaacgattggcattggcaggtgaagaacaggattgaaactttggatcagctgaagaaatacatccggctgacaccagatgaggaagagggtatccgtgagtcgctgaagacattacggatggcgatcacaccttattatctgagtctgatcgatcccgataatccttattgtccgatccgtaaacaatcggtgccgaccattgaagaattgcatcggtcaccggctgatctggaagatcccttgcatgaagacggtgattcacccgtaccgggactgacccaccgttatcctgaccgggtgttgttcctgatcaccgatatgtgttcgatgtattgccggcattgtacccggcgccgctttgccggacatcacgattgtgccactccattggaaagaatcgataaatgtatcgaatatatcgctaataccccccaggtgagagatgtcctcctatcgggaggggatgccttattggtcagtgacgaacgattggaatatatcatcaaacggctgcgtggaatccctcatgtcgagattatccgtatcgggtcgagaacaccggtggtgttaccccagcgcattacgccggaattggtaaatatgcttcggaaatatcatccgatttggctgaatactcatttcaaccatccgaacgaaattaccgaagagtcggcggctgcttgtgcccggctggccgatgcgggtatacctttgggaaatcagtctgtcctgctccgcgggatcaacgattgtacacatgtcatgaaaaaattggtgcacgagttggtcaagatccgggtacgtccctattacatctatatctgtgatctttctgtgggtatcggtcatttccgtacccctgtatcgaagggaatcgagattatcgagaacctgcggggacatacttccggttatgccgtgcctactttcgtcgtggatgctcccggtggaggcggaaaaattccggtgatgccgacctatctgatttctcagggccccaatcgggtggtgttgcgtaattttgaaggcgtggtgactacgtataccgaaccgacggattacagagacgaatgccactgtgaagagtgtgagaagcgccgtaaaacagaaggagtggctgagttgctgagcggagaacgcttgtctctcgaaccggcgaatctggatcgtaagacacgtaatctattggcgaaaggataaattatttgtgattttggatttaccgtttcattcgattgaaaggataaatccggaatcataaatgaaaatgctgaacagatgggttttgttgatgacatatccgattacaggagtctggcaattgtcggattggagaaaaatacagggaaaacagaatgcctgaattacatccttcgcaggataaaagattcggcagatcggttcgctctgacttcgatcggaattgacggagaaaaccgggatcaggtatgtcaaaccccgaaacccgagattatcgtgccggaaggaatgatattcgttacctcggagaaacattaccgggagaggaggttggtggctgaaatcatggaaatcgatgatcatcggactgctttgggacggttggttatcgccagggctaaaacttcgggaaaagtattgctttcagggcctgcggatactgccgggttgaaaagtctgatccggcatatgaaagatttcggggtacgaacgaccttggtcgacggggctttgtcccgtttaagcctggcgtctcccaccgttacggaggcgatggtcttagcgacgggggctgctgtttccgggaatattcgggaattggtgagacgtacccgttatgtttgtgatttgatcgatctggaagaggtggacgaagttttacaagagaggttggatgccattcaacaaggtgtatgggcggtcgggccggagggagaatgtatcgatctgaaattgccttctgtgtttatgctggagaaaagtggaaccgatctgctgcaatatgggcatcggatctttattgccggtgctgtgagtgataaagtatttcagtttttacgcgtacagaaacagaccgtagaattgatcgtccgtgattttaccagtgtttttgccgcacctgagtctttttatgcctttttacgtaagggcggaagagtacaggtgcttcatcgtagccggcttttggccgttacgatcaatcctcagtctccgggaggattacttttggattcgttgcgtttgcagcaagcattggaagaaagcttgcaaattccggtgtatgatgtgaaaaaaatagaaaaagtcggtaaaaaccgttgaggatatgattttaagggaagcgataagacaagtcaggggattccgttatatgatcgaacaattggatatctgttcggctgtaggccggagggtattgtatgatctgccctggctcgattcgaaatctcggttggaggccgaatttgaacgtattcaaaagatcatggtactttttgaacaacctgaaaatgaatcccggctggaacgtttgactggtaagctgatgcaggtgagagatatccgggggacgatcgggcggatggcgatggagcaagtgttggatgatcttgaattgttcgaattgaaaacttttgctttgtgctcggaagaaatcagggaacttgtcgaagaatggcggattgttttactcccggaactggagccggttgtacgtttgttggatccggaagggaatcggattcctcatttttatatttatgatacttattcggctgagctggccgggctgagagctgaaataaaacaaaagagccttcaaggggcagaagaacgggaattagaagcgttgtatgtacaaagtgtggttttggaagacaaggtacgcgaagagttgtctgtgcagttgagaccttatcacgacgatttgaaacaggctttggaagcggtcggattgctggatgtcgtattggcaaaagccagacaagcaataagaggacaattgactttgccgcaaattccggaagagggggaaatggtgttcgaaggtcttttccatcctcagatccgggagattttagaacaggaaggaagagcgtttcaggctgtagatttgaaattggaaaagggaacgacggtgattaccggagccaatatggccggaaagacagtgttgttgaaaagtgtgcaattggcgcaatacctgatgcagttcggtttttatgtacctgcccggcgggcgggtatgccgctcgtggaacaagtcttgaccagtatcggggatgatcaggatgaattgaacggtctctcttcttatgcggctgagatgttgcgggtggatgaaatgatccggcaagtcaggcagcgaagtaaaattttggtgctgatagacgaattggcccggacgaccaatcccgtcgagggacgggcaattgtgaatggggtagtggattttttgactactcaccgggtgatggctatggttactacccattatagcggaataacggccgaatgccgtaaattgagagtgcggggatttgtagagaatcgggttgaagggaatatgaccctgaaaaatatcaatgagtttatcgattattcactcgaagaagacagcggagaagaagttccccaggaggcgatgcgtattgcctggatgctggggatcgaccgtggagtgttggaacgggtggaaaattatttgcaggaagaaaatcctgattggaaaaagacagtacagtagaaagaaaatatatatgaaaagtaaattaggaatagattttgataaagtcggacatgcccgtgaaatggcccgtaagattgctgaccaggtgcaggattttgtggatggctatacgacagtggctgtcgaaaggacattgtgtcgtttgctgggtatcgacggagtggatgttcatgctgtccctctgccgaacattttggtagacgagctgaaagaaaagaacgtgttgggagaaggaattttattctttctgggtaatgtaatggtggaaaccggaatgactccgcaggaaatagccgaacaagtggctgccgggaaagtagatgtcacccgggtaccggtatgtactcccggccagcgggaaaaagcgttgcaaccctatatcgaggccagtatccgtcggatttccgacaaccggaaacggcgtgagaattatatcgcaacgatcggagagggagcaaagccttatctttatgtcattgtcgctaccggtaatatttacgaagacgtggtacaggcacaggcggctgcccggcaaggggcggatgtcattgctgtgatccgtacaacggggcaaagtttgttggactatgtaccctatggggctacgacagaaggattcggcggaacttttgccacccaggaaaattttcggattatgcggaaagctttggatgaggtaggagaagaagtcggtcgttatattcggctgtgtaattattgttccggtttatgtatgccggagattgctgtgatgggagctttggaagggctggatgtgatgttgaacgatgcgttgtatgggattttattccgggatatcaatatgcagcggacgttggtcgaccagtttatgtcgcgggtgatcaacggctttgccggagtgataatcaacacaggcgaagataactacctgactactgccgacgctgtcgaagaagcacatactgttttggcttccgatctgatcaatgaacaattggctttattggccgggctgccggaagaacaaatgggcctgggacatgcttttgaaatggatcccatgctggaaaacggctttttgtacgaattggctcaggcccagatgacccgggaaatttttccgaaggctactttgaaatatatgcctccgacgaaatttatgaccggaaatattttccgcggacatattcaggatgctcttttcaatatgatcggaatctggacttcacaaggtattcaactgttgggaatgccgaccgaagccatacatactccatttatgtcggatcgttatctgtcgatcgagaatgcccgttatatttttaataatatgaaaaatatcggagatgaagtggtctttaaagaaaacgggattatacaaaacagggcgaaagaagtgttggataaagctaccgttctcttggaaaagattgaacgggaaggactttttacagccttggaaaaaggaatttttgccgatatcaagcgtcccaaaaacggaggaaaaggcttggacggcgtttgtgccaagggaaagaactatagcaatccttttgtagagattatgatgaacagataacaaaaatcgtaaatcaaataaagattatgagcggaggtttatattcaacagaagggagagatttcgatcaaaccctcgatctgaaaaagataaaaccctacggggatacgatgaacgacggaaagacacagctgagtttcactttacctgtacctgccggagatgaagcgatagaggctgctaaacagttgatgaaaaaaatgggatttgaaaatcctcaggtggtgtttcatcaggaactgacgaaaggatatactttttttaattgttatggaaattgtgtacacacggtagattatagccatatctatgtgccgaaagtggaatcgaccaagtgggatatgggagagaccgatcagtttgtccgggaacatatcggtcggaaaattgtggtgatcggagctagtaccggaacagatgcccatacggtgggaatcgacgctattatgaatatgaaaggttttgccggacattatggtttggagcggtatgaaatgttcgaagccttgaatatgggtagccaggtgaccaacgaggaatttatcgctaaggctatcgagttgaaagccgatgctttattggtttcgcagaccgtgactcagaaagatattcatattaaaaatctgacggaactcgtggagatgttagaagccgaaggattacgggacaaagtgatcctggcttgtggtggtccccggatttcacatgagttggcgaaagaattggggtacgatgccggcttcgggatgaatacctatgccgacgatgtcgcctcgtttattgcgcaggaattggatcgaagaatgaatcattgaaaatatacaagctatggaaaaagaacaaatcagggaagtgattgccaggagagtggcaatggaactccacgatggagacgtggtgaatctgggtatcggtttgccgactttagtaccgaattatctgcctgaaggtgtcgaggtcattttacaaacggagaatggattgatcggtatggggccgactcctgctccgggagaagaagatccggacttgatcaatgccggcggtggagcgataacggctctgcccggagcggccagcttcgatagtgctacttcgttcggtattatccggggcggacacgtagatgtcagtatcctgggggccttgcaagtagatgagaaaggagatttagccaactggatgataccggggaaaaaaacaccgggaatgggtggagcgatggacctgctgatgggagccggtaaggtgatcctggccatggaacatacggcaaaaggaaatccgaaaatcctgaaaaaatgtactttacctttgacagccaaggggcaggtgaatatgatcgttacagaaatgggagttatggagatcacacccgggggaattgtactgaaagagatacatcctgagtttacggtagaacaggtgcaggcagctacagaagcaactctgatcgttgccccggatttaaaaaagatgtgctgaacgacgaaagcgtattgaaggaaatcacgatggaggatggatggtggatacctctagcccgaatcgtaaactataaattaaaaaaggtatggatttttcattatcaaaaaaagagatattgtttcagcagatgatcagagcatttgctgagaaagaagtaaaaccgctggcggcagaagtggacgaagaagagagattccctgtcgaaacggtagaaaaaatggcgaaactggggattatgggtatccctttcccggtggaatatggcggagccggtggtgataacgtattgtattctatggctgtagaggaattgtcccgggtatgtgcaacgaccggggttattgtttctgcccatacctctttgtgtgcttctccgatctatgaattcggaaatgaagaacaacggaaaaaatatttacccaaattatgttcgggagaatggatcggagcttttggtctgaccgaaccgaatgcaggtaccgatgcctctgcccagcagacgatggctgttgctgaagaggatcattatgtgctcaacgggtccaaaatatttattacgaatgcagcttatgcacacgtttacattgttatggcgatgaccgataagtcgcagggtacacgaggaatctctgcttttatcgttgaacgggattttccgggattttccatcggtaaaaaagagaaaaagatggggatccggggatccgcaacctgtgagttgatttttgaaaattgtattgtgcctaaaggaaatatgctgggtaaaccgggtgaaggatttaaaattgcgatgaagacgctcgatggcggacgtatgggaattgcttcacaggccttgggaattgctcagggagccatggatgagacaataaaatatgtgaaagaacggaaacagttcggacgctctatcggacaatttcagaatacccaatttcagttggccgatttaaatgccaagatcgaagctgcccgtttgttggtgcggacggctgcctggaagaaagacaggaaaatcccttactctgtcgattcggcacgggctaagttatttgctgctgaaacagcgatggaagtgacgacaaaagccgtacagttccacggagggtatggatatacccgtgagtatccggtcgaacggatgatgagagatgccaagattacggagatttatgagggaacctctgaagtacagcggatggtgattgctgctgctctattgaaataataatgttttccgcattgaacttataaaaagagaatacatgaaaatagtagtttgtataaaacaagtacctgatacgacagagatcaaactcgatccggtaacaggaacaatgatacgggatggtgtacctagcattatgaatcccgacgataaaggtggattggaaatggctttggccttgaaagataaatatggtgcgcaggtaaccgttattacgatgggaccgcctcaggccgacgatattttgcgtgaagcttttgccatgggagccgaccgggcgattcatttgagcgaccgtaagtttgccggtgcagatacattggctacgtcgaatgctattgccggtgctttacggatgctggatttcgacctggtcattaccggccggcaggcgatcgatggagatacggcgcaggtaggacctcagattgccgagcatctcgatttgccacaagtgacgtatgtcgagaatttggaattcgatggtgacaagttgtttacgatccgtaaatctaccgaagaaggatatcaaaccgtacaggtggaatctccctgtgtcgttactgttctggctacggcaaacaaagcgcgctatatgtctgtgcggggaatcgtagaggcatacgatcgggaagtggaaatctggaattttaataatatcagtgtggatgaagctaaattgggattgaacggttcgccgacgcgggtatggaagtcttttaccaaaggagctaaagcagccggaaaagttttcgaagtggaaccggccgaagctgtagatgttattatcgaaaaattgaaagagaaatttattatttaatacatgattttagaggaaaaccgggaataatccggtgaaatctaaagtttaaaatctgatgaagatggataaatctcaatataaagacgtttatgtattcgtagagcaacgggaaggagttattcagaaagttgccatcgaattattggggaaagcccgggagttggccgatagcctgaatgaaaaagtggtggcgatgttgttgggttatgaagtggagggtcaggcacaggaattgatcgcttatggggccgatgtcgtattgtgtgctgacgaacgggagctggtacaatataataccgagccttacgctcaggcgattacacagattgtacatgagcgtaaacccagtatcgtactgattggagcgacgacgatcggccgggatttgggccctcgtttatccgcccgtttagagaccgggttgacagccgattgtacgggcctcgctatctcggatgaacgggatttgctgatgacccgtcctgcattcggaggaaatctgatggcgacgattatttgtaaagaacaccggccgcaaatgtcgaccgtacgtccgggagtgatgcgcacgaaaccgaaagatgaacaacgtgccggaacggtagagaaggtgaatattcatttcgataagtcgaaatttaaagtgcggattctcgagacggtgaaagaacaaaagaaccgtatcgatataacagaagcgaagattctcgtatccggaggccgtggtgtaggtaatacggagggatttgagatgctcggaaaattagcggaaacgctgaatgccgaggtttcttcttcacgtgccatggtggatgccggggttatgcctcatgaccgtcaggttggccaaaccgggaaaaccgttcgtcccgatctgtatttcgctatgggtatttccggagctattcagcatttggccggaatggaggaatcggaatttatcgttgccgtgaacaaggataaatatgctccgatttttaacgttgccgacctgggaattgtcggggatgtgaaacagatcgttccgttgctgaccgagaggttggcaaacatccggaaaactgacaaataaaagcccggacatggagtatcaaaaattaatgctggaaaaacaagatcgtgtttgtctggtaaagatcaattatccggaggcattgaatgccttgaatacggtgatcttgcaggaattggaccgggcattcgatgaaattgcagccgatccggaaaccgatgtggttattctgacaggcgaaggacgttcgtttgttgcgggagccgatattgctgaaatgagtgtgatgaaggccgaagaaggccggcgtttcggtgagttaggggctgctgttttccggaaaatcgaactgatggctaagccggttattgctgccgtgaatggatttgctttaggaggaggatgtgaactggcgatggcttgtgatatccgtatcgcctcggctaaggcgaagttcggtcagccggaagtgggacttgggatcacgccgggattttccggtacccagcgtttaccgcgtttagtcggattaggtaaagccaaagagttgatttatacggctgcggttatccatgccgaggaagcttgccggatcggactggtgaacaaagtggtggaaccggaagaattgatgaatgagtgtatggctatggcaaagactattgctgctaaagcgccattggcggtccgttatgccaaagaagccatcaaccggggagtggaaacggatatggataccggtatcgtcatcgaaaacggtttgttcgggttgtgtttcgcaacgaccgaccagaaggaaggcatggaagcttttttatggaaacgtaaacccgaatttaaagggaattaaaatctttgtaatttaaatttatcgattatgaaaatatgcattgttggaacagggactatgggacatggtattgcccaggtatttgcccaggccggacatgaggtattgttaaaaggccgttctgaagcttctttggcaaaagctcacaaagctatggataaaaatctttccagaatggtggaaaaaggtaaattggaagccggggttaaagatcaggtattggccaggattaaagatacgatgaaatatgaggattgtgccgatgctgatttggtgatcgaggcgatagctgaagatatggctaccaagcatgagatattcaaattgttggacggtatttgtaaaccggaagcgatattggcaaccaatacttcttcgctttctataacggaagtggccgctgtgactaaccgtccggaaaaggtgatcggtatgcatttcttcaatcctgttccggctatgaaactggtggaagtgatcaaaggccggctgacttcggcagaggtgcatgatcaggtatttgctttatcgcaggaaatcgggaaagtgcccgtcagtgtcgaggaagctcctggatttatagtcaaccggattctgatccctctggtgaacgaaggcatcggtatattagctgacggagtggcgaaaaaagaggaaatcgatgccgctatgaaattaggggctaaccatcctatgggaccattggaactgggtgatttgatcggattggatgtttgtctggctattatggaagtgttgtaccgggaattcggtgactccaaataccggcctcatcctttgttgcggaaaatggttcgcgctaacttattgggacggaagaccggagtcgggttttatgactatcggaaataatgaggagagtcttctttaccgggatacgatgttggggaatatttccccaacatttttactttttccccactttctacaagctgcgattcttaatctgttgtatgtaatgtattgataattagtgtattttgttgattttgtgcttgtggcatcggatttgttctgtttaaggataaaatctaactctaaaaaataatagtatgaaaaagatcgtcattttaggaatcggagcttctatgttcttcctgggtagttgcgtagagagttctcagaaatataagtctttacaagcccgtctggattctttgagtacagtacatattatgcagaattccgaaatggagagtatgctggccgatttgaacgatatttctgccggaatgcaatcgttgcgggatgccgaacgtttattgactttggaaacaattaatgaaaataaagacaatagtaaatccaaacagcaattgaatcagctgaaaaaagacgtacaggctattaccgaggcgatcgcttcttataaagaacagatttccaaactcgaaggtaagaataaaagccagtcggccgagtttaagagattgattgccggcttaaatgcggaattggatcaacgtacacagaaactgaatgaaattactaaacaattggctgagaagaatcagcaattggcagtgaagaccgaggaagtcgctaatctgaccgagaatgtggaagctttggataaagccaataaaagtcagcaaatgacgatcaatgaacaggatatggcgattcatcagggacactatttgattggaaaccgcaaagagctgaaagaagctgaggtaatttccagacaagggattttctgtccgccgatcgtatcgtcacaagcacaaaaagccgactttaccgatttggatatccgtgagatgaaggtgatcccgttgaatagtaaaaaagcgaaattactttctgtccatccggctgattcctatactttggagaccggtgaagatggtaatatgaccctgaaaatcaatgacgaaaataatttctggaaacaaacaaaatacctggttgtgatgattgaataaaagcgggaataattttaactgagagaggcatacccaaaaagtatgtctcttttcttttttcacaacgattattcttgtcgggagagaaaataatgaaaaaaaactagccgaagatcatcaggatttttaaaagtgtatccgatgagaaaatcgctttcaatttgtcgatacttttgtatttcagtgttttaacactgcttactgagatgtttatttcctgtgctatttgctgattgtcgaggccttgaaaagcgagctgcatgacttgtttactacggggaggaagtttttctatttctgcgagaatctgcatggcgacgtctgcttctacaatgacattgaagatattgacctctttcagaggatggttgtttagatatttagcttgcagcttgcgggttcgcagccattcaagtgaaaggttatgaaccagcatatacatataattatcgatattctcaatatttttgttttttccttgtaattcccagaggcgtgcaaaagcttcctgtacaatatcttgggcagctgttttatcgccaaggaaacggttggctgcgaaacacaaagagacatacagacggttcactaagctttcgaacttggttgcagctgtatttcccgtttgatatgttgtgtttttatccatttttataacatccttttaaggaattgctctacaaatttaaaaaaaattataattccgttcatccttttcgttactgagttagtctttaatatgaattaagagaggaaaatgtagtaaaatagattcagatgaacagagaaagtttaaatatattgttaaaaaaagcctattgtcaacagctttctgaggaagagagggaaactttgaagttgtggttgggagagtcgggagaaaatgcagagatgtataaacggttgatgtcgggacagagcttgacggaatattcggattgggtgactggattcgacctttcccgggcgatggaagctatccggagtaaggtgaaacggaacaggcaaaggagaatccggaaatcagtaagttgggtggctgcctgtgtaatactctgtctgggcataactttcgttttttatttcacttcaatggattcagaacaggtattgacagaacaaatggctgctcagatacagcctggctcggcaaaggcgatattgactttaggggatggacggcaagtggctttggataaaaaacccattgaattgcttgtcaataaacaacaaatggtgacgggagatagtgcgaccttgaattattctattgtattgcccgcttctgagaccgaacagatacaacggcaggaagtggcagaatatcatacaatagaagttcctgccggaggagaatatcatctggttttggctgatggtacaaagatatggttgaatgcagaaagttctctggtatttccggttgaattttccgggaataagcgacaggttattttgaaaggagaagcttattttgaggtggtccggaatgaacatttaccttttgttgtgagtacagtctccggggtacaaatttgtgtattgggaacacagtttaatgtggaagcttacgatgaccgggaaagtgtaaagactactctggtggagggaagtgtagatgtacaggcagggggcgaaaaggtacgtttgattccccatgaacaattgcaatatcataaaaatactgctgaaatggaagtcagggaggtaaatgtacgggagattatcgcctggaaaaacggttggttcgtctttgataatactacattgggggaaattgtaaaaactttgcaacgttggtataacatagaagtagaatttatacgtcctgaattagaacatttgcgtttcaccggtgatttaagcaggtatgactcttttgatgctgttatccgaatgtttgaagatactaaaaaactgaatatgagtgtgatatcgaacagactaattgtcgatagaaaataa

SEQ ID NO: 22 - DNA, 12848 bp, unidentified
  source 1..12848: mol_type = unassigned DNA
caggcagggagtctgcaccttgaccatcatgtagccgtcttccagcatacgcttgaccgtgaggctgttgccatccttctggatgtcagcaacataggtcacctgaggcaggtgcagcttctcagcgatctgaggaccgacctgtgcggtatcaccgtcgattgcctgacggccgcagaacacgacgtcctcggggccgacgccgatcttattgacagcagcagcgaggatctggctggtcgcgaaggtatcagaaccaccgaactcacggccagagaccagaacagccttatcagcgccgcgggccagcagctcacggagcataccctcggccggcgggggacccatggtgacgacaacgacttcgcagccggtctcgtccttcagcttcagagcggcctccagagcgttcaggtcatcggggttggtgatggttgccatagaggcacggtccagagtaccatccgccttgacagccaccttaccggaggtatcaggaacctgctttacacaaacgattgctttcattgtaaatcttgcctcccttacttcagcagcgcgccggaaatgaccatcatctgcacttcgctggtgccctcgtagatctcagtgatcttggcatcacgcatcatgcgctcgatggggtagtcacgggtgtagccgtagccaccgaacagctgcaggcagcggcgggtcacgtcgcttgcggtgcgggctgcgatgagcttagcctgagcagcctcgacgctgtagcggacctttgcgccattcatagcttcctgcttcttcagagcggcagcgtagaccagatactttgcagcctcgatacgggccttcatctcggccagctcgaactgggtattctggaaagcggagatgctgcggccgaactgcttacgctccttgacgtaagcgacggtctcctgcagagcgccctcggcgatgcccagagcctgggaagcgataccgatacggccgccgtccagagtagccatagccagctggaagcccttgccgcgcacacccagcatacggtccttcgggatgcggcagtcctcaaagatcagctcgcaggtagaagaaccacggatgcccatcttatcctcagccttgccgacggagaagcccgggtcggtacgctccacgatgaaggcggagcacagcttggtgggacggcccttcttgtcgagaaccttatcggtaacagcgatgacgatgaacacgtcagcgtagcctgcgttggtgatgaagatcttggagccgttcagcacccagtaatcgccatcttccacagcagtggtctgctggccctgagcatcagtaccagcgcccggctcggtcagaccgaaagcacccagccactcgccgctgcacagcttgggcaggtacttttccttctgctcgggagtgccgttctcataaataggtgctgcgcacaggctggtgtgtgcggaaacgataacaccagtggtgccgcagaccttgctcagctcctcaacagccatgacgtaggacaggacgtcgccgcctgcaccgccaacggaggtggggaagtaaatgcccatcatgcccagcttgcccatcttctcgacggtctctttggggaagtactcttctgcatcaactttcttagccaggggcttgacttcgttttcagcaaactcgcggtacatcttctgcaccatctgctgctgcttggacagagtaaaatccatcgctatatcctcctaacggatgtttttctttcagcacagggcagctacactcatgtcctgtgcaaacaaattcctcccggccgttttcttcgggacgaccgagagaaatttcaaactaatttacagctcgtcgacaggggtcttggtgcggtctgcgttgtaaacgtagaagcccttgccagacttgcagcccaggttgccgccgcggaccatcttacggatgagcgggcatgcacgatacttgctgtcgccggtctccttgtacaggacgtccataatggcgaggcagatgtccaggccgatgaagtcgcccagctccaggggacccatcgggtggttggcacccagcttcatagcggtgtcgatgccggcgatgttggaaacgccctccatcttgataaaggcagcctcgttgatcatcgggatcaggatgcggttgacgacgaagccggcagcctcgttgacctggaccggctgcttgccgatggcaacggagatctccttgatcttctcgacagtctcagcgggagtgttgcagccagcgatgacctcgatgagcttcatgcggtctgcggggttgaagaagtgcataccgaccagaggacggctgacgcccttgccgatctcggtgatggacagagaagaggtgttggaagcgaagatgcactcgggcttgcagatcttatccagctcgccgaaagtggtctgcttgaccttcatatcctcgaaagcagcctcaacgaccaggtcgcagtcagcgcacaggtcttccttcaggcccggggtgatagcagcgacgatagcgtcagccttctcctgagtcatcttgcccttagcgaccagcttttcatagcccttcttgatctttgccagaccattctcggcccactcctgcttgatgtcacacagagcaaccgtgttgccctcgacctgagcaaatgcctttgcgatgccctggcccatagtgccagcaccgataacaccgatcttcatgggaaatctctcctttattatatcttttgaatgtagtgcctctccgtgcctcccctttccggggaggcgctgcagaggcgttatggtttagtttagttgttggtgaacactgccttgggcttcggcttctcacggctcaggaagcaggccatgccttccttctggtcatgagtctcgaagcagtcgccgaacagcttttcttcgacttcgacagccttctcgatggggaggctgatgccgtcgttgatcgccttcttgcagttgcgcacggcgatgggagcgttcttggcgatcttgttggccagcttcaggacattctccatcagctcagcctgcggatacactgcgttgaccaggccaatgcggtaagcctcgtcagccttgatgttcagtgcagagtagaccagctgctttgccatgcccatgccaaccagacgtgccagacgctgggtgccgccgaagcccggggtgatgcccagaccgacttccggctgaccaaacacagcgttgtcggagcagatgcggatgtcgcagctcatagccagctcattgccgccgcccagtgcaaagccgttgacggctgcgatgacggggatggggaagctctcgatcatcaggaacacatcattgcccagtttgccgaaagcctcgccctcggccttggtcatggtgctcatggagccgatgtcagcgcctgccacgaagctcttgtcgccttcgccggtcaggacgatgcagcggatggcggactggtcaactgcctcaaaagcagccttcaggtctgccagaacttcggggttcagggcgttcagtgccttcgggcggtcgatggtgatgatctcgactgcgccctgcacctcggtttttacaaatgccattgtgaaaacctccattcaggttatatcttattcaaaacagcccccggacaaggggcaagtctccggtctcgcccactgtccgggctgtatcaatatccggagtgacccttcaaagggaaattagtccatctcgacgatggttgcgcagcccatgccgccgccgatgcacagggtagccagacccttgtgagcaccacgatgcttcatagcgtacagcagggtgacgaggatacgagcaccggaagcgccgaccgggtggcccagagcgattgcgccgccgttgacgttcagcttgtccttatcgaagcccagagcctcgccgactgcgatggactgtgctgcgaatgcctcgttggcctcgaccaggtccatatcagcaacggtcaggccggtcttagccatgaccttcttggtagcagcgatggggccaagacccatgacctcaggctcgacgcctgccagagcacctgcgacccaggtagccagaggcttcacgcccagctccttggccttctcttcgctcatgatgaccagagcagctgcgccatcgttgatagcggaggagtttgcagcggtgacgatgccgtccttggtgaaagcgggcttcagctttgccagcacttcgggagcgctcagacgggggccttcatcggtatcgaacacggtatcgcccttcttgcccttgatgacaacaggaacgatctcatccttgaaagcaccgtccttgatggccttgtcagccttcagctggctgttgtaagcgaaatcatccagcatctcgcgggtgatggggctgtagccgtacttcttctgataggtctcgttggtgcagacgttctcagcggtcatgcccatgtgcttgttgaagccgcaggcatcccacagtgcatcgttgaccatggtatccacgatctcgctcttgcccatgggagcgcccatgcggtagccgtaacgagccttctgcagtgcaaagggagccatgtccatgttctccatgccgcctgcaaccacgatatcagcatcgcctgcctcgatcatctgagcagccatgttcacgcagttcagaccggagccgcagaccacgttgacggtgacggcaggagtctcgatgggcaggccagccttcagggaagcctgacgagcgacgttctggcccagaccagcctggatgacgcagcccatgtaaacatgatcgacctgctcgggtttcacgttagcacggttcagggcctccttgatgacgatggagcccagctctgcagcagggacgtttgccagagtgccgccaaacttaccaatagcggtacggcaagcagatgcgataacgattttcttcatgttaatagcctcctgaatttatacgtttcggggtttcgtaaaactatttatcaaaaagcccgagggcctttctgcattataaaaggtatcagaacatctttccttccgcccggagctgctccactttggcgtggatggcctcctctacgttgggcgtcacgaacttggagatgttgctgccgtagcgggcagcctccttgacgatggtggaggaaaggtagctccacttgatgctggtggcaaggaacatcgtctcgatgccgggcatcagtgcgtggttcgtctgggcgagctgtatctcgttttcgaaatccgtcaccgcccgcaggccccgcaccatcaccgaagcgtggcgcttcttggcgaactccacggtcaggccgtcgaagctctccaccgtcacattcgggatgtccttgcagcactcccgcagcagcgccacccgttcttctacggtaaacagagggttctttgcgctgttgatgagcactgccacaatgagccggtcgtttatctttgcagctcgcttgatgatgtcgagatgtcctctcgtgaccgggtcgaaggaaccggggtaaactgctgttgccatcagtatggtctcctttatttgcgcgctttggaaaagcgcatttggtgttgccatgatagcacttttcagtttctgcttcaagtaccaggccgcatcgccatcgcaatatcgttaatttttagtcaatcaacgtcgcactggggcgcatcatcttggtacacccttagtaaaccatatcgtcaaaattttatcaagtactttttcgaaaaaaattgtttttgctataccaaacaatcgccacaaatacctaagaaatttagtcaaattgtccttcgagacattttttcgcggaagagggcttgattataatgtttgttaatgttataactaagctgtgcaggtgtgccgctgccggaggcttctgccctgtcgaccccaaggataccgccggggtgtgataagacagtgtccggactggaaagaaacggtaaatttccggctaagattttgtcccgtagaattgtgaataataaatttacaattcttttatgttcttaaaggagaggatggtttataatggatttcatggaaatgtatgcccagaaaaagatgactgccgagcaggctgcttctctggtcaagagcggcgactgggtggattacggttggtgcgtcaacacccccgtggccgtggacgccgcccttgccaagcgcctgcccgaactggagaacgtcaatttccgcggcggcatcctgatgtgggtgcctgagatcttccagatcgacgaccccgctgcccacatgacctggaacagctggcacatgggcggcatcgagcgcaaagccatcgcacagggcttctcgttctactcccccatccgctattcggagctgccccgctactaccgcgagagtcccgacccgctggacatcgccgtcttccaggtgactccgatggacgagcacggctacttcaacttcggccccagcgcttcccatctgggtgccgtctgtgagaaggccaggaagatcatcgtggaggtcaacaccaatatgccccgctgcctcggcggtatggagaactgtgtccatatctcccaggtcaccggcatcgtggagggcaacaatccgcccatcggccagatggccgctgccggccccgcctccgaggtcgatttgaaggtcgcaaacctcgtcgtgccgcaaatccccaacggtgcctgcctgcagctgggcatcggcggtatgcccaacgccatcggcagcctcatcgcccagagcgatttgaaggacctgggcgtccacaccgagatgtacgttgacgctttcgtggacatcgccaaggccggcaagatcaccggcgcacacaagcagctggacaagggccgtcaggtctatgccttcggtgccggcacccagaagatgtacgactacctcaacaacaaccccgagtgcatgtctgctcccgtcgattacaccaacgacatccgcagcatctccgcgctggacaacttcatctccatcaacaatgcggtggacatcgacctgttcggccaggtgaatgcggagagcgccggcgtcaagcacatttccggtgcaggcggccagctggacttcgtgctgggcgcatacctttccaagggtggcaagagcttcatctgcctgtcctctaccttctttaataagaagaccggtcagctcgagagccgcatccgtcccacgctggaaaacggcagcatcatcaccgatacccgcgccaatctgcattacctctgcaccgaatacggctgcgtcaacctcaagggtctgaccacctgggagaaggccgaagccctcatcaatgtggcacaccccgacttccgcgaggcgcttatcaaagaggccgagaagatgcacatctggcgccgcagcaacaaaatctaaacatcgccgtaccggctcctgccgtctgcggcaggaatggagtcacacatgatggacaaaaagccgcacatcaagccctatctctacggaatgctcgcgggctttggtgcgataagtctaagtatcctgttcttcttcttcatctaccgcttcgacgggttcggcgacgcggtctccaaggtgaccggcatcctgatgcccttcatctacggtgccgtcatcgcctatctgctcaagccggtgtgcaacaccattgagggctttctgcaccgcatcttccccgaaaagctccacagcatggccaatatgcttgccattgcggcgacgctgctgttcggtgtgctggtggtctacgccctcgtgatgatggtggtgccgcagctcatcacaagcgtcacctccctctactacaccgcgcagaccagcatcacccggttcatgcggtgggtgaacacacaggaagtcttcttggataatgagacactgatgggctatttcaacaatgcctacgatgccattgctgacaatctgaccactctgcgcaccaccctgctcccctcgctgcagaatatacaaggcatcctgagcggtgtgggcgtcggcgtcatgagtgtggtgacctggttcaagaatctgctcatcggccttatcgtcgctgtttacctgctggccagccgcaaaaagttcgccaagcaggccaaaatgatcctctacagcgtcgtcaagccccactgggcgcagctcatccaggaggaagtcctctacgctgacaagatgttcggcggcttcatcaacggcaagatcatggactccgccatcattggtgtgctctgctacttcgcctgcatcatcttcaagttcccgagcgcactgctggtgtcggtcatcatcggcgtcaccaacgtcatccccttcttcggccccttcatcggtgccgtgcctgcaacgctgctcatcctcatccagagtcccatcaaggccctctggttcgtgctcttcgtgctggtgctccagcagctggacggcaatgtcatcggcccgaagatcctgggcaacaccaccggcctttcgagcttctgggtgctcttctccatcctgctgttcggcggtctgtggggcttcgtgggcatgatcgtgggtgtgccgctgttcgccgtcatctatgacgtcatcaagaagctggtcttccacggcctgcgccgcaacggccagctcgaccagatgaccgtctaccacgacgagttcggcgatcccggcgacccggctcccgcacctgtggaagatgaagaaaccgaaatcgttatggattccggcgaagaataaaataacaagataaagcccccatcctcccggctgcctcagccggtgaagatgggggcttttctgcgcaattttatctttgaaagaccgataaagtcatttcgcgtgagcagtggaatgtgccggttcccaatccttgtaattctcgtaccggctctccctgagggtgacgtgcgaccagatctcgtcggccacaggctgccagtcggccgcatatgcactgcatttgtcgcagagatggtctacgctctcgggcgactgcaagtcggtgctgtgagcaccggtgtcatgcaccatctggcgcaggagctcggggttctccagcatcgggcagggacgcaggtggtttttattgaagggctggccgttgtggtaggccatgaagagcgggctgcggagaatatcgaggatgctgctgtcgtggatgttggcgttggagtagtggatgaagacgcacggttctgcatcgcccgccgagttgatatggaaatagtttcgtccgcctgcgatgcatccgcccacaaactcgccatcgttctggaagtccatcggatagaacggaatatcgctcttttcggagcggagataccggatgcgctcgatcatgtacttgcgctgagcaggcgtgggcatcagctccggcgcggcctcgttgcctaccggcatatagtggaagtagaacccgaagtgcgcacccttgtcgcagagcatccgcataaagtggtcgctggtgacggcttcgagattgtctctggtatagcagatggaggtgccaaaaaggatcccgtgggccttgagcaagtccatcgcattcatgacagcggcatagtggccgtcgccccgccgggcatcattggtagagggagttccctcgatcgagagcatgaaggcgatatttcccagttttacgacctcttcacagaatggctcatcgatgagggtcgagttcgtgtagatcgcaaactgcacgtcgttgtgcttttttgccagacggagaatatccgccttccgcaccagaggctcgccgccggtgagcatatagagatagacccccagctccttgccctcggtgatgattttgtccatatcctcaaagctgaggttgtttttgtggccgtactcgcccgcccagcatcccacgcagtgcatattgcaagccgaagtggggtcgaacaggatcagccacgggatattgcagtggtactttgtgcggttctcgcggatggtctttgtcccccggaagaacgcctcatagccaaggttgagcgccgtggtgcgtgccacgttgggcgcggtctggtcgagcacacagttgatgagctttgaccacttgctgtcctcatcggtcagcactgcgcgggcgtgctcatacgtctcctcgctgaacgagtctccatagaactgctttgcgacgtccaccatctcggcaaacgccttctgacggtcttttctggcatgagccagtgccacatccaccatcgttccgacagcggtacgctgtaccttatggctcaacggctccaacgcgatactcataaaagtctgcctccttgtgtgggtctttgccggccctttgttttgacaatactttaacatttttccgacaaaggttctataaacaacaaaagcagggtgatagtttttctatcatcctgctctgcttgttcaaatttttatcagtcgtcgatttttgatgctctgccgtcggtgctgaagcgcagcagcgcccgcttcagatccccctgcatcatggtgttgagccgttcggccatgatggctggttcggtcttcatatcgcggcgtatccattccagcaccatgcccacaaagccatacttataaaaatcaatgatgaactgcttgtcctcttcctgcaccgggatgttttcacgctctacaaacatccgcagcagagggtcaagcattttatagaggtactgctccacctgttcccggctgatggagcggtagacattcagcaccagcacccggttggcctgcaccttttccagcatatcgcggaaggcgtcgctccacgtctcaaagtcctgatggccttccagtgcctctgtggcatcctccaccaggatccagtccaccaggtcgtatatatccttgaaatggtagtaaaaggtcatgcggttcacaccgcagtcctcggtaatgtcgtttatcgtgatcttattcagcggcttgcggagcagcagctttttgagcgatgcttccagcgcgcgttttgtcgtctgtgccacgagaatgcccatcctttcgcgtttgccccgttcggtgcggagtttcccgacttctatctattatgatacctcatctgcccgtgcaggtgcaagcacctttttcgactttttcatgaactttttatgttttcttaagattcggacaacaaaaaagcctgcgccgccgcagcgcgtctatcaggagctttccgaaaagctttgacattttccggctttcctcttgatttctcccccggccctgcttacaatggagacacagaggggggcatctcccctgttcttttgattgggaaagaggttttttcttatgctgaataccatcggtttcttaggctgcggcaacatgggcggggctatcgcccgggccgtttgcaaggcggcagacccgcagaacgtctggctggccaaccgcaccgccgccaaggcagaggctctggccgctgagctgggctgcaacaccaccatcaacgacgaggtggcaggccgctgcgacctcatcttcttagccgtcaaaccccagatgatggaggagctgctggcaccgctccgcttcacgctggccgaacggcccagccgcttcgtgctgtgcagcatggcggcgggcctgtccatcgcccgcattcaggagatggcgggcggcgactgccccgtcatccgcatcatgcccaacacgcccgcttcggtgggggccggtatgatccagtactgcacctccaacgtcaccgccgaggaagaggccgagttcctgaaattgatggcccccgccgggcggctggatgctgtgccggaaagcctcatcgacgcggccagctgcgtgtccggctgcggcccggcctgggtgtaccagttcatcgaagcgctggccgacggcggcgtggcctgcggcctgccccgtgccaaggcgcaggagtacgccgcccagatggtcctgggcagtgcaaagctggtgcttgagagcggccagcaccccggcgcactcaaggacgccgtgtgcagccccggcggcagcaccatccagggcgtgcgggtgctggaagaaaagggcctgcggggcgcggtgatggacgctgtcatcgcctcctacaacaagaccaaagagatgggaaagggttgatctatgcgcatcgtagtcaaagtcggcacctccacactggcccactccaccgggcggctgaacatccgccacaccgaagagctggtgaaagtgctcagcgatttgaagaacgccggacatgaggtcatcctcgtgtcgtcgggtgctatcggcatgggtgtgggcaagctgtcgctttccgcccgccctaccgatatgtcctccaagcaggcttgtgccgccgtgggtcagtgtgagctgatgtacacctacgaccggctgttcagcgcctacgaccacacggtggcgcagattttgctcaccggcgtggacatcgagcacgccagccgccgtgagaacatccagaacaccctcacccgcctgctggagctgggcgcactgcccatcatcaacgagaacgacaccgtcgccaccgacgagatcacctccatcggcgacaatgacaccctcgccgccattgtcacctgctgcatcaaggccgatctgctggtgctgctgagcgacatcgacggcctctacactgccaacccccacacccacccggacgcaaagctcatcccgctggtggaggacatcacgcccgaggtgatggcgctggccgacggagccggttcggcgctgggtaccggcggaatgtccaccaaactccgggccgcccggatggtgacctccagcggagctgacatggtcatcgcaaacggcgcccaccccgaactgctctatgacatcgccgagggccgtgccgtcggcacccgctttgcggcccacagacaggaggcataa

SEQ ID NO: 23 - DNA, 14185 bp, unidentified
  source 1..14185: mol_type = unassigned DNA
atgtcaaacatgcaactcggagaggacactaccaccatgtcgatgaccctgaatcccgtcaacgaagccgcttttcagaaagctgtacagtctctggagaccctgaaccgggccgccgtgttccaccccaccggcaccggcaaaagctgtattgcctggaaggtggtggaggctcacccccagaccacctttttctggctggtggccggtgcacagcgtctggccctgcggcaggcagagctgacacgctacaacggcggcaccctgcccggcaatgtccgcttctgtgattgcgaaaagctggccgctgccaccccggagcagtgggtgcggctgggggagcagaaacccggctgcatcgtgctggactgctaccatgagttgagcgccgtgtgctgggcacagtcggtgcagaagctgctgcggatgtgcccccaggcaaaggtgctggggctgggtgtgcccaacggtgcccccgtctgcgccgccgcgcaggagctgtttgccgactgcatcgtctcccacatgactgtggccgaggccatggccgccgggaccatgccagtgccttcagcctatgcggccctgctctggcctcaggaggaggagctggccaccctgcgcgcccggatcaaaaacctgtgtatgcccaagggcgacacctccctgcgcgttcaatatgaagagctgagctggtctctgcgtcaggtggaaaacctgaccgttctgctgccccgcctgctcagcgataccagcggccattatctggtcctgtttgaatccgccgcctatcaggaaaagctgggcacggagctggaacagctgctgcgcactgtggaccctgccgtccgcttttacgctgcagatcacgcctgctttgcggattctgctgctgtggagaccttcctctctgatacagcccccggccccaaggtcctgctctgcgtcaacgcgccgggggtccagcagccgctggaggggctggccggggtcattctggtgcgccagtccagcctgatgtccaccttcaagcagatgctctgccgcgcgctggtggctgcaagcagccgcagcgtgccggtgttcgaccttgtggcgcagttcgagggactgggcaacggccgtaccctgcagcgggactgcaccgaggccatgaccagagccggcagtaaaacgccgggcttccggcaggagcgccccatgcagcagacctaccgcctgtatggcaagctgcgccgggagatggaagcccgctgggaggtgctgtgtcaggctgccgccgatgccgccgccaaagagggcaccttggagctgccccggagctataccatccacagcggcgtgcccgtgggcaagtggctcgagctccagcggcaggtacaggccgggcagcgcccgggccgcctgacagctgagcaggccgccaagctggaaaaactgggcatccgctggaaccaccggctggaagctgcctgggaaaagggctttgcctccgcacagaaataccgcaccgagcacggcgacctgctggtgccggtgcgctaccgcgataaaaatgattttgcgctgggcgaatggattgtctacaaccgccagcgctatctgggcggcaacctgacccagaaccgcatcgagcggctggaagccatcggcatggtgtggagcacctccaacgatctgtgggagcagaactatgccgccgccactcagtattatctggagcacggtgatctggaagttcccatcaagtacgaaacgccctctggcttcggtctgggggtctggctgggggcccagcgcgccgctcacaaggcaggcgagctgcctcaggagcaggtggagcggctggacgctctgggcatggactggaccaaccgcaacgaccgcaagtggatgtccctgtacgatgttgccgccgcctactaccatgagcacggcaacctgaacgtcccctcggagtatgtcacgccggacggagtactgctgggcaagtgggtggcgcgccagcgctatgcctacctgaacccggaccgctccagcgcccgggtcacccctgagcgcaaggccctgctggacaagctgggcatggtgtgggaaaagtacgacccctggcaggagcgctatgatctggctctggcctacaagacagagcacggcgatctggagattccctctgtctacaagaccgcggacggcgtttggctgggcagctgggtcaaccgccagcggcaggccctgaactccggcagcagcgccctgagcagtgagcgccgcaagctgctgcgcaccctgttcaagggcgagcgccgccccagtgattccactgctgaccacggcaccgtgcgcgaggccaactgggagcggaacttccgcagtgccgcccgctatgcccgcaagtacaagcacctgctggtccccgccagctatgtggacagcgatggtgtccggctgggcgtgtggatctccaacctgcgtgcagcccgcaagaaccgcccggattcctatcaggtcacgcccgcccacatcaaaaagctgaacagcatcggcatggtatgggatgcccgggatgccaagtggggaaccgcctatcagcaggcaaaggcctactacaaggcacacggcaacctccacgccgccgccaactacaaatccgacgaaaccggcttctgcctgggcgactggctccgccggatgcgggagtgggataccacccacgaccccaagctcacccctgagcgccgcgcaatgctggataagatcgggatggagtggagcgaataagagaaaagagccaccggtttttgccggtggcttttctgatgcagattacagctgatccagctcctgctgcagctgggccagcgcattgcggatgggcagatgctgggggcaggccgcctcgcacttgccgcagcggacgcagtggctggccttttcggcatcggggaagtaggcttcccactggtgcttgatggcctcaggctggccgaacatccccagcttgttccagatgctgaagttgtccgggatgtccacccccatggggcagggcatacagtaccggcagccggtgcagccgaccttgatgcggctgtgcaggaaggcggcggtctgctccaccgcggcggtctctgcagcggtcagcggctcaaagcgggcaaaggtggccaggttatccgtgagctgatcctcggcgctcatgcccgagaggatgacatggacgttccggtggctgcccacccagcgcagggcccaggaggcatccgaggcctcgggccgcagggccttgaggggtgcttcggcctccgggggcaggttggccagcgtgccgcccttgatgggctccatgatgatgagggggatgttcagctcctcggtcagctgatagccgcggtcacccgagatctcctcggcacggtcatcggtgtccagatagttatactgcagctggcagaaatcccatggctgatcccgcaggatgtgctcaaggcccgccgcgttgtcgtggcaggagaagccgaagctgcggatgcggcccagctttttctgctcccacagccagtccacgatgcccatttccttggcccggtcgtaccgggcggcgtgcagggagtgcagcaggtagaagtcgatgtactccacgcccagccgccggagctgctcttcaaagatatgctgggcctcctccaggctcccgcactgccacagcggcatcttggtggccagataaaagctctcccggggccactttgcaatgaccctgcccacaaagggctcgctctggccgccgtggtaggggtaagcggtgtcaaaatagttcacgcccgcgtccctcgcggcgttcagcagcgcttcggcccggggctcgtcaatggctccctccggtgtggtggggaaccgcatacagccatagcccagcagggaggtgcggatgctctcccctgcgctgttctgctttttccatgctctgtattccatctctttcgtgcagctggctgccgtgttccagccgcgcctccttttgtccccagtataccggaaaaatcccgcgctgacaagaaagatgttccgcttcttgttctgccgccggaaatatggtatacttataatccaaattttatcatgttatcaactaaatcagatagcgctaaggagtatcatggaacctttcaacacccctttgaagatcagggagatctccctgccccaccgtgcagtgttcggccccatggcgggctttaccgatgccccggcccggcggctgatggcccagcacggagccggttttaccgtcagtgagatggtgtccagccgggcgctggtatacggcgaccacaaaaccgtcagcctgctcaaggccgaacccaacggtgccccctacggcgtgcagatctttggcgaagtgcccgaaatcatggggcaggccgctgccgccgtggagcagtacgcgttcgattttctggacatcaacatgggctgtccggcccccaagatcgtctcgggcggggcgggcagcaagctgatgcttgaccccgaccgctgcggccgtattgtggaggaagtggtcaaaaacacctcccgccccgtcaccgtgaagatgcgcaagggctgggacgcggagcacgtcacggccgtggaatgcgccaaagcctgtgagcaggcgggcgcggtgctcatcgccgtccacgcccgcacccgggagcagatgtacaccccgggcatcgacccgtccatcattgcggcggtgaaggatgccgtccatgttcccgtgctgggcaacggcgatatccgcaccgccgaggatgctgtgcggatggtggaggagaccggctgcgacggcgtgatgattgcccgggctgctctgggcgacccatggctctttgagcgggtgaacgccgcgctggagggcctgcccgcccccaaggagccgaacctgcaggcccggatgaacgccctgcgccggcaggtggaggagatggtggagcagaagggcgagttcgttgccatgccccaggcccgggcccagaccatgcactacatgaagggcctgaagggggccgccagcctgcggcgctactgctgtgagctgagccgcctctctgacctcgacaccctcatcgacgcggtgttcgagcagcagcgcagggccgcgcaggaccccgatgacacccgcgaggtgccgttcccgtaagcgggaaatttccgatactgaaaagaggactgacgcatgactgcatttcattcttcgccccggatgctgggacagaagcaggacaagttctggctcaccgtggggctctgcgccctgacagccgccctcatcttcctgccgttctatctgctggacggcggctttttccactatgcaggcgatttcaacagccagcagatcagcttttaccgctacatgaacggctttctcaagggggcaggctaccccgccggatacggaggcgtgaagaacaccttttcctgggcaactgacctgggcagcggaaccatgaacgcctattcgttctacctgtacggctcccccttcttctggttttccctgctcttcccgcagaactggctcccctacctcatggtgccgctgctggtgctcaagttcgcggtggcgggcggcggcgcgtatctgtacctgcgccgctacgtcaaagacccgaactttgcagtgctgggtgcggccctctacgccttttcgggctgggggctgtacaacatcttcttcaaccacttcatcgatgtgctggccctcttcccctggatgctctgggcactggatgagaccatctacgagcaccgccacggttggttcgccttctgggtggcggtgaacctgctcaacaactacttcttctttgtggggcaggtgctcttccttgtcatttacttcgtctgcaagctctccgccggggagttccggctcacgccccggctcttcggtcagctggcctttgagagcctgctgggcgtggcactgggctttgtggtgctctggcccactgtcctcagcgtgctgcagaacccgcgcaccatcgatctttcctccggctggggctttctgacctattccaagccccagcagtatctggccatcctgctgagctgggtgctgcccccggattccccttatatgacctccatctggtctgagggcatcatcaaatggaccagcatgacagcctatctgcccctgtgcagtctggccggtgtggtggcctactggcgtgcccggcagggcgacagcaaaaagcggatcattgccgtctgcacggtatttgcgctggtgcccatcctgaacagcgcgttctatgccctcaattccagctactatgcccggtggttctatatgccggtgctcatccttgcggccatgacggtgagcgcatgggaggaccccagcctcgacctcgcccgccccgcccggagcattgcctttgtgatgatcgccacgctggcctttgcactggtgcccgtgcaggatgcctccaccaaggagtggagcctgggcgtgctgcagaatccgggccagtactgcgccgtgcttgcctttggtctgggcgggctggccgtctaccattgcatctgcaggcgctggcagcagcgcagggtctttgcccgccgcctgctggccggtgtgctggcgttcagctgcctgttcggcatcgtccacatcggcattggcaagttcggccagtggaacaccgacagtgaccttgtggagcagtatatcaacgcgctggccctgaaagaagatctgcccgagggggactggcgcattgacacctacaagacccacgacaatctgggcctgtggctggacaagagctgcctgcagtatttcggcagcaccgctgcccccagcatcctcagcttctatccggcactgggggtcaagcgggatgtgcgcagtcagcccgagctctccaactacgccctgcgcggcctgctcagcgtcagatacctgctgaccacgctcgcgcatcaggagcagttccgcgccgaggccgatgagggctggacgtattacgacaccctggacggctatgttctctacgagaaccagaactacgttcccatgggcttcacctacgattactacctcaccgaggcccagtacgaggataccgtgactcccacccgctccaacctgctcatgcgggcactggtgctcactgaggaggatgcggtggcctacgggcagtacctcacgcccctgcccacggcagagctcaacgacctgacctacacccgctacacccaggattgtgccgaccgccgggcctctgcctgcaccgcctttgagatgaccagcgcaggcttccacgctgaagccacgctggacagggccaacctgatgttcttctccgtgccctacgatgacggctttacggcctatgtggacgggcaggagaccgagatcctgcgggtggacgagggcctgatggccgtcctctgccccgccggaacagtcaccatcgactttgtctatcagccggacggcatccgcctgagccggactgtcacccttgccgccctgcccgtgttcctgctctacgccgggcactttgcctgggacgaaaagaaaaaacggaagcattaaaaaagccgccgctccaggaagcgacagctcaaagaaaagctcaaatgaaagaaggtatcctatgggcccctggtattacgaggtcgtcagctttgacggcgattatgtcaacctgcgccgcaccgacattgagagcgacgagctgaatcccgttgcgctggccctgctgccgcccgagatcgaggtgggcagcaaggtcaagtgcgagtattttcagtatgaggtgatcggctgagcctctccgtcatccctgcgggatgccacctcttctattagggaagctggtgcgaagcacctgagaggttcgccagcaccgctgccagcagcattccgatgggtgcgctgatccagctggacatccagaagcctgcaaaaccaatgcggggtacaaggatcacacaggccagcaggttcagggcgatctgccccaggttggaggccagatacagtcccatcttctgggcaccgcgcagacgggcctcgaacagatgcttctgtgccacaaacaggcaggtcaccgattcaaaagccagcatggtgcagccatagctggctgctgccgggtcggtggtaaagagccggagcagcggcccccgcagaccgatgcagaccgccaccactccaagcgaatacaccaacaagatccgccgcccttcccgcaggccctcttttacacggcccggctggagggcggctgtgttttgcgcaataaagaacactgtggactgcacaaagccgaacaccggcatcatcaacaggctggacagcttgcctgcgcaggagaaacctgcaatggcttccacacccagaccgcccagcagcccctgcttgaccgtggtgatgatggtgccgctggcctgctgaatactgttgggggccgacagccggaaaatatccctggcatagcgcgccttgagcatccggaacgagaaagccgcgtccatctgggtgcgacgcagaaacgctaccatgtagaccgcgcccgccacctgcgccgccgctgtggcagccgctgcaccggctaccccgaagggccccaccagaacaaggtcaagcacaatgttcatcgcactggtagccacaatgaccttgagcggcgttttggaatcgccgcagcccatgacacactccttgctcagatcgtagggcatcagaaatggcagccccatcagatagatgcgcccgtagagcacagcagtatccaggatctccgcaggcgtattgatcagccgtagcagagccggcagggtcacaaagcccactgccgtggtcaacagggcgatgacctcatccacgaacagcaggttgtacagcagctctgtcatctcacgctttgtggcagtgggcttgcctgccgccaccagcagaccaccgcccagctccatgccgccggagataaacagaaagatcatcagcaccgtggaagcgttggacactgccgccagcgcatcggcatccagccgcaggccgatgatcatggtatcggccacggcgtaaaactgtgttgccaccatgctcaggataatgggcagcgcgtaccgcagcagcgcaggccgcaccgccccggtcaatagagaattctcttcgttcacacaaacaacctccttttcacaaaaagaaaacccgcagggaacctgtcgctcaggccccctgcgggttctttttcagttgcgccagcaggagtcgaacctacgatgggggagtcaaagtcccctgccttaccgcttggcgatggcgcaccggtaagaatcagtatagtagaatttctttcatttgtcaagcaaaagcgttttttccctgtctgtacaaagtgttttaccatatctatacagtgtccttgtcatcatgcgatccgcttgctcattttccgctttattttcccaaaaagtattgacaccaccctcatagcatgataagatatcatcgattttgagagacaaagcgtgtcagagtcttttcaaagcaaattacctgggaccgcccatcggggctaaggccatacggacagccgggtccactgccgaccggcggcgcaagctgccattattgattgagttgaaagctcaaattttataagttggttcctttacagccatgaaattgcgcagaacgtgcgcagacttgtgaaacggtcaataagagtagtaaaagtgtaattgctatatagactctcgtcatcccgtctttttgaaccatgcgaaggttttccccagtgtcaccgggggctttgtctgcatgttcggaacgctttttcaagcgcaggtctgcaccattgtggtggacctgcgcttttttgctgcgccggaaccagggacggaggagaaaagatgagtgagaaccgtacacggttccggctggatcagcgccgcgcgcccatttacgaggcgctggagcagttccggcagatgcgtgtggtaccttttgatgtgcccggccacaagcggggccgcggcaacccggaactgacggcctttctgggccagcagtgcgtgggtgtggacgtgaacagcatgaagccgctggataatctctgccacccggtatcggtcatccgggaggcagaggagcttgctgccgatgcctttggcgcggcccacgcctttttaatggtgggcggcaccaccagctctgtgcagagcatggtgctgacggcctgcaagcggggcgatgagatcatcctgccccgcaatgtgcaccgcagtgtgctgaacgcgctggtgctctgcggcgcggtcccggtctatgtgaatcccgaggtggacaagcggctgggcatctcgctgggcatgaagcgggagcaggtggccaaggccatcaaggagcaccccaacgccgtggccgttctggtgaacaaccccacctactacggcatctgttccgacctgcgcgccatcgtgaagatggcccacgaggccgggatgctctgcctggccgacgaggcccacggcacccacttctactttggcaacggcctgcccgtttccgccatggcagcgggggccgatatggcctcggtctccatgcacaagagcggcggcagcctgacccagagcagcctgctgctcatcgggcccaatgtgcatcagggctatgtgcggcagatcatcaacctgacccagaccacctccggcagctacctgctcatgtccagtctggacatctcccgccgcaaccttgccctgcgggggcggcaggtgttccatcaggtggcggatatggccgagtacgcccgggaagagatcaacgccgtgggcggctactacgcctttggcaaggagctgtgcaacggcaactctgtctttgactttgacaccaccaaactcagcgtccacacgctggacatcggccttgccggcatcgaggtctacgacatcctgcgggacgagtacgacatccagatcgagttcggcgacatcggcaacatcctggcctacctctccatcggcgaccgcccccaggagatcgagcggctggtcagcgcactggccgagatcaagcgccgctaccacaccgacggcaccggcctgctgagccaggaatacatcgaccccgtggtggctgccagcccgcaggaggccttctatgcccccaaaaagagcctgcccctgcgggagaccgagggcatggtctgcagcgagttcgtcatgtgctacccgccgggcatccccattctggcccccggcgagcgcatcaccaaggagatcctgaactatatcgagtacgccaaggccaagggctgcagcatgaccggccctgaggaccctgatattttgcacctgaacgttctggcataaggagggaaagcagatggagttttggttttcggaatttcacacccccgatgtgaagcacagcatccgggtgaacaagcagctctactccaagcagagcgattatcagcgcattgatatttttgaaacgcccgagtttggccgggtgctcacactggacggcaatgtgatgctgaccgagcgggacgagttcatctacgacgagatgatcgtccacgtgcccatggccgtgcaccgggaggcaaaggatatccttgtcatcggcgcaggcgacggcggcgtggtgcgggagctgacccgctacgaccgggtggagcgcatcgacctggtggagatggacccccaggtggtggaggcctgccgcgcctacctgcccggcaacgcctgtcggatggatgaccgccgggtgcacatctactttgagaacgccctcaagttcatccgccagtgcgaggaggaatacgacctcatcatcgtggactcctccgaccccttcggccccagcgagggcctgttcacccgcgagttctacggcagctgcttcaacgccctgaaagaggacggcatcatggtcaaccagcagggcagccccttctacgccgaggatgccagcgccatgcagcgcagccacaagcgcattgcttccaccttccccatcagccgggtgtatcaggcccacatccccacctttgcggcgggctactggctgttcggctttgccagcaagaagtaccaccccattgatgatctggacgcaactgcctggaaggccctgaacatgcgcacccggtactacaccaccaaactgcatatcggagcattctacctgccggcttttctggaggagatgctgcgggaagtggaggaacactgatgctttaccccaacgttgaaacctttatcggctgcgacagcagctaccgtgccgccagcatcgtgctgtacggtgccccctacgattccaccaccagctaccgcccgggggcccggttcggcccggctgccatccggcacgagagctacggcctggagacttacagcccctaccagaacgccgacctgaccgattttgacatcttcgacagcggcgatctggagctctgcttcggctccagcgagagcgcactggccgacatccagagccgcgcggcagagatcctgcacgacggcaagttcccgctcctgctgggcggcgagcatctggtcacgctgggtgccgtgcgggccatggtggaaaagtaccccgacctccacatcgtccactttgatgcccatgccgacctgcgggacgactatctgggcgcaaagctcagccacgcctgtgtcctgcgccgctgccatgacctcatcggcgacggacgcatccaccagttctgcatccgcagcggcgaccgcaccgagtttgagttcgcagctgcccacaccgagatgcacaagttcgattttacgggccttgcccagctcactgagcagctctgtgccagcaaggtgcccgtttacctgaccatcgacctcgactgcctggacccctcctgcttccccggcaccggcaccccggaggccggcggcgtgagctttttgcagctgctggaggccatccgcaccgtgaccaaggccaacatcgtgggtgcggacctcaacgagctggcccccacgctggacaccaccggcgtttccacggccacagcctgcaaggtcctgcgggagctgctgatcgcgctggacaagggctggccgggctttcaggtataaggacagaccgtaaaaagacaactttacagataaaggagtaaccgacatgagcaaagttctgatcatcggctgcggcggcgtggcctccgttgccatccacaagtgctgccaggtccccgaggtgttcaccgagatctgcatcgccagccgtaccaaggcaaagtgcgacaagctggccgccgagctggcccccaagaccaccaccaagatcaccaccgcacaggtggatgccgaccatgtggatgaggtcatcgccctcatcaagagctaccagcccgatctagtgatgaacatcgccctgccctatcaggatctgaccatcatggatgcctgcctggcctgcggcgtgaactacatggacaccgccaactacgagcctgagaacaccgacgacccggagtggcgcgccatttacgagaagcgctgcaaggaggccggtttctccgcctactttgattacagctggcagtgggcctacgccaagaagtttgaggaagccggcctgaccgccctgctgggcagcggctttgacccgggcgtgacccaggcttactgcgcttacgccaagaagcacgagttcgacaccatcgacaccatcgacattctggactgcaacggcggcgaccacggctatgcctttgccaccaacttcaaccccgagatcaacctgcgcgaggtgtccgctcccggcagctactgggagaacggccactgggtggagatcccggccatgagcatcaagcgggagtacaactttgatcaggtgggccagaaggatatgtacctgctccaccacgaggagatcgagtctctggccaagaacatccccgaggcaaagcgcatccgcttctttatgaccttcggccagagctacctcgaccacatgcgctgtctggaggacgtgggcatgctgtccaccaccccggtcaacttcaacggtcaggagatcgtgcccatccagttcctcaaggccctgctgcccgaccccgccagccttggcccccgcaccaagggcaagaccaacatcggctgcatc

SEQ ID NO: 24 - DNA, 6618 bp, unidentified
  source 1..6618: mol_type = unassigned DNA
cttgaaggtctgctcaaagccgaggaacttcaggatgccctgattgacagaggggtggaagcgcaggccgcccttgtaggggccgatggcgctgttgaactggacgcggtagccgcggttcacctgaaccttgccctgatcatcgacccaaggcacacggaaggagatgatgcgctccggctcgaccagacgctcgatgaggccggccttctcgtactcggggtgcttctccacgacgggctggatgctctccagcacctcacggacagcctgcaggaactcaggctcgttggcattgcgcttctcgaggccctcgtagacacgcttcagatattcattcgtcagcatagtaagatactccttttcccttaactctatcgtgtagctctatcatgaggccccggctctcccgtttccacggcgaggacagcgaacctcagcacacttcgttattataaagctttatccgccgatttacaagatggcccgccctgcaaaagctggaaaatctttcaaaaaaactacagaaaagatgaacatacttcacaaaaaagaacgggtgcttcaaaaagcggcgataacacctgattttgcgaaagaataaaaatccccctgcaccggcccgggaagggcggtgcaggggggataagtcttacttcagcagcttctcgcaggcgtcagcggcaccctcgaggaactgtccgccgtaggtctcgatcatgccggcgtcggacagtgcggccagctgggggtcgatggggcacttggccagcacgggcaggtgatgctttgcggccacctcgtccacatggctgtcgccgaacacattgatgtgcttgccgcagtcggggcagacgatgtagctcatgttctcgacgatgcccagcataggcaccttcatcatctcggccatgttcacagccttggcgacgatcatgctcaccagctcctgcgggcttgccacgacgacgatgccgtccacaggcaggctctggaagacggtcaggggcacatcgcccgttcccggaggcatatccacgaacaggaaatcgacgtccttccagaccacatcggtccagaactgcttgaccgcaccggcgatgacggggccgcgccagacgacggggtcctcttcgttctccaccagcaggttgatgctcatgacgtcgatgcccatccggctctggatgggccagcagcccttgtcgtccgccatggcgcggccatggatgccgaacagcttcgggatggacgggccggtgatgtcggcgtcgaggatgccgcagtggtagccgcggcgtgccattgcacaggccagcaaggcgctggtcatgctcttgccgacgccgcccttgccggatacgacgccgatgaccttcttgacgctgctattggggttgggtgcgtcatgctggggcgcagcattgcgggaagaacacgctgccccgcagttggagcagtcatgggtacattcttcgctcattgtctcattgcgcacggccgtggtaccggggtgcgcttcctccttgcattcttagatcctgtctggcagaaaacgctccgccagatacaatatatatcatatcataaaactgggaaagaaacaacccacgccgccgctcatatttcccagagcggcgtgcatacctataaaaagatacgagcaggaaagggagggggcgcagtggggaagagctatctgaaaaacgcggccctgatgaccggagcagatgtcctgctccggctggcagggatggggctgcgcatctggctggcgaacgcgctgggcggcgaggggatggggctgtatcagctggtgctggcggtctactcgcttttcgtcacgctggcgacggcaggcgtatcggtggcggccacccgcctgatggccgaagagctggcccgaagcccggccgaggcccgggggatgctgcgccgtcttctgctggcgggggccgggctgggagtggcggcgctggcggcccagttcggtctggccggcctcgccgcacggtggtggctgggagatgcccgggcggcgggggcattgcgcgtctcgtcgctgggtctgccgtggatggcggtgtcgtcggtgctgcggggctttttcatcgcccggcggcgggtcgagccgaatgtcctgagccagctggccgagcagaccgtccgcatcggcatcgtctgggccgcgctgggccgggccgacgctctcggatggaatgcggggcagcgctgtacggcagtgctgggcgcaacggcggccagcgaggccgtcagcaccggtctgatggccctgttctactgccgggaggcccgccgctgcttcggctcacagcctgtacagcgtccccatgacccggggaggcggctctgggacatcctctggccggtggagggcgggcgatgtctcgccagtgccctccacaccgccgagaatatgttggtcccggcctgtcttgcggtctatctgcaatgctccggcgggcgtgccgaggctgtgacccagtacggaaacctgaaagggatggccctgcccctgctgacctttcccttcgggctgctggggagtctgtccgtcctcctgatgcccgagatcacccaagcccatctccgggggcagagcaggcggctctccgtcctcatcgaccggatgctgcggctcacaggctatttttcggcgctggcgggggcggcattctgggtgtggggacagccgctggccgaggcactctacggcagcgcggaggcgggcaactatctcgtcatcctcggcccggccatgccgctgatgtacctcgagagcatggtggacggcgcgatgaaggggatgggagagcagaaagccgtcttccggtacagtatgtgggactcctgcctccgtatcgtgggggtggtgctcctgctgccccggttcgggatgaaggggtttctctttgtgatcctcctgtccagcctctacacctgcgccgccaacaccgggcggctgctgtccagctgcggcctgccgctgcgactgtggcggtggctgggggcgccgggtcttgcggggacggccggtgccggagcggggctggcgctgcggaagcttctgaccccatggctggcgagaggagtgcccgcgcagctggcggcggtggcgctgggcggtgcggggatgacgctggtctgctttgcggcggcatggccgctgggcctcggcgaggagctgcgggacgtggtggcaggggagagaagacacaaaagcgctggacatggggagaagaatcgagtataatgatacagatacgatggggcgataggcccttgggtcgaaaaaacggcggctggcgtctctccgacaccggccctgatgcaaaagaggactttttgtgaaggaaaagaaaacaagtatgctgcaggtgctggcccgccgggcctttctggtggtgctggacgcagccatcgtagccttcagcttttattttgcgctcctgctccgcgcagacggcgcagtcgaggcctcgtggtggcctcacaaccgcgccctgctctacgcgaacctgccgtggatcgtggcggtctatctgctcagcttcttgggcgggaggctctacaccatcctctggaaatacgccggagagcgggatctcatccgtctggctgggatgatcgctgccccgacggtcgtggtgtatctggtcaaccgctgcttcatccatggcgtgctcttcaactcggccaacgcgatggcttcggtgctcatcttcctgctcgtcggcgggagccgtctggcgtggcggctcttcctgaaccacccgctgggcgagcggctgcggggcaataccagcaaagaccccaaccgccctgtgatgatcgtgggcgcgggcgaggccggtgcgtgggccatcaacgtctgcaagagcaacggcagctacggccacccggtggtggcggtggacgatgaccccgccaagctgggccagaccatccacggcgtcccggtgaagggcacgctggaggagatccccgacctgtgcacccgctacagcatccacaccatcatcattgccatcccgaccttgcggggcagccgcctgaaccatgtcatcgacctctgcgtctccacccactgtgcggtgcagatgctcagcgacccccagcttgtgggggcaggcgcaccccagcagggggcgttccgagagctgaatactgccgatttcctctcccgtgaggaggtcacgctggacacggcccagatctcgggctacctcaccggcaagaccgtgctggtgacgggcggcggcggcagcatcggcagcgagctttgccgtcaggtcatgcgcttcagacccgcgaagctgctcatcttcgatatttacgagaactgcgcctacgagctgcagatggaactacaacagaagtatggccgcgatgtgcccatcacagtgctggtgggctccatccgggacaaggcccgtctggacgaggtctttgagacctaccaccccacggtggtgttccacgccgcggcccacaagcacgtcccgctcatggagatcagccccgccgaggccgtcaagaacaacgtcttcggcaccaagaatctgctggtcagcgccagcgagcacggcgtggagcggctggtgcagctttccaccgataaggccgtcaaccccaccagcgtcatgggctgcaccaagcgcctgtgcgagatgctcatccagacctttgcgggcaacaccgacatgaagtgcgtggccgtccgcttcggcaacgtgctgggcagccacggcagcgtcatcccgctgttcgaggcgcagatcaaaaagggcggccccgtcaccctgaccgaccccaacatcgaacgctatttcatgaccatcccggaggccgcgcagctggtgctgcaggccggcgcattggctgagagcggcagcatctatgtgctggatatgggtgagccggtcaagatcatggacctcgcaaagcagctcatccgtttctacggctacgagccgggcgtaaatatggacatcaagatcgtgggtctccgccccggcgagaagctctacgaagagctgatgatggacgaggaacaggacaagatgcgccgtaccggccacaataagatcttcgtggctccgccccggaacatcgatcttggcgagttctatcagcaacttcaggagctgtctgccgccgccgagcacaacgacgacaacgtcgtggcccagctggccaagatggtgcctacctttacccccacccgagagaacctcaagctgtgaactgctggctgcacggcattcggctgtgtaaaaatatatgagagggatgtatatcatggaaaagaaaccgtttttgactgagtcgatggctcaggacatcattcaggacgtgcccacccccttccacgtctacgacgagaagggcatccgggagaacgcccgccgcatcaacaaagccttcagctggaataagggcttccgcgagtatttcgcggtcaaggcgctgcccaaccccgtcatcctccagatcctgaaggaagagggctgcggcgtggactgctcctccctgaccgagctgatgctcagtgaggtgtgcggcttcagcggcagcgacatcatgttctcctctaaccagacccccgtggaggacatgaagaaggcctacgagctgggcgcttatatcaacctcgacgacgccacgatggtggacttcctcgaccgggtagccggtgtgccggagaacatcttctgccgctacaatccgggcggcaccttccagctgggcgagagcaaggagggctttcaggtcatggacaagcccggggatgccaagtacggcatgaccgaggagcagatgatcgacagctacaagaagctggctgcaaagggagccaagaacttcggcatccacgccttcctcgcttccaacaccatttcggacgcctactaccccgagctggctgcgatcctgttccagctggcggtccgcgtccagaaggccaccggcgtccacatcgcctacatcaacctgtccggcggcgtgggcatcccgtaccgtcctgagcagacggagaacgacatcatggccatcggcgagggtgtccgtaagaaattcgaggagatcctggtccccgccgggatgggcgatgtcgccatcttcaccgagatgggccgcttcaccaccggtccttacggtgcactggtggcaactgccatccacgagaagcacatctacaaggaatacatcggtctggatgcctgtgcggccaacctgatgcgccccgccatgtacggcgcttaccatcacatcacggtgctgggcaaggagaatgccccctgcgaccacaagtatgacgtagtgggcggcctgtgcgagaacaacgacaagtttgccatcgaccggatgctgcccaagatcgacatcggcgacattgtgtatatccacgacaccggtgcccacggctctgcgatgggctacaactacaacggcaagctgcgcagcgccgaagtcctgctctgcgaggacggctcccaccgcctcatccgccgtgccgagactccccgcgactacttcgcaacgctggacttcctgcccttcatgaagccgctgctgggcgagtacgacgactaa

SEQ ID NO: 25 - DNA, 10414 bp, unidentified
  source 1..10414: mol_type = unassigned DNA
  misc_difference 1706: note = a, c, g, or t
  misc_difference 1707: note = a, c, g, or t
  misc_difference 1708: note = a, c, g, or t
  misc_difference 1709: note = a, c, g, or t
  misc_difference 1710: note = a, c, g, or t
  misc_difference 1711: note = a, c, g, or t
  misc_difference 1712: note = a, c, g, or t
  misc_difference 1713: note = a, c, g, or t
  misc_difference 1714: note = a, c, g, or t
  misc_difference 1715: note = a, c, g, or t
ttattttcccgctatcgccactttaatcaccccgtccagcctattttcgaatacgcggtatgcttcttcgatttttgtcaggggaaaacggtgcgtgataagcggcgtggtatcaatctttcccgcctctatcaaacggagaatctcggcacaatcgcatccgtccactccaccggtcttgaaagtcagattcttaccatacatatcgggcaaaggaagtatttgaggcttatcataaagcgccacaaccgtaaccaccgcattgggacgggcacattcccacgccaggcggaaagtgtcttcggctcctgccacttccagcacgacatcagcgcctccgtgagcgctgttacgaagaacaaattccttacagtcttccggctccgtcaccaatacatcaggataatgttcacggataaaccgaattctttcagaggacttttcacaaacaatgatacgcttcggtttcttcagcattacgcaaagcaaggtacatatccccgtagggccggctcctatgacaagaaccgtatcatcctcggaaatctccgaaatgcgtgccgcccaaaatcccgtagccagcacatcacctacaaaaagcgcctgttcatcgctcaccgaatcgggaatgcggttcaatccccggtcggcataaggaaccctgacatactccgcctgaccgccgtcgatacggcaacccaatgcccatccgccgttcacatccgtacagttattcacatatccatgccggcaaaaaaagcactcgccacagaaagtctcaacatttacagtaaccctgtcgcccggtctgaccgaagtaacacgactcccaacctgttcaacgacacccaccatctcatgccccacggttattcccggcacggcacgcggcacactgccatgcttgatgtgcaaatcactggtgcaaatgctgccaagcgttatacggacaatggcatcacgctcatctttcagtttgggtttcggtttgtccaacaattcaaaccgcccccgttcaacatatgtatatgcaagcatactctcctcctttcgttatcattttcccgcgaatataatcattacattcatgataaaagaacgataacggaaaatattcgccacttcctcacacccgtaagaataagaatggctacatttgcagacagatatataactcctcatataaaccgtaacccatgatgaaagaaaaagaacttgcattctctgatattcccagaaacttcctatggtgcatcaaccggcaatgccctaaagccgcaacctgtctcaggcaactggccgaaagactttcaccggtaacactcgtatcctgtgaaaccatcaatcccaaccatttaaccggacctgccgacggatgtccctatttccgttccaacaagcaggtgagatatgccagaggcttcctcggaatcctagaaaacctcaccacccggcagaagcgcttcttcagcagccgtatcatcaacaactccagccgccgcacctattatcgaatccgcaacggcgaacgggcattgtctcccgacgagcagcagaacataataaacgtactcaaagaatgcggagtgacctttgccattgaattcgatgcttacttcgaggattatgactggggcagtacattatagtatgccacttaattggcacaactttgcctattcgatggcacaactttgccattgaannnnnnnnnnactatcactctgcataatttatttttttactttttccaaaacaaagttgtgccaacatacaattccattatccatgaagtacggatatgaatgtttttatgaagtaaaggaatacaaaagagtaaaacagaacaggcaacttattacatatttcgctatctttgtatcattaaccaaagttcaacgacatgaggaaactgattgcagtgtcagccgtttcattgctcgtcctatccggctgcggcacaagccaaacggcagcgggcgaccccggcgcaatatttgccggtgcagctatcggcggaaatgtcggtggtgccatcggcggtctgataggcgacaataatggcggctggcggagcggttatcgaggttcggccatcggtacaattatcggaaccattgccggagcagccattggaaatgctgtgtctgcccccaaacaagagacatacggttaccggatagaaagaacggagccctacaaaccgcagcacgaaacgtatcccgctccaagcgtcttcgataacctaaggatacgcaacatccgtttcatagacgacagccgtgaccacgtaatcagttcgggtgagaaaagcaaagtaattttcgaaatcatgaacgaaggtgaacagactatatataatgtggtaccgatggttaccgaaaccacaggcatgaagcgcatctacatttcaccacctgtaatggtagagcaaatcgcccctcataatggcgtgaaatacaccgccaccatcagcgcaggcgagcggataaagacgagaaatgtcaccatacgggtggccgtagccgacggaaacgggcaacaatacgactggcaggagttctcacttcccaccgagcgataaacaaattttcggagtctatacaaacggaacacagagacgtagaaaatttaacagcatgaagaaaataatacagagcataccctgattctctgtatttgaaaagcaaaagttgaatactttataaacgacagattatggccgacaactatctggaaaaccaatacgaacagtatcaggcgcgcaaagctgcctgggagagggaacgcaaatacggaaagaagaaaaagaaatcagcgtatccgcatcccttgccgcaacagaaggatgcggaagatgtcctgcccgttctggacgaggagaatgacaacattccctacatcatcaatacggacaatgataatttgattgacgattaacccctctcgccatgttgcaccatttccatacccccgtagcagacataccattgccggaaagatttactttccctttttgctatacacctcatccgctctgcgtggcagcagcgaaagaggtgcaagcctatctcggtttgcaggaagcgtggaaagaagagttggcgcagggcaagatgttcggtgttctggttgtaaggactcaagagggtgaaacaggatacctggcagcattctccggcatactggcgggcagtaatgtacatccgtttttcgtaccgccggtctacgacctgttgcagccgcaagggttcttcaagatagaggaagaacagatttcgcaaatcaacacgcgcatcggactgttggaagaggacgaagaatacaaacggcaaatgcaacaactggctgccctgcggcaaactgcccaagaaacgctggaagaagccaaacggcagatgaaacgcgccaaagagaaacgggaagagcgaagacgcgaagcggctttacccaacagtactccaatgacgcctgaggaagagagtgccctgatacgcgatagtcagttccaaaaagccgaatacaaacgcatggaacgtgcctggaaagagcggattgctcccttacagcaaacgatttccaattatgaggccggcatacaggtattgaaaagcgaacgtaagcaacgttctgccgccttgcagcaaaaactgttcgaacaattcaagatgctgaattaccggggagaagtcaagacgctttgcgacatcttcgggcagaccgtacacaaaaccccgcctgcgggagccggtgagtgcgccgcacccaagctgttgcaacaagcctatctgcacgggtggaagcctattgcaatggcagaattctggtggggagaatcccccaaaacagagatacggcatcacggacattactatcccgcctgcaaaggcaagtgcgagcctatattgggacatatgctgcaaggtcttgaagtggacgagaatccgatgctgaaggaattgcagtccggcaagaaaacattggacattatctacgaagacgaatggctggtggtggttaataaaccggcagggatgttgtccgtacccggcaaggaagatgtagtttccgtttacagcatgatgcgcgagcggtatcccgatgcggacggtccgttgattgtacaccgcctggatatggctacatcgggactgctggtggttgcaaaaaccaagcaggtccaccaaaacctgcaagcgcagtttaaaaaccgcagtgtaggcaaacgctatattgcgttgcttcaaggcagcgtttctcaagatgcgggaacggttgaactgccgttatgcccgaacccgcttgaccgcccccggcaaatggtgcataccggatatggcaagcccgctgtaacagactttgaagtactggaacgcaaggacaaccgtacccgtatcgccttttatccccgcaccggacgtacccaccagcttcgggtgcatgccgcccacccgctcggactgcactgccccatcataggcgacgagctctatggacggaaagccgaacgcctgtatctgcacgccgaaatgctggagtttacacatccggtgaccggaaagagaataagcatcactcaaaaagcagacttctaacctatgaagtaaccgattataaccggtaaccgacgttcatgccaacagtaatcactattaatagccccaaaacaagtatccgatgaaaatccttcgacccaccccgcaagattatgacgaactgctcaccgtatgggaagcctccgttcgcagtacccaccatttcctgacagaagagaacatacaattctacaagtcattggtacgaaaccaatatttccaggccgtagagctttacatcatccgcaaccgggaaggaaaaatcgctgcctttatggggctgagcgacgaactcattgaaatgctctttgtacatcccgatgaacagggaaaaggatatggcaagcagttgatgcaatacgcactccacgaaaaacatatctataaggtggacgtcaatgagcaaaacgaaaaagctcaccggttctatctgcacatgggcttccaactcatcggaagagatgaaaccgacccttcggggaatccttttcccattttacacctgcaatggaagccgtagatgaacacgcatcgtataaaacaaaaacagattgacttatgagaatacatcacatcgccatctggactttccgtctggaagaaatgaaagaattctatgtccgttacttcaaaggtacaagcaatgagaaatacgtcaaccccaaaaaagggtttgaatcctactttatccgcttcgactgcggagccgacctggagctgatgagccgtaccgatgtacagaatactcccatcggggaaaacaggctcggtttgacccacttcgcctttgcactcgacagcaaagaagaggttctcgaactgacggaaaagctgcgaagtgccggatataccatcagcggagaaccccgtacatcgggagacggatattttgaaagcgtagtgctcgaccccgacggcaaccgtgtggaatgcgtgttcaaggcaggctgaaaagtcattttacacagaatttaaatcaacgtctttcgtccggcattgcactaagtttcctatgtttgcagcataattcataagtagattttaaatttatcggaaaccatgaaaatcattgcattcctatttacggcatttatcagcctgcaaatgtccgggcaagagaaattccccgatggcacgcctattcccgactggttcagacagaacgaaatcgtaaacatcgacacactgggcaagaagtataccattaccgattacggtgtgacaaacgacagcacaatcctgcaaacggagaaaatacaagccgtcatcgaccgggcagccgagaatggcggcggcgttatcatcatccccaaaggaacattcctcagcggctccatcttcttcaagccgaaaacgcatctatacatggaagaaggtgcagtgctgaaaggaagtgacgacatcagcaacttcgccattgtcaacacccgcatagaagggcaaagcctgaaatacttcgccgcactggtgaatgccgacaaggtaaacggatttaccatttccggcaaaggcacaatcaacggcaacgggcacaggtactggaaatctttctggctgcgccgtcaggttatcccgaaatgtaccaatatggacgagttgcgtccccgcctagtttacatctccaacagtaacgatgtgcaaatctccggagtacgccttatgaactctccgttctggactacgcatatctaccgctgcaataacataaagctgctgaatctccatattttcgctcctgcagccccggtgaaagcaccgagcagcgatgcgatagatattgacgtctgcagcaatgtactggtgaaaaactgctatatgtccgtcaacgacgatgccgtggcactgaaaggcggcaaaggcccgtgggcggataaggaccccaataacggcagcaacaccaacattatcatagaagactgcacgtacggcttctgccacagcggtctgacatgcggcagcgagtcgatacacaaccgcaacatcattctccgccgctgcaaaatcagcaatgccacgcgcctgttgtggctgaagatgcgtcccgatacgccgcaacactacgaatacatcctggtggaagacatcacaggcgatgccaagagcatgctgctcatcaaaccgtggacacagttcttcgacctcaaaggccgcaaggacatccccctctcacgtgccaacaacgtgacgctgcgcaatatcagcctgagctgcgacatattcttcaacgtcagcaagtccgaccaatacgaattgaaggatttcactttcgagaatttgaatatcaaggccaagaatgcccaatgcgataaagagattatctctaattttgagtggaaggacgttaaggtcaaccaataatgcaggtagcaggcagcaaacacatcacgagaaacgaataaacttcattatcgtataattcgggtacaaataacgcggactttcgtggatacaattaataacatccacgaaagcccgcgtcatttatttccggacaattattcaaaactacgcagcatgctgatttcttccgcccaaagcgtttcatccggagtttcgagtatcaccggcatatcgttaaaacgctcgtctttcataaaacgcttgaagaaatccaagccgataagccccttgccgatactgtcgtgacggtctacacggctacccaacgcttttttcgaatcgttcaagtgtatggcgcgcagaaaaccgaagccaacggtcttatcgaattcgtcgaaaaccttgtcgtattcatttacgatatcataacccgccgtatacgtatggcacgtatcaaggcagacacctacacgcgacttgtcttccacacggtcgatgatatgtttcagttgccaaaactcattgcctacattgctgccctgtcctgccgtattttcaatgaccgccgttacgctttgcgtcttgcctaaggtaatattaatcgattcggcaaccctgtccaggcaagcctcaaccgaaattttatttaaatggctgcccggatggaaattcagcagttccagccccagctcctcacaacgtcgcatctcatccagaaaagccgcacggctcttctccagcccttcttcttcgggatgtcccagatttatcagataactgtcgtgtggaagaatataacgtgcctccaaagcatatttcctgcaattctccttaaacaaggcaatactttcctgcgtcaggggcttcgccacccactgacgctgattcttggtaaacagggcaaaagcattcgctcctattccatgggcattgacgggagccagctccacaccgccgccggcagatacatgtgcacctataaatttcatatttcgattattattcgttaatttattgttctttcataaattcccattgagactttttcatatctacaaagccgtttgtcttaaaccggacaccttcattctccaacaatactctttgctccgtccaacccggcactaatctgccccggctgtttacaaccctatgacaaggtaaatgcaattcctccggtacgttgtgcatagcctgccccaccatacgcgagcactgaggtctgcctaccaaactggcaatctgcccgtaggttacaacgcatcctgcaggaatagcggcaacaacactgtaaacatcttgcagaaaagtagtccgattcataagataaagtctttctttgcggcaaagatagcgtaaacagagagtataaaaaatacacagccttgttttttataccaagcgacagcaatgagatgcctacccgacagccgggcatctcacgtctgattacaggaaagtacttgccccaagcgtattgtaagcgtaagtgatattctgctggcggagaacttcaccattcggagtaaacaatatctgatattttatctgcacgttcggcctgcccacctgtatggctacaataggttgccatttgggaaattgcacccaaacaacattctgtaccaccccgtccgaaaactgactggctgcaaaagcattgaatacggcggcaggcacctcatccagggtttcccaatccgtttgcttcattacccacgctgcatccgtattgaaccagaccttggtatcaaatccgttcatcataaaatccgcaacataatactcctcgtcctgcgaccaggctatccctttggcggaaggatacattttcgtcagagcagtttgcacattatcaggagcatagcctgcaaaaagtggcaaaaatgtccaaagcgtcaaaaaaaagaacaaagacttcattttatccataaccattaatctattccatgttggaaatcaacaatatttcctggtgttttgtttggttctatgcccataaggattatctttgccatacaaatccgttcaaacagcaatgaaatgataagtatacagcctgtgctccataataagaaacaatacctcgacctgctgcttttggccgatgaacaagaatccatgatagaccgttatctggaacgcggtgaaatgttcgtgttgtccgagggcggcagtatcagagcatcctgtgttgtcacccgcgaagcagaagatgtttttgagataaagaacattgccgtttatccgcaattccaacgtcggggatacgggaagaaactgatacagtatcttttcgggcattatgcaggcagatgccggacaatgctcgtaggaaccggagacagcccattggcgattcctttttacgagaactgcggatttacctattcccaccgcatcccggacttctttacggataactacgaccatcccatttatgaagcgggcaaacaactgaaagatatggtttacctgaaacgcaatatggatgaataagacctgccaatcacacattgcccaagaacaacgcaccgtagaacagatgatccgcctctattgccgcaggaaagaaggcaacaaggaactctgcccgcaatgtctcgaattgctggagtacgcacgaacgcgcctgtcgcgctgcccgttcggagagaataaaacaacttgcagactatgcccggtacattgctacaagccggagatgaagaagcggatgcaggaagtcatgcgatatgccggaccgcgcatgctgctctatcatccgaccgcagcgtgcaggcatttatggaaagagcgtatatatcaatatttcaccagacgtttcggagtcccgtgccaggaacagcataagcagtaaacctcttccaggtcatacccttctaaagaagctgccggatctttcggtacgacctcgcctttgtccgacacatatacgggcaaacgctctccctgcccgttcaagacataaaatgcccccaccttgcattgggggcacaccattttgcgcataatcagttgaaataatataaaaatacagcaataccttcaagcgctttcttcttctcgccctgaatctcaatggcaaactttatttccgcctttgccacaccgcgcaggtttgccaacgaatgcagagaagccaccagacggatgctctgtccggaaagtacagcctgaccgaacttcatcttatccattccgtagttaatcatcatcttcaggttatttacctcgataatctgattccacagatgaggcaacatggagagggtgagataaccgtgtgcaatggtactcttaaaaggactttcggtcttggcgcgttctgtgtcaatgtgaatccactggtggtccagcgttgcgtcggcaaagagattgatgcgttcctgcgtaagttccacatactccgaaacaccgatttgctgacctaccagcttttcaaaatcctcgtacgaattgataataactttttccat

SEQ ID NO: 26 - DNA, 7841 bp, unidentified
  source 1..7841: mol_type = unassigned DNA
aatctgatgacagttcatgtaagcaaatccgtgacagttcatgaggtcagtaacaacctccctggaacttcctctgtaaaatcgttgaaaaattttgtgatactcattctgcggaataccgattccctgatcctcaatttccattcttacaagatcgtttcttttttgtaaccggataaatatttttgaaccatccggactgtacttgaccgcattatctaaaacgttgatcacagcttcaccaagccaccttttatcctgcataatcgtgcatgtttccagctcttttgcatagtcaaaaacgaattcaatttctttctcatccgctttaggataagtgcggttcacagcagatatgacagtatccataagcggaagttttttcttattaatctgaatcagtccagtttccatcttggatatttcaagaagcgactgcaataatgtctccagtccatccagagcactccgacaacggatacgaaactcctcctgttctgtggcacttaagtcattctgcatcagcacactaaaacatgtatccaaagctgcaaccggtgtctttaactggtgagagatatcagaaaccatttctttcgtgctctctttttcttcccgtgcttcttcctttagcaactgaatatgatgtccgattgcttcaagctggtcattcaatttttccagttctgtgtgattttccgttttcagtaaatcatcaaatttattttcacggaatctgatcagaatttcttccaactggtctaaaattttctgatgacacgcatcttcttttttcttccaataaaataaaaaagtcaaaagaagcacgcatatcacagtgcttacagcaccggtcaccataacctgatgccggaattgcgaataaaatgcattccctttattcccccagtatccatattgctccaataatcgccttccctgttcgttagtttcaatatccttatccttaagcaattccgaaacagcatccagcccggaaaattcttcctttgcagcaatctctgtcataagattcattttatatttataatcttcataaaacacatacgtggtaaagcaatttaatattgtaaacaataatatgacaggtaataccaaggagagcactactgtaatcttcttgcgatatctctttgtcactgccttacctcctgattccatatatacccaagacctctgatattctttatatagaccggtgcagccggattgtcttcgattttctcacggagtcttctgatattgacagcgattgtattttcatccacaaaatccccttccagatcaaacacattttccaatatttgtgtttttgaaagaatctgtttcggattctgaagaaaaaaagtcagcattttcaactccgtttttgtcagactgatttcacgactctttatcaggactttcatttctcctgcgataaatacgatatctcccgaaatcatctttccggcttccgttttctcctgtctgcggcggaaatgtgcttctattttcaaaagaagtaccgaaagactaaacggctttgtaatataatcatctgcccctgcttcatatcccatgacctgatccatctcctgatctagtgctgtaagacaaataatgtatgtattataattgcatctcatccaccttacaaattccagtccattcccatccggaagattcacatcacaaatggtaacatccacatgattatcacttgcaattcttttcgcttttttcactgattctgctgaaaaaacctcatatccggattttttcagtgaaaatgtaattccacgatttaaattttcatcatcttcaaccacgagtatacctggcatagcatatgcacctctctttattaactatatatatcagctgggagatgactcccacctctataggtggtgagaaacaagcttgtatctccaaaagataaaataatggaactatcgtcagcactgttatcctctgaaaggagtcgtcaaatatgcttttgctttttcaatgccggaagtgtggcaagttcttctgtcggagtaagcattatacagcgtctgtttccaatatatgctgtgtgaaaatcataactccctgcaatataaacaggcaaagaatcctgatgattccctgcttcatattttatagaaattccgaatacgcttgtaaggatatttcttattccccttttaacttaatttctttcattttaacttagtgctgttaaaagtcaagttttttgagttattttaagtttatgcagacagtcgcacaaactcatttttctcattcaaaagcagatttctgtgaaatgcttccagatactctgtcgtttcgtgaatacctttttgcagattcgtatagtttccgcggacaagtgcatttctgaaataaaaaaacgcctgctccggttaggaaacagacggcaaatcaacgtttagatttgatggttttcatttccaccagttacgtcacacttacaccagcaacctgctttccaatggggctgctccgaaagatgtacaggaactgttaggacactctgatgtcagtaccacaatgaatatttatgctcactcaacaagaaaagcaaagcgagattccgcaagacttcttgataaagtagcgagcaatgcttaaataaaaatccatgttccttaaattggaacatggattttgtggtaatggggtaattaataatttatatttcacatgccacatcatatgctgatttaatagcatgatcaatattacttggacgttctccagcacaatcaccaatatagtgaagtggaagaggacaatcagaaagctctggaaggttctttcttgcaccaacagccattacaacaaagtctgaagcaatttcttctgttgatgtattgtcgtctattgttttttcaacaactacagaatcatctttgatttctgataattttgcagatgttactatttgaacattataatgctctaattcactcattagagtaggtagaacagtgttgctttcttcttttgcaatctggtccatcatttcaataattgtaaccttacatccacgtgaagccagatattcagctgtctcaacacctacaagaccaccaccgattacagaaacattaccgaatacgatttctttcttggcaagcacatcccatgcacttgtaacagttggaagatctttgccaggaacagggattattgcgttgttcgcacctgttgccacaattacttcatcgaatgaattataatcctgtgatgtgaattcttcacctagcctgaatgtaacatctaattcaggaagtacatttgcataataattaatacttctcatcatttcttcttttcttggaggtacactagcaataagtaactgaccaccaatctgaagtgatttctcaaaaatggttacactatgacctcttaatgcagcaacacgtgcagcttcaagtccagcaataccagcaccaataatagctattttctttgatgatgctgcaggagttatatgtcgtgttgcttcgtaaccgttttcagcattaagtacacaacttaagaacgcacgattctgaatattatctgtacatcccttattgcacatcatacatgttctgacattacagcaatgtccatctgcgcatttgtttgcaaagtcagggtctgtgagaagagaacgacctaatccaatgatatcagcagaaccatttgcaataactgcttcggcagcttctggtgtaacgatacggcctactacagatacaggaatagatacaagctcttttatttttttagaataagaaaccataaatccgtatggctgtgttcccatggcagggattgtatcacccatatttcctgtatggttagcctgtgcaacatgtaatgtgtcaacaccgcaagcttctaattcttttgcaaaaatgcaagcctcatcaaatggaagaccaccttttcctctaaaactattttctccaagaggagtaactataggaagcttgtagtcgataaccatgtcaggtacgattgtttttaatctttttacaagtgttaatgcaaaacgtgtacgattagccaggtcaccgccatattcatcagttctatgatttaaaataggagagcagagagaaccaacaagacggtctccatgtacttcaatacaatcaacaccagcttcgtgtgctaagatagcacagttttccatatgctttattatttcatcaagttcttctgcagttacttcatttacaaagtgctgcatatcatggtgaagtttagctcttgcttcctgcattttgccctgatggaacatatcgtttaaagctttgacattgtagtcaggatggaataactgaattccaagctttgcaccattttcatgacatgcgtcagcaagttttttgaagctttgaacctgctcatgtgaataaagctttggtgtaggagagaatgttggaagtggtgcaacatctccaattactatatatccgacaccgccttttgcgagacgctcgtaaaaacgaaaactttgttctccaattgaaccatctttttcctcatatcctgttgtaagtggtgggaacataatacggtttttaaactcaatatttccaacttttataggctctaataatttcattgttcatacttcctttcaaagtgagtatactatttaagtggtgttaaaaactctaacattaatttgtctaattctgctcttgcaaaagcactggcaaaattgtggttagcgccttcaatcgttttataattgcattttccattgtaaagtgactcatatctatggcatgttgcatcatctaccaaatcatctgcagttcctcttataaggaggactggtccgttgtatccttctgctgacgagaatggctcataattaaataaatcatgattaaaggatgttgggaaagtgagtccttcaatatcggccttggtgattccctgagcttccatggcttcagcacgatccttacatccaaaccacattccagcacctggacacataagcatgagagcataaggattaacaataggagcggcagtagcagctgcgtatcctcccatactctgaccagataagataatcttatctggattggcaaaatcttgtgttttagtccagtttataatatcctcgatatcgtgtaggatacctgtaaaggtcatgtcctcgaattcaccatcactttcaccatttccgtataaatcaaaacggacactggcaaatccatgttcagctaagaatctggctgtgtgagtataaatacttttgtaaccgcttttattccctgtaaagccatgtacatttacaatagcaggaaatcttgtgccatcttctggaatgttaactattccgcgtaagatgtgtccatcacggtttgtgatttctacttgttttgtcaatttaaaatacctccgtttctaattttattctgcagtagcagcatttcgcttgtcagctaaatcctgtaacatttcagctgttttctcttttgtaagagggtagataaattttaataccagaacagctaataaatatcctacaacatataaacctgtatatgttttccaaagacgtcctgagaatgcttcattctggacagcttcattaacctggaatccagcaattgcaagtgcaaaactactcatacttcctgatacagcattagcaagtttacggaagaatgtatatgctgagtatacaattccttcattacgttttcctgtctgaagttcctgataatcaattgcatcatttacaagtgcccaaactaatacttggaaaccacttactccaagatagcagattccgttgatgataataaagagcataggattttcaagtgggaagaagaataaaatagcataaacaacaactgagaaagttgcactgtacataatccattctttctttccaaatttcttagcaacaaattttgtgcctacgaatgcaataagtgaccagattacacttaacatacctgaaactgccatgatggcaacatttccaaaataatcgcggaataaataagtatttaatccgttaaccatacctgctccaacaataccgataaagcttgataacataactccgagtaatgctttgtttttagtaatatctttaattacctggaagtagttaagcttttcttttttctcaacaactggctctgtaataatacgctctttacaccaatgagatgtaaacataagacagattaatccaataactgcacagattgctgacataataaggaaatggctaggtactggctggttatctttatataagaataatggtccagcaataacgataactgtcataaaaattgtaccgccaagacttctgaaacgagaaaggtcagtacgttggttaacatcatcagtcattacacttgaaagactaccaaatggaacgctgacacatgtgtacataatttcgtaaacaatatatgtaatgaacatataagcaatacgtgcaccataagcgaaattgcttacgttaacaaatcctaatatacagagtactgcagttggaaaagcaaagaatttaatccaaggaataaattttccttttcctttgtttttgtggctatcaacaagtgcaccaattaaagggtcatttatagcatcccaaaactttgtaataagcataaggattcctacgtgtactggattaacttttaataccagtgtataaaaaatagcaagatacatggcacggaactgctcagtacagcaacatcccaaatcgccaagagtgtaaccaattttgtccttcatggaaaaaggtcttgtttctttcatgataatttacctcccaaatttatattgttttggtagctacaatcttattatattgtggttatgctgatatccatatacaaatattgcttgcaaactacgaaaaattgatatattgtatattttgacaaaatgaacaaaaaatataataggaaagtgtgcaaaatagacatatgaaaaagcaaggctacaaaatggaatatttgaaaatattggatagtacccagcgaagctttgggcaaaagaagagctatacaattgtatttatagctggtgggatagggtatatgcaccaggaggatgataatattgtatgtactatggaggatttgatatttattaagccaggtaataaagtaaagcttgaatatcgtaaaaataagtatcctcttgaagtttatgttctttatataggtgaagaacttttaaggaaattgtcagatgaagaaacaagacttgatgaagcgtttgattttgttccgtatcaagttaagattgttcattctgagagtgaatcggctatgcttataaagaatatatccaaaaagctctattcgatgaataatgagccgcctaaatttgcccgctcattatacgagaaaagcctattaactatgattcttgtacttgcacttcgctcatctgttcaggaggatgtacagattaagacgaataagaaaaaacacgttgtaatggatgatatttttatttatatcagagaacatttgacagaagatatctcgttggagcgcttggaaaatgaattttatgtaagccgttatcatatagtaagagagtttaaaaaaatgacaggtgagacacctcattcatacattgtaaagagcagacttgatttatgccgccattatatagagcaggggaaaagtattcgtgaggtatatgcgcttggtggatttggagggtataatcatttttttagagcatttaagaaagaatatggtgttactccaatgcaatattacaataatttacagattgacaggaatgaaaagtaa

SEQ ID NO: 27 - DNA, 7552 bp, unidentified
  source 1..7552: mol_type = unassigned DNA
  misc_difference 1765: note = a, c, g, or t
  misc_difference 1766: note = a, c, g, or t
  misc_difference 1767: note = a, c, g, or t
  misc_difference 1768: note = a, c, g, or t
  misc_difference 1769: note = a, c, g, or t
  misc_difference 1770: note = a, c, g, or t
  misc_difference 1771: note = a, c, g, or t
  misc_difference 1772: note = a, c, g, or t
  misc_difference 1773: note = a, c, g, or t
  misc_difference 1774: note = a, c, g, or t
ctcagccagctcaatgcccttctggacatccttgctgatgccgcggccgacagagacgatcacgtctgcgccgatcagatcgaccagcttttcagcggccttctcaacgctcaggacctcggtcttgatgtcctcagcagccagagcgaatgcgggcttcacgatctggcaggcatcagccttggcctgatcgaagggagccttcttcataacgccgggacgcacggtggacatctgcggacggaagcgggggcagatgatggtagccatcagatggccgccgaatgcgggacgggtcatcttcaggttgcggtcttccatatcgaacttctgcttggacaggtcgatggtggagctctccttcaggaaatcgatgtactttgcagtgtcgatgtccagatgggtagcatcagcggtcaggccggtgtgcagacgagctgcgcagcgggggcccagatcgcggccgatgttggttgcaccgatcagcaggacttcgggcttatactcgttgaccatgtcgcacacgaccttagcgtatgcatcggtggtgtagtccttcagcagggggctgtcgcagaccatgaccttatcagcgccatagccgcccagctccttggcaatgccgtccacgttgtcgcccagcagcaggccggtaacttcgcagcccagctcatcagccagcttgcgggcctcgctgaccagctcaaaatcagtggacatcagtgcgccctggcgctgctcgcagaagacccagacgcccttgtattcgttaaaatcagccattgtaatcctatgctcctttcatcagatcaggtgcttcttggccaggataccagccagctgtgcggcagtatcgtcgcccttgagcatggtgcctgcgcccttctgcggaggagtgaaggacttaaagacgttcgtcggagaacccttcagaccgatggtatcaacctcgatcagcggatcgtccttcagtgcgttgtaatcgaacacttccatcggcttgtcgtagcaggtgaagatgccgttcacgctcatgtaacggggctggttcagctccttgatgcaggtcagcaggcagggagtctgtaccttgaccatcatgtagccgtcctccagcatacgcttcacggtcagggtgttgccatccttctggatgtcagccacataggtgacctgaggcaggtgcagcttctcagcgatctgaggaccgacctgagcggtatcgccatcgattgcctgacggccgcagaacacaacgtcctcggggccaacgccgatcttgttgacggcagcagccaggatctggctggttgcgaaggtatcggaaccgccgaactcacggccggagaccagaacagccttatctgcaccgcgggccagcagctcacgcagcatgccttctgccggcgggggacccatggtaacaacaacgacttcgcagccggtagcgtccttgagcttcagagcagcctccagagcgttcaggtcatcagggttggtgatggtagccatcgaagcacggtccagagtgccatcgggcttgacggacaccttgccggaggtatcaggaacctgctttacacaaacaattgctttcattgtaactcttgcctcccttacttcagcagcgcgccggaaatgaccatcatctgcacttcgctggtgccctcgtagatctcagtgatcttggcatcacgcatcatgcgctcgatgggatagtcacgggtgtagccgtaaccgccgaacagctgcaggcagcggcggnnnnnnnnnncagcctcgacgctgtaacggaccttcttgccgtccattgcttcctgcttcttcagagcagcagcgtagaccagatactttgcagcctcaacgcgtgccttcatctcagccagctcgaactgggtgttctggaatgcggaaatgctgcggccgaactgcttgcgctccttgacgtaagcaacggtctcttccagagcgccctcggcaatgcccagagcctgagatgcgataccgatacggccaccgtccagagtagccatagccagctggaagccgcggccacgcacacccagcatacggtcagcagggatgcggcagtcctcaaagatcagctcgcaggtggaagaaccgcggatgcccatcttgtcctcagccttaccgacggagaagcccgggtcggtgcgctccacgataaaggcggagcactgcttggtgggacggcccttcttgtcgggcacgatatcggtgacagcaataacgataaagacgtttgcgtagccggcgttggtgatgaagatcttggaaccgttcaggatccaatcaccggtctcggggtcctgctttgcaaaggtctgctgaccctgtgcatcggtgccggcacccggctcagtcaggccgaaagcacccagccactcaccgctgcacagcttgggcagatactttgccttctgctcgggagtaccattttcataaataggagcagcacacaggctggtgtgagcagagacgatgacaccggtggtgccgcagaccttgctcagctcttccactgccatgacgtaggacagcacatcgccgcctgcaccgccgacctcagtcgggaaataaatgcccatcatgccgagcttgcccatcttttcgacggtctctttggggaagtactcttccgcatcaaccttctttgccaggggcttgacttcgttctcagcaaactcgcggtacattttctgtaccatctgctgctgcttggacagagtaaaatccatcgctatatcctcctaacgggtctttttcatttaccggaattgcccggtgcaaacaaattcctcccggccgcttttccacggtcgggagaaacgtttatcagaatttacagctggtcaacaggggtcttggtgcggtctgcgttgtaaacgtagaagcccttgccgctcttgcagcccaggttgccgccgcggaccatcttacggatcagcgggcatgcacggtacttgctgtcgccggtctccttgtacagcacgtccatgatagccaggcagatatccaggccgatgaagtcgcccagctccaggggacccatggggtggttggcacccagcttcatagcggtgtcgatgccggcgatatcggaaacgccttccatcttgatgaaagcagcttcgttgatcatggggatcaggatgcggttgacgacgaagcctgcagcctcattgacctgaaccggctgcttgccgatggcaacagagatctccttgatcttctcaacggtctcagcgggagtgttgcagcctgcgatgacctcgatcagcttcatgcggtctgcggggttaaagaagtgcatgccgaccagcggacggctaacgcccttgccgatctcggtgatggacagagaagaagtgttggaagcgaagatgcactcgggcttgcagatcttatccagctcgccgaaggtggtctgcttgaccttcatatcctcaaaagcagcctcaacgaccagatcgcagtcagcgcacaggtcttccttcaggcccggggtgatggcagcaacgatagcgtctgccttttcctgcgtcatctttcccttggcaaccagcttctcgtagcccttcttgatctttgccagaccattctcggcccactcctgcttgatgtcgcacagagcaacggtgttgccctcaacctgtgcaaatgcctttgcgatgccctggcccatggtgccagcgccgataacaccgatcttcataggaaacctctcctttaatatcaaaaattatgtagtgatggattagttgttggtgaacactgccttgggcttcggcttctcacggctcaggaagcaggccatgccttccttctggtcgtgggtctcgaagcagctgccgaacagcttttcctcgacctcaacagccttctcgatgggcaggctgatgccgccgttgattgccttcttgcagttgcgtacagcgatgggtgcattctttgcgatcttgccggccagcttcagcacgttctccatcagttcagcctgaggatacacagcgttcaccagaccaatgcgcagagcctcgtccgccttgatgttcagtgcagagtagaccagctgctttgccatacccatgccgaccagacgtgccagacgctgggtgccgccgaagcccggggtgatgcccagacccacttccggctggccgaacacagcgttgtcagagcagatgcggatgtcgcagctcatagccagctcgttgccgccgcccagtgcaaagccgttcacggctgcaataacggggatggggaagctctcgatcatcaggaacacatcattgcccagcttgccgaaggcctcaccctctgccttggtcatggtgctcatggaaccgatatctgcacctgccacgaagctcttgtcgccttcgccggtcagaacgatgcagcggacagtctcctgatccacagcctcaaaagctgccttcaggtctgccagaacttcgggattcagggcattcagtgccttggggcggtcgatggtaatgatctcaactgcaccctgcacctcggtttttacaaatgccattgtgaaaacctcctattcaaatcttatcaattatcacaaacagcccccggacggaggaaaggctctccggttcccttccccgtccgggtctgtcattcagtcaggattccaagaggtggaacttagtccatctcaacgatggtagcgcagcccatgccgccgccgatgcacagggtagccaggcccttgtgtgcaccgcgatgcttcatagcatacagcagggtgaccaggatacgagcgccggaagcgccgaccgggtggcccagagcaattgcgccgccgttgacgttcaccttgctcatatcaaagttcagagcctggctgacagccacagactgagcagcaaatgcctcgttggcctcgatcagatccatgtcagcaacgctcatgccggtcttagccatgaccttcttggtagcagcgatggggcccagacccatgacttccggctcaacgccagccaaagcaccggcgacccaggtagccagaggcttcacgcccagctccttagccttctcctcgctcatgatgaccagagcagcagcgccgtcattgatggcagaagagttgccggcagtcacgatgccgtccttggtgaaagcgggcttcagctttgccagcacttcgggagcgctcagacgggggccttcatcagtatcgaacacggtgtcgcccttcttgcccttgatcacaacgggaacgatctcgtccttgaaagcgccgtccttgatggccttgtcagccttcagctggctgttgtatgagaactcgtccagcatctcacgggtgatggggctgtagccgtacttcttctgataggtctcgttggtgcagacgttctcagcggtcatgcccatgtgcttgttgaagccgcaggcatcccacagagcatcgttgaccatggtatccacgatctcgctcttgcccataggagcgcccatgcggtagccgtaacgagccttctgcagtgcgaagggagccatgtccatgttctccatgccgcctgcgaccacgatatcagcatcacctgcctcgatcatctgagcagccatattgacgcagttcaggccggagccgcacaccacgttgacggtgacagccggggtctcgatgggcaggccagccttcagagcagcctgacgagcaacgttctggcccagaccggcctgaatgacgcagcccatgtagacatgatcgacctgctcgggagcgacgtttgcacggttcagagcttccttgatgacgatggagcccagctcaactgcgggaacgtttgccagagtgccgccgaacttgccaatagcggtacggcatgcagatgcgataacgatctttttcatgtgaataacctcctgaattgtgtatgtgttacttttcgtaagccatttttatcaaaacgcccgtaagcgcttttacaaattaggtctcggggtcttttttctgccggatcagcgcatacttttcgttgaccgccttttccacattgggtgtgacgaacttaccgatgtcgctgccgtagtaagctgcctcttttacaatggtggaagaaaggtagctccacttgatgctcgttgccagaaacatggtctcgatgccgggcatcagtgcgtgattggtctgcgcaagctggatctcgttttcaaaatccgtcaccgcccgcaggccccgcaccatcaccgaagcgtgccgtttcttggcgaactccacggtcaggccgtcgaagctctccaccgaaacattctggatgcccttgcagcattcctttagaagctccacgcgttcctccacggtgaacagcggattctttgcgctgttgttgagcaccgccacgatcagatgatcgttgatctttgctgcgcgcttgatgatatcgagatgcccttttgtgaccggatcgaacgaaccgggataaactgctgttgccatcgtctggtgtcctccttgagcgctgtgaaaagcgcgttttggttctgccatgatagcactttccagtcttgggtgcaagatttttgtgcaagctgtacgttttatcgttaaaatttaaacaatcaatgtcatgctgcatcgcagctgcttgctacgctataagtaaaccatatcgtcaaaattttatcaagtccttttgcaaagattttggtttttcagcaccaaacaatcgtccaaaaactccgcgaattttgtccatattgccagtcggtcaaaattttctcgataaactattgattctacacattgttaatgttataactaagttgtgcagatctgctgccctgtccgacagctgccttctgctggttatcaggatatcatccgcctgtgtcagagctgtgttcaaattgccaacaggtggtaaacatcctgcaaagatttgtccgtgcaggaagagtaaatgataaatttacaattcctttatgttattataggagaggatggtttataatggattttacggaactgtatgctcagaagaaaatgaccgccgctcaggctgccgcactggtcaaaagcggtgactgggtggattacggctgggctgtgaacacccctgtggcggtggatgccgagattgcaaagcgtctgcctgagctggaaggtgtcaacttccgcggcggcatcctgatgtgggtgcccgcgatcttccagatcgacgatcccgctgcacacatgacatggaacagctggcatatgggcggcattgagcgcaaggccattgcacagggcttctccttctactcccccatccgttattccgagctgccccgctactaccgcgaaagcccggatccgctggatgtggcggtgttccaggtgacccccatggacgagcatggctacttcaacttcggccccagtgcatctcatctgggtgctgtgtgcgaaaaagccaagaagatcatcgttgaggtcaacaagaacatgccccgctgccttggcggcatggagaactgcatccacatttctcaggtcaccggcatcgtggaaggcgag

SEQ ID NO: 28 - DNA, 11486 bp, unidentified
  source 1..11486: mol_type = unassigned DNA
tcagccattgtaaacctccaaaattctctgttcaaatttttctctgcctactctgtcgattgtaaacttaaagcgttcgctcggctttgcgttttctgcaaagaagttaagagcggcatcacagatttccataagtttttctttattttcgataaacggaataattgtttttcccttgttgattgagtttccgaaaagtccgccgaatgaaacaatgtagccgtgaattgtgtcccacgcatctgtcgggcaagccttgaagcatctgccgcagtagttacactttgaattgtcaacggaaattttcccgtcctcaagagtgattgcaccctgacggcaggcctttacgcagactccgcaaccgatacaagcgtcctctttccatgaaaccttgattccgcccttgataccgacatcgttttcctcggctttaagacagttgttctgacagcctgttataccgaacttgaacttgtgcggaagttcctttgcaaaatatctgtcgtcaagctcctttgcaagagcgtatgtatcaatacaaccgctgggacagattgcctcaccctgacaggctgtaattgttcttactctaggaccgcaaacgcccggttcaacatcgccctcggcaagtgcgtccttaactgcctcaacatcatcaagctttacaaaaggaatttcaacactttgtcttgatgtgaggtgaacataaccgtcaccgtagttttccgaaacctcggcaattttcgcaagctgtttagctgtgaggttgccgcctacaactctgagcctgagcgaaaaattatttttctgtttttgacgcataaagccgccctttttaagcgtagcataatcaactgccatttctcttactcctccgattcattcacatttatactgtctacagcctgtttgaagtcagactttaaatcctcaatatcctcaatgccgacgctgattcttattgtatcatcaaacacgcctgcgtttcttttttgttcttctgttccgtgagcgtaaattgtgcttgacggatgaattacaagtgttcttgtgtcgcctatatttgttgcatttgttgcatattttaaattgttgataagcttaaacgctctttctttacttcctgccctgattgtgaggattgcaccgccttttcccttcaacagcttttgacaaaggctgtaataaggagaagcttcaagagccggatagttgacttcgattccgttttgtgtttcaaagaactttgcaagctcaagagcattgtaacaaagacgctccatacgaagtccgagtgtttcaagtccgacagagttcataaaagcattaaacggtgcaaggcaacagcctatgtttcgccagataccgtttctcagctttgcaacatatgcaagccgaccgaattttttgtactctgcaagacctttgtatctttccgtattccattcaaaattgccgctgtcaacgattattccgctgattgaatttccgccgccgttaatgtactttgacgaggaatgaacaacgatgtccgcaccgtgttcaaacggctgaataagatacggagttgccgttgtgctgtcgataatgagaggaacaccgtgtgaatgaacaagctctgatacagcgtcaagatcggcaatttcaagtccgggattgccgataagctcggcaaagactgcttttgttttttcatttatgagcggttcaatctcctcggctgtcaccttgttgacatatcgtgtaacaattccgaaaggctcaagatctccaaacaaatcaattgttccgccaaaaagacctgcgcttgcgattacttcgtcacctgattcaagaatgttcaggagtgccatcgtaacggctgccatacctgacgaacacgcaaccgcaccgacaccgttttcaatggaagtaattctgttctcaaaagatgttaccgtgggattgcctattcgagagtaggcgtagccgggagctctgttgttgaacaccttttcaagctgttcggcagagctgtgcgaaaatgcactgacctgataaatgggagttaaggttgagccaaaaaccttttcaccgttaaaacccttgtgaagtaatgcggtgttaaactccataatatcaccaaccccttaatttcatacaaccaacccttttgtgtaagaccgtcgtaagaatttgtctgacggcttcgattgatataggtagattatactccattaatcatagtatttcaataggtttaataagattttacctcttgcacaatttttctttaaaatttgccgtaattccattatttcctacaatgcatatttgtttagtaggtattgatttttaaattaaaaactgttaccattattatatactctttcagcaaacaaaacgcacggaaaggagatgctaaaattgaagatttcaacaaaggtggaattcggaatcatcgctgttattgacattgcgtcacactcactaaacggcaatgcggtaacaactcccgaaattgccaaacggcaaaatatatctaaaaagtatcttgaacagattctctcatcactcagctcggcaggacttgtgcgaggtcaaaagggttcaaacggcggttatgttattgcaaaaaaccttaaagagattacattcaaggatatcataaacgcacttgacgcaaatgttctgagcaatgtttattttaactctcggggcgatgatgatgttatgataagacttatcgacaacagtctttggtcgaagatgtcgtcatatcttcaggaatatgccgaaagcattacacttgcacagctttgcgatgagtatatcaaaaacaatgaaattgaacacaacattccgatgtactacatctgatagattaaaaacaaaaagccaccgatttttatgtcggtggcttttcttgtttttatcggattttatttaaagctttcaataacctgacaggttttttcaatgtcatcatccgtgtgtgcaaatgaaacaaacatcgcctcaaactgtgacggtgcggcatagattccgttttcaagcagatgattgtaatactcggcatatctctttgtgtcggctgtggttgccgtgtcatagtcaacaacctttttgtcggtaaaaaatgccgtcataatcgaacccacacggttcacattaagtcctgcgttcttcattgcattttcaatctttgcagacttgcgttcaagctcgggatatatcgaatctttatttttttcaagaattttaagcgttgcaatgcctgcacttaccgctaccggatttcccgaaagtgtgcctgcctgataaacagaaccgagaggagcaacacactccataatctcttttcgacctccgtaaaccgcaagcggcattccgccgccgacaatttttccgagggttgtaaggtcgggttttactccgtaaagcttttgagcaccgccgagtgaaagtctgaatcctgtaatcacttcatcaaaaataagaagtgaaccatgcttttcagtgatttcacgcaggaattttaaaaatccttttttgggcggaacaacacccatatttgcggcacaaggctcaacgattacacaggcaatttcatcaccgcagttatcaaaaagctgttgcacggattcttcatcgttatactttgcaaggagagttgtgtctgtgtagcctttcggcacacctgcgctgttcggaattgaatttgtcagaagtcccgaaccgccctttacaagcaagccgtcggaatggccgtggtaacagccctcgaattttacgattttatccctttttgtaaagcctcttgcggcacggattgcgctcataaccgcctctgtgcctgaatttacaagtcggagcatttcaattgacggcatatttttgcggataagctcggcaagttcaatttctccgctgtggcacgcaccgaatgtaagtccgttctgacaggcagaagtcacagccttgataacatcgggctgtttgtgaccgaggatgttcggtccccatgagcagatatagtcgataaactcgtttccgtcaacatcataaatttttgaaccctctgcacggtcgataaaaagcggagttcttccgaccgaacggcacgcacggacaggactgttcacaccgccgggcataaagtcaagcgcctgtgcgtatagcttttcgctttgagttgtattcataaaagcacttccctatttgtaaaattcgtcaatccattttgcaacatcaagtgcgtggtatgtgattatgatatccgcacccgccctcttgattgcaatcatattttcgcacacaattttcttttcgtcaatccagcctttttcggcagccgccttgaccattgcatattcaccgcttacattataggcaacaagcggaaggtcaaagcgttcgcttgcggcttttacgatatcgagatatgcaagtgcaggcttgaccataaccatatccgcaccctcgtcaatatcgtctgcaatttcacgcagagcctctttgccgtttgcgtaatccatctgatagctttttctgtcgccaaatttgggggcagattctgcggcgtcacggaatggcgaatagtagcctgaggcaaattttgcactgtatgacataatcggagtgttgataagtccgttttcgtcaagtgcgtttctgattgcagacactctgccgtccatcatatccgaaggagcgatgatatccgcacctgcttttgcaaggctgacagccattttagagaggagcggaagtgtttcgtcattgagaatttcgtgaccgcaaacaacaccgcaatgaccgtgacttgtgtattcacaaagacagacatcggcaataataaggagtgacggataatttttctttatgtatctgattgcgttctgagttacaccgttatcgtcataggctgatgttgcaagctcgtctttatgctttggaattccgaaaataagaagtcctgcaatgccgctgttttcaatttctttaagaatctcgtctgctctgtcaagcgaatattggtagacattcggcattgaatcaacaggctttttaatattttcaccctctgcaataaaaatcgggtaaataaaatcgcccttgtcaattcttgtttcacgaacaagactgcgaatctgctcgcctgctcttaatcttctgaatcttctcatatatttatccttctttcaaagttacttccttgattatagtttccaaaattccgtctgtgtccttcgtttttgcaatcctgaacgaatttacgccgtgactttcaagtgcctcggcggtgatttcacctatgcagacaacggaagttctgtcggaaataattgctccgccgtcaaaaaatgtgttcacacccgacgcactcgcaaaagtgataaagtcggtatcaacaacggaattatcctgttttttctcaagctgaatgtcataggttttgacatcgtcaaaatcaatgttgttatcagccaaaatccgagtgagttcgggcgaaccgttttcggcacgcagaatcaatactttttcaccgcttttcaccgtttttgcaagcaaaattccaagttcacgggttgtgtagacatttggaatacagtccgcaaaaattccgtacttttcaagtacagccgctgttcccgaaccaatcaccgcaaacttaatatttgcaaaactgcggatatcctttttcaacttacgcagtcggctcataaaaatttctgcaccgttcatacttgtaagcaccacataatcgtaaccgtcaataccgtttattgcattgtcaaaaacttcgttgtcatgatattcaatcacctttaaaaggtcatgtcttttgacctttgcacccgaaagcgtaagcattttgccgagcttgtcggagagctttctcgtacctgtaacagtaaccgaaacatttttcaaaggtcttgtaattgtgggagcaaagtcaaattttgcggtttcgccaaccactataacggcaggcggtacaacctctgcggatttaacattttcgcagattgtcgagagagttcccctcacggtctgattttttgcacaagcaccgtttgacacaactgcaacgggagtatcctccgatttaccgttctgaataagattttccacaatgtcggggaggtttctcaagcccataagaaagacaagcgttccgtcggtttcggcacatttctttatattttcgggcagggtgtcctgtgccgtatgtcccgtgattatatgaacacttcggctcagatttctgtgtgtaacagggattcccgcaagttcgggaacggcaattgaggaagaaattccgggtacaatgtcaaacggaatatcggcacttttgagggcttcaatctcctctccacctctgccaaacacgaacggatcgccgcctttaagacgaacaaccgttttgccctctctcgccttttcaacaaggatttcgttaatattttcctgcttttcgctgtgtctgcccgaacgctttccaacgcagattttttcagccgtttcgggtgcaaaaccgagcaatgacacatctataaggctgtcgtaaacaagcacatcgcagtgtctgatatactccgcaccacgcattgttatcaggtcaaaatcgccgcatcccgcaccgacaatatacactcttccgttactcaatttcgctcaccagcctttttgcaagtttgattctgtttgaaatttcatctgttccgctgactgtttttttacagtcggcagacagagaaagcgttattttatcgttttcaacctttgaaattgcaccaacaggagttgaacaatcggcattgaggctgagcagaacctgtctttcggtttcaaacgaaagcattgtatttttgtcgctgatttcagcgagcattttggaaacctcgctgttttttctgctttcaatcgcaactattccctgacacggtgcagggagaaattcatcggcatcaaacgaagttaccgtgtaatcctcaccgttgtaaaggtcaagtctttcaagccctgcctttgcaagcacaagagcatcgtactcaccgttcaacagctttttaagtcgggtgtcaacattgccccttatatccttgaattttgcattaggatagattttctccgcaaaaagctttcgccttaaactgcctgttccgatgacaaagccgtccttaatttcaaaatcattgcgtgtaacaaaaacatcgccatagctgccccttggcaacacggcggaaatttcaagtccgtctgcaatttttgtcggcaagtcctttgcgctgtgaacggcaacatctgtttctccgctcaaaagtgacatttcaagctccttgatgaacacaccttttccgcctaaagctgcaagcggtttgtcaagggttttgtcgcctgttgtcgaaatgtaacccgtttcaattttaacattcggaaaacggtttttcagcgtttttattaacatttcggtttgtgcaagggcaagcctgctttttcgtgttccgatttttatcgtcattgttcgtattcctcaatcaaattttcaacagttttttcatcgggttcaagtcccgaaaggcaaagcgaaagaagctgttcaaaaatcttccttctgtcatcttccctttcaaccttctccttaattatcgggcgatatttccacaaaacctcggttgtgttttcgttcatactttcaaggattcccacaaaaagctctttaagatattttgcgtaaatcggacttttgcccgaagttgtaattcccgccgttatgccgtttttgcttgcaattgcaggaaaaataaatccgcatttttccttatcgtcaactgtgttgacaagaatatttttctcattgcaaagctgaaaaattctgccgttgagcgtttcatcatcggttgcgctgataacacaaaacgcaccgtcaaggtcgctgtcacaaaatctgcggtcaatgattttcacattcaaagccttgatttcatcgcagattttcggggcaacaacggttatgtccggcgagaacggcgtcagcttttcaatctttctgagtgcaaccgtaccgccgccgactacgagtatttttttgttttcaatgtcaatataaaacgggaaatatgccattagttattctctccgcactttctgtagatttcaagaattcttgcaaattcttctgccgaaacatcggatttcagcttataaatgaatttttccgaaaaatctgacggcattgcgttttttacggactgcatacacggcagaaattcgtgaaaggcaaggtcttttttgagaacttcaatttcctcaaaaattattacttttgcactttcaacactgtcgagtttgagagcattgttctcgtttgcaagctgttttatgcagtcaatgttaatgagccttacaccgcttattttgtggatattttcgtcaatgtcgggcggtacggcaaggtcaataaacagccttgatttttcggtttttatattgttttttaaatcataatatgtaaccgtgtaatgcggtccgcttgtggcactgattacgcagtctgcaaagtcaaacgctttgtatctttcgtcataatcaatcacattagcacccgtattttcaaaaacagtttctgctttgtgctttcgtgaagtcacggtaacgcttatacctttgtgcgacaaaagatttttcacaacagttgaaccgaccttgcctgttgcaccgattacaaggacattcagctcaccgtctttgaattttgccgcctcgtttgacgctagagttgcaacggaaaccgatgtttttgaaatggcggtttcggtcttgattttttttgcacaggcaacagccgcctgaacgcacatattaagctcatatgcaaccgtgtcgttgtcctttgcaaatgcgtaggctcgctttagctgaccgagtatttcatcttcaccgataaccattgattcaattccgcctgccaccctgaaaagatggagcaaagccctgtcaccgtagaaaagacagatgtacttttttagttcgtcaaaatcaattcccgaaaaatccgaaagaacggtttcaaccgttttcacagatgattcgtctccgcaaaaataaacctcggttctgttgcaggtgcagagaatcaaacactcgctgatattttcagaataataaagttcgtcaagaaatgtctttttttgctcatcgggaaaggcaagcttctttctcacaaccacatttgaagttttgtgacttacgctcaggcagtacataaaaatttcgctccgttacaaataaaatccgacagtaaaatacacttttaaagttattttattactgccgacagctattgtcaattaaagttagtcagttattttaccactaaacctatctgtttggtatgttttgattatactacattcaccattctatgtcaataaatttcgggttttgcttgacaaaaacagttattacaatataaactatacaaagatacctcccgtcagcaaacagcgggagttttattccgatgtaaatacttattgtaccgataggaatactaaatgatttgaatatgtattaaggagcgtttttatgcttaatcagttttcaagaacacagcttttgattggcaaagaagctatggacaagctttcaaaaacaagagttgcaattttcggaatcggcggtgtaggcggatacacggcggaggctcttgcaaggagcggagtcggcgggcttgaccttattgacgatgacaaggtgtgccttacaaacatcaatcgccagatttttgcaacaagaaaaacagtaggcaaatacaaggttgatgttgcagaggaaaggctcaaggacatcaatcccgacataatcatcaacaaacaccagaccttctacactcccgaaacctcggaaaaattcgacttttcaaaatacgactatgtagttgacgcaattgacacggtaacaggcaaaattgagcttgttatgcaagccgacaaagccaagacgcctatcatctgttcaatgggagcaggtaacaagcttgatcctacagcgtttgaggttgccgacatttacaaaacctcggtctgtcctcttgcaagggttatgagacacgaactcaaaaagagaggtatcaaaaagctgaaggttgtttattcaaaggaaaagcctatcacacccgttgacgatatgacaataagctgtaaaacaaattgcatatgccctcccgggactgaaagaaaatgcacccaacgcagacaggttcccggcagtaccgcatttgttccgtcggttgcaggtcttatcatagccggcgaagttatcaaggacttgattaagtaaatataatttttaacaaagcaaagcaccgagagaaattaccctcggtgctttgcttgtttttataggattttttacagttgatatcgtgattaaacagattagatgataaccgattcttcctgaagtgatttgttacggagaatctgaacctcatcgcctttggtaatgaaaagccgataaagaaatacattgaccttttcccctacggtaatcggagtttcgtcaagtcctctgtacgcataaaccgtgcctccgtcacattttacggcaatttcgatattgtcgcctctgaacgaagtctttataacctcgccgacggatacagacgctttttgtgcggttgtttcgctgagctttgtcacctttacaaattcgggacggataactgcacggtcaacattatcgacaacatcaaaggtcttgaactttgtataatcgtcaagcgtagtagtctgaccgaaaaatgatgcggaaaatgcggtttcgggatgctgataaatgtcaatcggcgagcctatttgctcaattctgcccttgttcgtaattatgatttcatcggcaacctcaatagcctcgctctgatcgtgggttacaaatatacttgtaacgccgagtctttcaatcatatccttaagccatgagcgaagctcctgcctaacctttgcgtcaattgcggcaaatggttcgtcaagcagaagaagattcgggtttggcgcaagcgctcttgcaaaggcaacacgctgtttttgaccgcccgaaagctggcttggataacgcttttcaagtccttcaagaccgataagctttacaagctcgtttactctttccttgataaatttcttgctctttttctgaattttcagaccgaaagcaatgttatcaaaaactgtcatatatctgaaaagagcgtagttttggaatacaaagcctatgcctcttttgcttgcgggaatatcgttgacaacctttccgtcaattacaatttcgccgctgtcgggattttcaagtcctgcaatcatacgaagaattgttgtttttccgctgcccgaaggaccgagaagtccgataagcctgcccttttcaataccaaagtttacattgtcggatgccttgtagtcaccgaaagttttatttatatttttaagctcaacatacat

SEQ ID NO: 29 - DNA, 19095 bp, unidentified
  source 1..19095: mol_type = unassigned DNA
  misc_difference 14051: note = a, c, g, or t
  misc_difference 14052: note = a, c, g, or t
  misc_difference 14053: note = a, c, g, or t
  misc_difference 14054: note = a, c, g, or t
  misc_difference 14055: note = a, c, g, or t
  misc_difference 14056: note = a, c, g, or t
  misc_difference 14057: note = a, c, g, or t
  misc_difference 14058: note = a, c, g, or t
  misc_difference 14059: note = a, c, g, or t
  misc_difference 14060: note = a, c, g, or t
  misc_difference 15486: note = a, c, g, or t
  misc_difference 15487: note = a, c, g, or t
  misc_difference 15488: note = a, c, g, or t
  misc_difference 15489: note = a, c, g, or t
  misc_difference 15490: note = a, c, g, or t
  misc_difference 15491: note = a, c, g, or t
  misc_difference 15492: note = a, c, g, or t
  misc_difference 15493: note = a, c, g, or t
  misc_difference 15494: note = a, c, g, or t
  misc_difference 15495: note = a, c, g, or t
aagagcggcttccagttggatcctcgtgtccgggtcaacgagccgctgggcttcaacgactacaataagctgcaaatgaacgcgctggcaatcgtctccgactcaggtacgctgcccgaggagagcagcttctatctgtccattgggcatcccattgccgccgtgtgcattcgtaccagtacagaacgccccgaggcactggaagccggtgatttcatcctggctggcatcactacccgggaactgctcaacgccaccgatatggcgattgaaatgaaacagaagggcgttctgggtaagccctgccccgactatgtggacgaaaccgtgtccatgaaggtggttcgcatcattcagggatatgtaaacgtggtcaataagatggtgtggagaaaagggtaagtgtgaaaaagatgggtaaaacagtattcatcaccggttcatccggttttatcggctctaaccttgccaagcgtattctgaccactgagccggataccatagtcatcggtctggataacatgaacgattactatgatgtccgcatcaaggaagctcgccttgcggagcttcagaaatttgaaaactatacctttatcaagggcaaccttgcggacaaggtacgtatcaacagcatttttgaacagtaccatccggatattgtagtcaatctgggtgcccaggctggcgttcgctactccatcaccaacccggatgcctacatcgagagcaacatgatcggcttctataacattctggaagcctgccgtcattatcctgtggagcacctggtgtacgcttcgtctagttcggtctacggcagcaacaagaaggtgccttactccactgatgacaaggtggataaccctgtttccctgtatgcggctaccaagaagtctaatgagttgatggcacacgcctactccaagctctacaatattccctccaccggtctgcggttcttcaccgtgtatggccctgctggtcgtccggatatggcatattttggctttaccaataagctggtgaacggcgaaactatcaagatcttcaactacggcaactgcaagcgggactttacttatgtggatgacatcgtggaaggcgttgtccgtgtgatggcgaaagctcctgaaaagaagaatggcgaggatggtttgcccattccgccctatgcagtctacaatatcggcaactccaacccggaaaacctgctggactttgtgcagatcctgtcggaggagctggtgcgtgccggtgtactccctgcggactatgactttgaggctcacaaggaactggtgcctatgcagcccggcgatgtgcctgtgacattcgcagataccgagccgctggagagggacttcggttttaagccccacactccgctgcgggaggggctgcggaagtttgctgagtggtacaaagagttctatatggaataaaagacgacgggaggaattatatgcgctgcgaggaaagattctacgaaatatatggaaaagatcccgtggacattagcttttgcccctatcggatttgccccattggtgcccacagtgatcacaacttaggaaagatcacaggacttgcaattgataagggaatccatattgcctacaagcccaagatgaatggcgttattgaaatgtgcagtcttcaattcccgaaacgtgcccagtggcatattcgggaaatcggcgaaaaaaccggcgattgggcagactatctgcggggggctacctgggcgctgagcaatcggtttccattgacagtcggactcagcggcgtcattgagggctcgttgcccatcggagggctttcttcctctgcagcggtgatactgtccttcttggatgcattgtgccaagtcaatggaattaaactggagccgtcagagctcatcagcattgcatttgatgcggagaaaaactatgtgggcgttaatgtaggaaccctggatcagagctgtgaggttctgagcaaaaaagaccacttgctatatctggactgtaaggataacagctacgagctgattcctacgaatcccaacatgaagccctacagaattgctgtttttttcagtggattggagcacagtctggctggctctaaatacaatatgcgagtggatgagttgcgttctggcgtatacgctttgcaggcttttgcgggtcttgagtacggaaaattcaatgaggctaatgcccgtgacgtttcgtatgagatctaccagacctataaagataagctgccgctgcaatgggcaaaacgctgtgaacattggtatacggagttcaagcgtgtggaagccggtgcggaagcatggcggcgaggggatttggaagagtatggacgcctgtcctttgaatcgggctggagcagtatccataactgggaatccggtgcgcctgagcagatcaagctctatgaaatcatgcgggaaaccaacggtatctacggtggacgctttagcggtgctggctttaagggatgctgcatggcattgattgatcccagcaagacagatgtcattcgggaagaagtggagcggaaatatctcactgcattcccggagatgcgtggaaagtacagttttcatctgtgcgagagtgcggacggcgtagggcataagacggaggactaatatgaagtgcttgattttggcggcgggatatgcaactcgcttgtatcccttgacggagaactttcccaaacccttgctgaaggtaggggataagaccatattggactggctggtggatgacattgacactgctggtctggtggacacctatgtggtcattagtaatcacaagtttgcccgccattttgaagactgggcggcaaccaaaaaacagaatatccgtgtggtggacgatggaacaagtagcaatgagacccggcttggtgctgtatgtgatgtgcagtttgccattgaccagttggggctggatgatgacctgctggtgattgccggagataacgtgctggatttctccctctccaagtttgttgcctatgccaacgagaagaaaacctcttgcatcatgcgctattatgaacccagcgaaaagaagctcaccaaatgcggcgtcgttgagttggatgatcaggataagatcctttcgatggaagaaaagccagcccaacccaagagccactggtgctgccctccattctatgtctacacccgagaggatgcccaaaaggtcaaggatgcaatcgaacagaagaaatgtggcaccgatgcgccgggcagcttcattgcgtggctgtgcacagtaacggatgtgcatgctatggaaatgccgggcaaacggtatgacattggtaacttggaaagctaccagcaggtccagcaggagtatcagggaatcaaggcataagtcttgctaaggatggaagaatgtatagaaagggagaaagaccatgaaaattgcagttgcaggtaccggctatgtcggtttgtctatcgccacgttgctgtcacagcaccacgaggtcatggcggtggatattatcccggagaaggttgaccttattaaccacaaaaagtctcccattcaggacgagtatattgaaaaatatctggcagagaaagacctaaatctgactgccacgctggatgctgaagctgcctataaggacgcagactttgttgtcatcgcagcacctaccaactacgatagcaagaagaacttctttgatacttctgcagtagaagctgtcatcaagctggtgatccagtataatcctgatgctatcatggtcatcaagtccacgattccggttggctttacagcttctgtgcgtgagaagtaccactgtgataacatcatcttcagcccggagttcctgcgggagtctaaagctctttacgacaatctgtacccgagccgtatcattgtgggtactgatgtggataacgctcgcctggtgaaggctgccaacacctttgcaggcctgctccaggaaggtgcaatcaaggagaatatcgataccctgatcatgggctttacggaagccgaggctgttaagttgtttgccaacacttatctggctctgcgtgtcagctatttcaacgagctggatacctatgcggagatgaagggactgaatacgcagcaaattatcaagggtgtgtgccttgatcctcgtattggtgatcagtacaacaacccaagctttggctacggcggttactgcttgcccaaggataccaagcagcttctggccaattacgctgatgtgccggagaacctgattgaagcaatcgtggagtctaaccgtacccgaaaagactacattgctgaccgtgtgctggagatcgctggcgcatatgaagcaaacgaggcttatgatcctagcaaggaacacaatgtggtggttggcgtataccgcctgaccatgaaatctaactctgataacttccgccagagctctattcagggcgttatgaagcgtatcaaggctaaaggcgcgacagtcattatttacgagccgactctggagaatggttctaccttcttcggcagcgaagtcgtgaatgaccttgaagaattcaaaaaccgcagccaagccatcattgccaaccgctatgatagctgcttggatgatgtgcaggacaaggtctacacccgcgacctgttccgcagagactaatacttattgcagccatgcgtcggcatggctgtgctgctcaagtgtgctacctctccgtggtgagcagcaggcaacggataattatccggctaacggcacattttattcgttaattcactcattggatgaggaaaaaactataatgggaaagtattttggaactgacggtttccgtggcgaagctggaatcactctgaccgcagatcatgcctacaaggttggtcgttttctgggctggtactacaacgcattgcgtgagcgcaacggcaacaacgagcctgccagcatcgtcattggcaaggatacccgccgtagctcttatatgttcgagtacagcctagtcgcaggtctgaccgcttctggtgcagatgcctacctgctccatgtcactactaccccttctgtggcttacatcgcccgcgtggatgactttgactgtggcattatgatctctgccagccataatccctactacgataacggcatcaagctgatcgactgctacggcgaaaagatgccggaggaaatcttgctgttagtcgaggattacattgacggaaagctccacgtctttgacaaggactggccggagctgcccttcgcccaccgggagcacattggctgcactgtggactatgtggcaggacgcaaccgctacatgggttatctgatctctctgggcatctactctttcaagggggtcaaggttggtttggactgcgccaacggtgcaagctggaatattgccaagtctgtttttgatgcgctgggggccgatacctacgttatcaacaacaagcccaacggtctgaacatcaacaacaatgctggctccactcacatcgagggcttgcagaagttcgtggtagagaaggggctggacatcggttttgcctatgacggcgatgctgatcgttgcctgtgtgtggatgaaaagggaaatgtcattacgggtgaccacatcctgtacatctacggctgctatatgaaggagcgtggcaaacttctgaccaacaccgtcgttaccacggtcatgtccaactttggcctgtataaggcttttgatgagaagggcatcggctacgccaagactgcagtgggtgacaagtacgtctatgagtatatggctaagaacggctgccgtatcggcggtgagcagagtggtcatattatcttcagcaagtacgccaacactggtgatggtatcctgaccagtctcaagatgatggaagtaatgcttgccaagaaactgcccatgagcaagctggctgagcctttgaagatctatccgcaggtgttggagaatgttcgtgtgaccgataaaaaggccgcacaggatgacgaagcagtgcaggcagcagtcaaggccgtagccgaggcactgggtgacaccggccgtatccttgtccgtgaatctggtacggagcctgttgtgcgtgtgatggtcgaggcacctgatcatgatacctgccagaagtatgtgtctcaggttgtggagaccatcaagagccggggttatggagtttgaacgcaaagctgaaacagaaaagtgttcatgcgctgttacttgcttttgtcgtggcttcaatcttgtttttattgccatatgcctcggttgatcatgattccggcttcacgtcttcgaatcttgaagtgaaggagaccgtggaggaaaacgtaacgaacgcgagttatgtgaactctgacggggttatcacagatgccattgacatgggttatgcgacagtacagagaacgcggaatgcaaatgggcaggttacagaagagttttacctcgatgctgctggaaacccagtggaacggtatggcgattactatggcatctcatatgaatataacagtgaaaatgttgtaatcaggtatcttggcgcagataagcaaccaatgatgctaggcgcaggttattccgccattgtgagaacactggtggatggaaaagcaacggacgatttctactacgacctaaatatgcagccagtccgatgcacaggcggctattacggtttgtaccgagagtatgatgagcaaggaaaaaattgtggcatcacttatctcggtgaaaatggacagcctgttatctgcacatctggttatgccgtcaagacgtatctgcgtgattcagaagaaaccgttattggcgaacgatactttgacacaggagaaaaccctgtgaaatcttctcttggccagtatggcgagctatatcagcgagacgaacaaggtcgtatcagccagataacttatctcggtgcagatggcaatccggcaccaacgactgctggctatacggttctgaagcgtacttaccaccgggatggtacagcggacatcgatatgtattttgatgctgatagtaacccgatggccttatccaaagggcagtatggcattaagcgcagcggaaaggtgaatcttctgcttgacaaaaacggtcgtgttatgctgtgcgtagacaatgttctgaatggactcccatttatggttgtcattttcggatgcgttatctgcttgctgatactggtgttgccgaaaaaaatgagtgttctcttgacggcagcgtatattgcgttcattctatatgaaaccctgatgttccgtgaggccggggatgcaaggacaaactttgttttgttctcctatgcagatcgttttctgactgagcaatctgtaagagtgggggtcatcaataacatctggctgttcattccacttggaacggggctgtataggtggtttcagaagaaatgggtgttgcagattccttttgtgatgtctgtggcaatcgaaacgacccagtatgttacgggacttggcatcgcagagttcgatgatgtgttcggtaatacgatgggtggatggattggtgtgctgacagcatgggtgtggttgagcagaaaaatgagcttgaaaaatagagcataaggaagtatacatgtctaattttcttcgttatccttgaaaacgagacctatatagtatatatttgagctgtgagagtcattcgttatggatgctcacagctttgtcgctcgaaactttgcacacctctacgcggtgggcggcaggcaacgcattagaatgtggctgagatgcagagtcgggtatagataaagaaatatttctggaaagggatactagagtgacgaaaaaagaattcgagcttaacttctggcagcactatctctggctggaaagtgaattccgtacagtgcttgaatatgtggaacttgacagtgctaattattctacatattcaagaagaattgaaaagctcattctccagattggatcagaatttgataatgtgtcacgggagatatgtggtttgcaaaatgtggatcgcacatcgatttgcgattactataactattacacatcaaattataataatattattgcgtccatagtgatagctggtgatgttcggctcacaccgttcgatggatggaataacaccgcaccgggagaaacacttgcattttggaaagcctataattctataaagcatgataggatttcaaattacaaggaagcgtcactgaaaaatgctcttgatgcaatggcggctttgttctgtgttgagatgctctatgcgaaaaagttgtatattcatgatgctaatgaggaaaatagctttccagaaattgagagcaagttgtttatattagatgggttagaacatcgcatccgtccttccaaatttgactcgccatatgatttatatgacgatgatgagggaaagaagataaattaataaagaaaggcggatatcttatgcccagaaccaaaggtagcaaaaacaaaccgaaggctactaacgatttcgcatcccaaattacagagaagaaggaatctatcgtttccctcacttcagaaatcacttccatcactgccaacatcgacactttaaaagctgacctaaaagagaagaagactgcgctcaaggctgcccagaaggaactgaccaagctggaggccaagaaggctgctgctgaggcgaaggccgccgaagctgctaagaaggtcgaggccgaaactgtgctgaagaaactgctggcaagcggtatgaccgcagatgagattcttgaaaagctgaaataaagtaatatgccgtgtgttcgtctccttgtggagcatttgaacacacggcttttactattattggaaatcctatatggttttaagacttaatgtgatataatagaaacggcagtttaccgtactacttgtaaagggcaggtgaatgtgcagatgtacatcatttgtcatagcgagaaattcgtgttcaatattgataagattgttgaagctatcacaaaggcttcaaaagcaacattgaatcggatgaacacccgaatcaccaaggaaattcaacagttgttggatttgggtgataactcgcttgaagattttccgcattctcagtggctttatgaaagaattgcggagttggagcggatgcggaagtacatcaaactcctaaagaagatgaaaagcaataaagttccagcgaagctgcacacgctttggctttgcaggataaaaaacagcagtcgaacactggcgagcacatcacttaacccaatgagcatcgcactgcctgttccgcccacgtttgaggctaccttgagtagttttggacgtgggagggatttggatgccctcgcatgctgagaaaaatccaatagagattgaaaactactatcacattatagacccgaagcgtaagctgtctgagaaagaaagggctgaagaggtaaatagggtgttagtgaatatgcctgcttgttttccagaagcactacggtatgtgatgacacgtttcggatttacgcaagaggctctggcttttgaatcaaaggtatcagagtcaacgattggtcgctacagaaacggaaaggttaaaagtttttctgagaaaaacgtggtggctctgtgtgttgccatgcaccttcctccgtggctttcatttgaactcatagcaaaagcgggttttagcttggctgcgaccagagagcagcaagcatatttaatggttcttagctgtatgtatatgaggtcggttgatgaggtgaacgactatttgaaagaaagagggtctgatttactgtcccaagtggcggcataagattgtcgagcattctgagcttctaagtcaaaaatgatgagccgtgtgtccttctccggtaaggagttgaacacacggctcatttacatttatggttattcccattcctcatcccgggctcggagaagatcctgtacttctttttcggttgccgggcggatggcaggtctgttctggtagtccgttttgccgcagtctgggcaacggtcgagcagcgactctgcctcaaagcagtaatggcagacatcgcagaaatagtagttcacaacacgcaagttgtcaagcaaaaaatatatatttgcataattctatgaaatgcaaagcatttaattgattgcatagcattgacaggtatgcaattttcaaatataatagatttaaaggtggtgataaagtgggaaggaaaaaggcagtgaatctatttccggaatatgccagatctaaaagggctgatgcagaggcactgagccaattagttttggcagccaagggaaatatgacgatgaagaagtttgctaacaaatgtggggtgaacacttctaccatttctcgtattataaatatgaaaatggaaaccgtatgctctgatgaagtaattcttgcaatttccgagaatgccgcagcagagagtggcgttaccctcgaagcattgcttgccgctaacggtatggtgaaactggtgcccgatataacaggtagacctatagaagatgctggtagtatgaatgaaggcgagcaagaggcgaaacattccggtaaggctatagtgacaacaaacaagtttggtcatcttagtcacctaaacaaacaggccttctgccaaacgtataatattgctgattatgaaatgcgaatggtggaaacaagtaggcaaataattttaaatgaaattatattaaatggatatacggttgagcttattacgtctgaaaaagcctactggtcctcattgaaacgctattacggtgattatgcaataaaaacagatgcgttaaaaagctacggcatcgacacatggctcttcgattgtaagtcgtatcacactggtaaagtagccgccgcatataaggcactagaaaaactatttgcactagcttacatgaatagcccaaaggatgcaggtgtaaagatatcagttgttgtagaccataaagatatgtttcagcaggcggtcaaggtgtattcaggtataaaggttcgggactgtttttctgtgattttgataaacgcacaaagtcgatgcgttgtggaggaattctgcattccaagagttgatggaacagaggtatcaatctttagaaacgactaaattgggataggaggcagggaaacatgagtgtggattatggcatttatgcgaccaaaggtaaacggatgctacttgcaatccgggcaatggtcaatggccgtaaagcggtggcgtatgtgaagaatggaaaggtacaagcctatgagtacttagatgatttggcagcccagtgctgcgttggaccctgcctcaagtttgaggacgagaatgagaagaagcggatgtgaattagcacacttggctcatcggaatcgtgtgagccagtcaaaaactaaactgctgcctgtttggtgctgctcgaatgcgtagtaagccggggtagacttcaaagaaatctgaaaaatttcggattttaaggagtctattccggcttttttcgtttataggggcgcacgagtgaacttgcacaaaaacagaactccgggtttggtattctgtccaaagatgtcgaaatggtatttacgctggataattttggtgctataatcatcatgggatttaggccaaaaggaggacttaacccatcatctttattccatagtgtaaatgcaatacgacaaaattggacagaaaggataaccgaaaatgcgaggtatataaggctctgaattgattagtatagacagcctaattgtttcagcaaagatatgtgtttgattggtaaaagctgaaacaaatttcttgatttaaggcgtacagatccaaagtacataattagaaaagcagtagaaacgaatttttttaacagcgcaatagaactctgagtagataaactcgaaaacaagaatgcttttataaattatgtaaggggataagtatgctcattcgagaattggactatattttcaattcgatctgacttcgcaatcggaatctttgtatatacaaagaccggagaagctaggatagtgtacttttatcaagtcactgagtcttagcagctccggtctttttttgtttgcatttgcagtatggaagggggtgaaccgaggtggcatctgctgtacataagaatatcgagcctaaagtggcggctgttaatgccaactcggtttgccgccagttgtcgcagaatactgctgagcaggagtttgttgctccggatgagtttgtcgctgaggttcagtggtctttgtcaatacgagagctgatcgcaggtctggagtttggagatgctctgaagctgttgatgaatgaccgggatatgtctgtagagcagatggagtcggagtctggactctctgtgtccacagtgaagcggcttcgcgcaggtcaggaggcaagcgcagaacaaatcgttgccatttcggtggcgttgcgtcttccaccaatggtcagcagtgatttattgagaatgtgtggaatcacactggacttcaacaatcaaaggaataccgtctatcagatgattctgacgagccattacaaagacggtatcgagcaagtcaatgtctaccttgcggcatgtggatgcgctccactcaaaactgcctgctaaagtacctacaacagaatacccatgaggcgattggaccgcaaaatggtctggtcgcctctttttttgaaattttttctgaggttagggctcagaaagtgagctctaaatggcagtaaaagggcgaaaaaccgtgctgtaaagccatcaaaaatgacctcaagctttgcagaagaacggaatatcgatggttttcgtgctgctttttagagctcacttagtgagctggtgatttgatcagtcttcagctatcatgtagtcagttcaagggacgagcccaaaaggacagacccaagaacacaaaaaaatatcgtaagcccgattctagagaaggcgaaggataccataacggagttttaccagctggcagatatcatctgctggaggtgaaacagccggtctatgggtgtacctcccatctctggaatcgggctttttgcattttgcaggcagtcccagctcagaatgtgagccctgctccgcttccgtcatcggtatccttctccctccctgagtccgggggaaaggacaagaaaatgactaacatgctgatgaacggtgcagttgcaatctatggcggcgtaggcgtgatggagattcatcagccgttaccgcaggcagtggagagcgtggcacaggctgtcgaggacttggcagtcaacgcacacatctctctgcgtgagctgaagaactgcgtggacaaggtgctggagaagaagattcccggctataagcagctcatggaaacaaatccggtggtggcagcaagggcaaccgtgaacggtgcgacgatcacggcgtatacgaacggctacgcagtttacgaagcagacgatgcacacaccgtgctggatgtgaaccgttgcggtgactaccgctatgatttcaacgatggcacctatgaggtcgtcccggctgaggtgttcgaggatgcggagtggactgtgcgcctggttatggagggcgaacgccgactggagaataaccgcagcaagatcagccgtgactacgaggagttcgctctgtcctgcgatggcacagattggtgcgatgccgctatggtggacttcatggaggcagaaaacgctgagatgctggcggacgaggaactccggaagctgtatgccgccatgagcaagctcacggagcgtcagcaggaagtcgtccagctctacttttataaggggttgaaccagtacgagattgctgaggaacttggcattgctcgccgttctgtcgggaactgccttgagggagctttgaaaaaaatcagaaagtatttttaagaaagtacctcccaaacggcaaaaaatcgtgcgctttatgagaggacttcctctcacgaatacatccaaggaggttacaccccatgagtaacatcaagaatccccagagcaaccccttaaagagttcggccccggtgcggccgcccnnnnnnnnnncgcccggtggcgacaccactccgaagaaagtctatgtctgctctccgttccgtcctacggcggtatcgctgacagacagggcagaggagcagcgttccaatatcgagagggcactcaaagcctgccgaattctcgccatgatgggcatccaaccactggcaccacatctgtacttcactcgttttctcaaggacgatgtagcagcagaacgtgctgccgggatgcagtttggcctgtcatggctggaacaggcagatgagctttgggtgtttggcgacacggtgtcggagggcatggcacaggaaatcgccaaggcgaaagaactggggaagcctctgccatcaagtccgcgatggcagagcttggccccaatgaagtgaccaaccgcatcaagattgagcctctggcccagcagaagctggcggaatccctgaaccagaagtacggcgaggatgcggtgttcatcaataaggtggtcatcaacgatatggattttgaggaagcctataatacggccattcagcagaagtccatcgcccagcagaacgctgataagcagaagatcgagaacgaggctgccattgctaaggccgaagccgacaagcaggtggcgatcaccaatgcagaggcggaggcacagaagacctccattgctgcagatgcacaggccgaggcaaaccgcaagattgcagaaagcctgtcggagcctctgatcgagtaccagaagatccagaaatgggacggcaagctgcccaccgtcagcggcggcaatgcactggtcagcatcgacccggcagagtaagcaagtacacgaaccgaggacagggcggaggctctgccctttctacatgaaatggaggataaagactatggcagttacgaagaaaatcgagatcgatggtcagatggtggagttccgagccagcgcagccgtgccgcgcttgtaccgcattaagtttggccgggacatctacaaggatctgagatcccttgaaaaaagcgtggatgacggcaacgaggagagctccagccttgacctgttcagtctggagatgttcgagaatattgcctatattatggcgaagcatgcccatccggatcaggtgccggacaccccggatgagtggctggagaacttcaacaccttctccatctatcagattctgcctcagttgattgaactgtggggtctgaacgtgcagacggaggtagaggcaagaaaaaacctcgcaaaagtgagcgggtaatgaccaccccgctcttcatgctgcgctgtgtgcagctcggcatcagcatagccgacctcgacttgctgaccatcgggttggtcaatgacatgttcacagagcggcagaacgatgagtatccgtatcaggagctggcatcgcaggctgactttgaccggttctaaccaaactttcgtgcnnnnnnnnnnagcgaatgctgggcgggaaaatactgtgatagacagtcctattcgatttcaacatcatcaaaaccaacaaggtcatcttcagtgataccgagacgtcgaaacaactcttcttcggaaataaagggagacgcagtttgttttagagaattgatatcgtttataaagacattgtgactggccaaaattaattcagcgtcatcaacaacatgataatagctgtatgtacagagcaagtcgtaacattcggaaatatatccgagtatatcgtactttttgaatagttcagcacattcgataggtgaaatatgccatctggtctgtgctatgcgaaaaacccagcattgcatatctgctatgtcaatttctctttcggtcatgcggaactcctatgcagaagcagaatcggtgggcttgcgagtatcttcaaagacattgcggagataatccgggccctccatccaaagaccagtggagtaatcgaacagttccttataagcaggagagctcgaaaactcaaagaaagcctgattgaagggaacacctgtttcggtgcagtaatcttcgagcattgcacgcatgacgtttacagcacaggtttcgcgctgttcatcgctgatattataggtgcttgaagtcatagagatcactccttacaaattcgagggattggattgccttttcgttgcagaaacagaactggtcttccagacgattcggcagtagtgctttgatagcaaagctatcggcgtcttcggagcctggctcgccataagcgcgcgtggtgtaaagctgcaaggtacgagcagtttgatcatcggctattttcccaccgatgatatcaaacttggcataccgttcccggacatccgggaacaatgttcttctacggtttgaagccacaaaatgcagccaattcctatccgcagcgttgaataagtgaatagcaatgtcaggattcatatgaagtttgaaaacagaaatgtaaccaatcgttgtgccagtaggcagtctttcctcgttgacttgtttgttcacagacagcggaacaaaaccttgagcctgcttgtaggagcttgtgacgtagaaaccgcgtccgaaatcttttccttgcttgcatttgttaagatcgatttcggacacctgtgtgaaactaccgtgatagaggagcattccatttgttaatgtcagcatacggaaacacctcgattcttaagcatttcctcgacatcgtccaaggcgcactcatagctgctcaaatggagaaaatcatagcatctggcaataaatccaaacacatcattatcctgaaatatcttcgtgcaggcttcgggagactttttccacttggcttgagccatacggaaaacccagcactgcatatccgcaatgtcaatttgatgttcactcatagggcgtacctcctttgagtacaatttctcaatttaagtatagctctttttccggctcatatcaacgatagaattgtaaatttttaagcccccataagaagtaactcacgagttactttcctacgagtatcatatttctctcggcctattcgccttgtgcggatgggcctttacttataccccgaaggaggtggttatccgcatggcatccagaatcgcaggcattaccgttgagatcggcggcgatactacaaaattatccaaggcactggaaggcgttaacaagtccattaaaacaacgcaggctgggctcaaggatgttaacaagctcctgaaactggacccctccaacaccgaggctgtcacccagaagcagaagatgctgaaggaagccatcgaagccaccaaggagaagctcaccaccttaaagacggcggcagaacaggccaaccagcagcttgcggatggcaagatcacacaggaccagtacgatgcactccagcgtgagatcgtggagacggagcagaacctcaaatccctgcaggaacaggcggcggtaaccaatacgacccttgccaagatcgatgcggtgggggaaaagctccagacggtcggctctcaggtcgagggtgtgggcaaaaagttcttacctgtcacggcagccgttacgggcttaggtacagcggctgtcaaaacagcggcagactttgatcaggaaatgagcagggtcgccgccatttccggtgcgaccggctctgacttcgatgccctgcgtgaaaaggcccgcgagatgggtgccaagaccaagttttccgcctccgaagctgcctccgctatggagtatatggcgatggccggctggaagaccggggatatgttggacggcatcgagggcatcatgaaccttgccgcggcatccggtgaagacttggcgactacctcggatatcgtcacggatgcgctgactgcctttggtttgtcggctgtggattccggtcactttgcggatatccttgcggctgcatcgtccagtgattctaccacccagatgaaaacggatacctctaacgcatggtctggtgtggaggcagaagcccagaccgcatggtcgggtgtgtctgattccgtatcaactgcctgcaccggcatggcacagtctgtgacgagccagatcgacagcatcaaagcatccatgtcggcggcatggtccggtattgcatcggacaccactacggcatggaatgcggtcaagaccaacctcacggcagcatggagcggcatcacgacttctgtgacttccggcctgaacaacgtaaagaccgcagtcaccaatggctggacacagctccacacccttacaatatccagctggtccggcatccagtcgagcctgacggcaagctggaattctatcaaatccgccagcacaactgcggtcagtgcagtcaaaacggttgtcaccaatggctggactaacctgcgcacgttgacaacatccagttggagttccatccagacggcactgaacacaagctggaacagcatcaagagcgcaacgacagcctcggtcaacgcagtgaaaacttccgtcacgaccgggtggacgaatctgcgcagtttgacaacgtccagttggaattccatccagaccgtgctgaatacgagctggaacagcatcaagagtgcaaccaccagctcagtcaatgcggtcaagagttccgtcacggcggggtggaacaacctcagcagcctgaccagcagcagttggtcgagcatccagtcggtactcagttccagctggaacaccatccgcagcacggcatcttcggctgtgaacgcagtgaagtccacggtatccacgggctggaacggagtcaagtccacgaccagctctactttctccagtgtgcagtcggcggtgtccggcgcaatgtcgaacctgcgctccacggtttcttccggtgtgtccggcatcaagagcagctttaactctctcagctccattgcttcttcggcatacagctggggcagtgacatctgctcccagatggcggccggtgttcgtgcggcggctggctcggtcgtccgggctgcagagaatgtggcaagtaaggtcagaagtctgctgcatttctctgtgcctgacactggccctctgtctgatgcggcgttgtcatatccccagcggtag

SEQ ID NO: 30 - DNA, 7933 bp, unidentified
  source 1..7933: mol_type = unassigned DNA
ttatttaccctcgtatgctgcctgaatctcttttttgaactcttcctcgcccactctctgaagagtaagtctgaaacgctcaccaccgtttgcatgcttctcgaagaaactaattgctgcatctgtcactctgaaaagagtttccttgtcgcggataatcggaactagctgctctcctttatagatgtggtttccgaaaagtcctccaaacgataccatatatccaggagttcccttccatgcatctgtcggacagctctttacgcagcgcgcacagttgttacatttgtctctgtcgatgacaatcctgccatcctccatgctaagtgcaccctcgcggcatgccttcacacatacaccacactggatacaatcgtcatggctgcactctactgtcatgcctcccttgattccgacatcgttttcctcagcctttaagcagttgttctgacagcctgtgacaccaaacttgaacttgtgaggaagctctcttccgaagtacctttcatcaagttccttagccagagtgtatgtatcgatacatccgctaggacagatttctgagccctgacacgctgtgacagtacgtactcttggtccgcagacacctgttcctacaccgccctttgccagttcctcttttaccacattgatatcctcaaccttgataaaaggaatctcaataccctgacgcgatgtcatatgaacatatccgtgtccgtatttctcagcaacctctgctactgttttgatattttctgctgtaagatttcctcctacaaccgcaattctaagcgagaaacagcccttttgcttctgtctcatgaaaccgcccttttttagggccgcgtaatcaactttctccgccatttttaatctccttactgtgtaaatatgttaatgttttgttttatatgtaaatgcatatgcacgctctcatttgcatacacattgataccttattattatggcttaatcagctatatttgcaaaagcctgtgcaaaatcctccttgaggtcatctatatcctcgatacccacgctgactcttataagatcctcaaatactcctgcatcctccttctgcttatctgtgctgtgaagactgattgtggagcccggatgaatgacaagtgtctttgtatctccgatattgctgagtgtgtatggaatcgtcaggctgtctataaatttaaatgccttttccttgctgccaaccctgattgtaaggattgctccatagccgtttgtgagctgtttttttgctatttcatgccatttgctgctacaaagccccggataattaacctttatgtcaggataattgttttctatccatgatgcaagctcgagtgcattagagcattctctttccattctaagaccgagtgtctcaagtcctataatatttaagtatgcattcaccggagctaaacaggcacccatatttctgaaaagactgtttctcagctttgcgacaaatgccataggtccatacttcacataatctgcaaaacccggatatctgttcttgtcccatttgaacttacctgagtctgtcagaataccactgattgcattgctgcttccatttatatatttggaagatgaattgaccacgatatcagctccatgctttaaaacctgtatcaggtaagctgtcgatgtggtattgtcaactacaagcggtatatcatgtgcgtgtgctatctctgcaagcttctcaatatctgtgacatccagacagggattaccgatagtctctgcaaaaatcagtctggtatgctcattgatgctgtcctctatctgctgccagttgttgttctcgacatatctggttgtgatgccgaaggcctcaagatcatggaacaaatctattgtgccaccgtagaggctggcgcttgagatgagctcatctccactgcttagtatatttaagaaggtattcatcagtgccgccatgcctgatgcgcatgccaccgatactattcctccctcgagctttgttattctgttctcaaaagctgtaatcgtaggattggcaactcttgtgtaacagtagcccggagctttgttttcaaatattttttccagatctgccgcgctctcctgctcgaaggcgcttgtctgatataccggtggcagtgtagagccatttgtctcttttgtcacgccggcatgaagtaagcttgtattaaatctcattgttttcttcttctcgttaattcttacatagtctattgtgttactaggaattgatgagattattatacaaacgtgtgtgttgaaagtcaatgctatcagttatacaaattatttgtgcgtggttatatattttgtttatagccattaatgtcccttaaatactctgcggctgtcgttgcggcatttgctccgtcagatactgcggttaccacctgacgcagtgtcttggtacggacatctcccgccacatacagtcccggctggacgcttctatcatggtcaccattttttgttgcagcatatgtgatgccgtcctcacctgctactacatatcctctctcatcgagctgcaccagattctttataagctctgactgcggtactgagccatatgccacgaatactccgtctacagccagtgtcctgccacttttaagctttatgcctgtcggctttttttctccatatatttctgtcactgcttcgtttaggacaagctctacattttctttctgctttaagagctcaactgtgctctgtgcaccgcggaagctgtctcttctgtgaaccagatagaccttctcacatatatcggacagatataatgcatcatccaaagcggtatctccgccgcccagcactgcggctgtctttcctttatagaatgctccgtcacagattgcgcagtaagatactcccttaccggtatactcatcctctcccggcactcctgcctttctcggatatgctcctgcggtatagatgagcgctcttgcctctgctatcgtgtcatcatcgaatttcactctgtatatcactgattcttctttctcaccattttgcactgcttctatctgcactgcttctttttcgataaattctacatcaagagacactgcatgctccctgaatttttctcccaggtcgtatccgtttatgtttggaagccccagatagttgttcacatttccgctctcggctatctggcctgtcccatcgtattctttttctgctactgccacattcagattggctctctttgcatatattgctgcagacagtcctgccggaccactgcctattattattatatcaaacatggaattggtacctttcatcgtccattgaattttttcggtaacttattatatacattatctttaaaaaatacaataataccgcctgcttttataaaacacctttataaaaacaagcggtatcaattttatctatcgtatatacatcctggcctcataaggtctgagcactgacatatcagaggtatccttataatttgaaatcagcacctccatgccctcacactcctttgcaagcggcattggtatctccttgtcaaagaaattgcacacaacaatcatagttttttcttcattctttctgctgtatgcaaaaatattctcatcatcctcaagtaaaagtgtgaatttaccatcaacaaataccggataatcctttctcagctgaacaagcttcttgtagcagctaaagattgaatcagggtcatccacctgtgatttggcatttattttgtcgtaattgtcatttacctttatccaaggtgttcctgtggtgaagccggcatttgccgagtcatcccactgcataggtgtccttgcattgtcacggccctttgcgtaaatggacttcatgatttcatcctttgagtatcctttttcaaggcgctcatggtacatgtttatgatttcacagtccttataatcctcgatatcatactgtacatttgtcatgcccagctcctcgccctgatagatgtatggtgtaccctgcatgccgtgcagcaatatagcaagcatctttgcagattccactctgtactccctgtcattgccccatcttgacacgatacgcggcaggtcatgattgtcccagaacagactgttccaaccacagttgtagagctcattctgccagtgagccattatctttttgagctttttaaacggaagcggtgcaaggtcccatttctcgccgccctccttctggtcaagccctatgtgctcaaactggaacaccatagaaaactcgctgccatccggattgctgtaaagctttgcgcgctctgtgtctgcgccccatgcctcacccacggtaatcaagtcgcccttttggaaggtctccctgctcagttccttaaaatattcctgaagccttggtccgtttatggtgattctcttgtccggctcttttgctatctggtcgattacatcaagtctgaagccgccgactcccttgtccatccaccagagaatcatatcgtagattgctcttctgacctttggattctcccagtttaaatccggctgctccggtaaaaactgatggaaataatactgtccgatttccggcacatattcccatgcgcttccaccgaaacaagccttcatatcacttggcggcacgccttcatctccgtctctccaaatatagtagtcatggtatggattgtccttgctttttttagcctccttgaaccacctgtgctcgtttgaagaatgatttaagacaagatccatcataatccttatattgtgcttctttgcctcgtttatgagctcctccatatcatcgagactgccaaacgtcggatcaatatccttgtaatccgaaatgtcataaccgttgtccgcctgcggtgatttgaataccggtgaaagccatattgcattgattccaagcgtctcaagataatcaagtcttttgatgataccctgtaaatcaccaaagccgtctccgttagaatcctgaaagctctttggataaatctggtaaactaccgcctttttccaccatttttcgttattgtttttgctcattatgccctccttgtctcttcattatctcttttagttatctctttttgttatctcttttagctgtctctttttgtaaaaattcagcctcatttctttaattctgtatcaaattatgctattttacaagcaccaccaaaacctcacagctttcaagcttaagctcggatgctcccactgaaacagtgctcttttcagcatcatttgtgttggacaaaagcacctttttcacactgccatcaagcctgatttgtgcctctttactgccaaaatttgccacaaccagcacgcgcttattttcatcctctctgtaataagccatgatgccatctgtatcctcatatgccggaacgcatctgccgtaggtgaacagctccttaaattcatctgactttctgagtgccacaagccttctgtaatagttcaaaacagatgaaggatccttttcctgcgccgcaacattgatagccttatagttttcattaaccttaagccatggctttgctgtggtaaaaccggcatttgcctcatcgctccactgcataggtgtccttgcattatccctgctcatccttccacaggctgcaagtgcctgctcctttgataagcctgctgcaagtgctgccttgtactgatcctttgtgctgatatcgtcatactcatctatactgttccattttgcattttgcataccgatttcctgtccctggtatataaacggaatgcctcgaagcagtacgctgacagttcctaacatctttattccggcaggattttgagcatgctttggtaaaaatcttgaggcacctctcggctcatcatgattttctatgatattggccttaaagccgtacttttctgtctcaagctgtgaaccaagaatggcctttctccatgtgtcaaaatctatttccggtgcatcataccagccatgctctccatcacttaagcactgtgcacaaaaatcaaatattgttgaaaaatgcccattctcaccgataaactccggcagctcctcaggcttcatattgaatacctcgccaaccgtaaatgcatcatacttcttaaatgtattgttctttaattcctctaagagctctccgacaccttctgcactttcaaccatcttgtagcaggcagccagtccgtcctctgcatccggctcaaaatcagggaaatcaagatttttctttatattgattatcgcatctattctaaatcctgacaagcccttatcaagccaccagttaatcatctcataaagcttttgtcttagcttttcattctcccagtttaaatccggctgctccttcgcaaacatgtgcagataatacttgtccgtgcccggcaccttctcccagcagcttccgccaaaataagagcggtaattgctcggcggattgccgtttttaccttttctgaaataaaagtaatcagcatactctccatccggatccttaagtgccttttgaaaccattcgtgcttatccgagcagtgatttattaccagatccatgatgatgtgcatatcacgcttctttgcctcggcaaggagctcatcaaactcctccatagtaccgaactcttcagctatcgcatagtaatcagatatgtcatagccctgatccacaaatggcgatttatatatcggagacagccatatgatgtcaattccaagcgattttaaataatccagctttgaaatgatacctcttaaatctcctattccgtcaccgtttgtatccagaaagctctttggataaatctgatatgccaccttgtcatgccaccattttctctccataatgtgtacctcttatctaatcataaattttgcacctatttacatcttgagcactttgtcttgatgtattatactgctattatagaaagtggttagtataaattcttgcaatattttttcattttataacacaatactgctcttataattttaaagggtatagttttaaaagctatggagaaacaacaatatgaaaaacaataatcagcctgccctcgggcagaaagaaaacgcaaagcacggagaagtatttttccccgttcagaaatatataacaagacttgcagcagattaccctgtcatcactacacactggcacgatgaggcagagctcacactgattacaaagggctcatgcacctatcagattgatttgctcgaatatgaagcaaaggaaggcgatatcatctttatcccgccactgctgctgcattccatttcaataagggactgcgacgaattttactcggaaacgtatgtattccatatcaattttttaggtggaaacaataccgatatatgctcttcaagatatctgactccgctaatcaaccatgagtttaccatgccttacctgattgcaccgaagcatccggcatattcatccctttgcaaatgcttcatgcgcataacaaatctatactccggtcaggaattcggctatgagctggctctaaaggcatttctgcttcaggcaatatttctattgctgcaatacagtgaaaaaaatgctgattttggtgtcaacacatcctccgataagctcaaaaatgtgctcgattacatcgaggtgcactatgccgaaagcatccaggtttcagagcttgccgggctttgctatttcagtgaataccacttcatgcgtttcttcaaaaaacacatgaacatgacctgcgtgcagtatatcaacaatgtgcgtcttgaaaaatccgtggaacagttcgagcgcggcaacacctcaattttagatgtctcactgtctgtcggatttcacaatctgagctattttcacagggcatttaaaaagaggtatcatatgacacctctttcctttatcaaaagccttgaataa

SEQ ID NO: 31 - DNA, 5459 bp, unidentified
  source 1..5459: mol_type = unassigned DNA
atgaaaaagggaaaatcaaaatggatcattctggctgtgattcttgtgggaatctttgtggcagccaactcatttctggtagtgacctatccaaatgaatataccgtaatcaagcagtttggaaagattgtggatatccggcagacaccgggcttaagtatgaagattccggtagtccagactgcggaaaagattgaaaacgaagtgctgctgtatgaccttgcggtcagtgatgtcatgacaaaggataagaaatccatgattgcggactgctttgtattatggaagatcgatgatccgtacaagtatacgcagaccttaagtgcacagaagagcaacgcagaattccgtattgacaccattgtttacaacagcctgaaaaacgtaatcagcagcaagagccaggaggaagtgatcagcggccgtgacggagagctggcagcagcgattgttgcaaatatcggtgacactctcgagcagtacggcatcacccttcttgccgtggaaacgaagtctttggatcttccggatgaaaataagaatgcggtttatgaacgtatgatttccgagcggaataacattgccgcaacctatcaggcagaaggtcaggaggaagccaagcagatttccaacaatacgaccgcggagatcattgtcatgcagtccgaggcagatgcaaaggctgccgagatcattgcaaagggagaagcagaatacatgcggatcttaagcgacgcctacaacgatccggataaggccgatttctatatcttcctgcgctccctggatgcagcgaagaaaaccatgaccggtaacaataagacgctgatcattgatgaaacatccccgattgcacagattttttattaagacggattcttgaaggaaaatgaaaaaaatgtaaatcgagagggaatccattgcaaaaataaataccctatgatataataattgcattggaaatgataaaaatttaacaatcattttcagcccgtaaattaaatgaaaacaacgaatatcggaggaatgaaaaatggcaaagaaagtagtcatcgccagtgcatgccgtaccgcaatcggaaccatgggtggttctttaagcacaacaccggcagcagaattaggagcaattgttattaaggaagcattaaacagagcaggtgttgcacctgaggctgtagatcaggtttatatgggctgtgttatccaggcaggtcttggacagaacgtagcacgtcaggcatccatcaaggccggacttccgatcgaagttcctgcagttaccatgaacgttgtatgtggttccggtctgaactgtgtgaaccaggcagcacagatgatcatggcaggagatgcggatgttgtagtagcaggtggtatggaaaatatgtccatggctccttatgcagttcctcaggctcgttacggatatagaatgaacaacggtacattagttgactgcatgatcaaggatgctctttgggatgcattcaatgattaccatatgattacaactgcagacaacatctgcagagaatggggacttaccagagaagaactggatgagttcgctttaaagagccagttaaaggcagaagaagcacagaagaccggtgcttttgagaaggaaatcgtacctgtaatggttaagaaaaagaaagaaatgatcgagttcaaggtagatgagggacctcgtcacggatccactatcgaaggacttgcaaagcttcgtaccattaacccggacggattcgttaccgccggtaatgcttccggtatcaacgacggcgcagcagcagttgttgttatgagcgaagaaaaggcaaaggaacttggagttaagcctatggctactttcgtagcaggcgcacttgcaggtgtaagacctgaggttatgggtatcggacctgttgcttctactaagaaggtaatggctaagaccggtatgaagattgaagacttcgatatcatcgaagcaaacgaagcatttgcagcacagtccgttgcagtaggtaaggatcttggaatcgatgtagacaggcagctgaacccgaacggtggtgcaatcgctcttggacatccggttggagcttccggatgccgtatccttgttacactgcttcatgagatgcaggctaagggtgccaagaccggtcttgcaactctttgcatcggcggtggtatgggatgctctaccattgttaagatggactaatcaactaaaaagaaaacataattccagggtggggatctcccaccctagaagcatgtttacacgtaactattcagcatcccattcgtaaaaccgttgctagcgcaacttgagttttacgaatgtggttacttcgccatataaattatgccaaatgtccttacgaatgcgagcattctacgtccatattgtcataatttgcatggctctgaatagttacataaaataaaaggtaagggtgtcagagacgacacagaaaggaaacaaaatggaattcatcgtatatgaacagaagggtgcatacggcatcatcaccatcagccgtgaaaaagcactgaacgcattaaactcccaggtacttgacgagttaaatgcaacacttgatgcggttaatcttaatgaggtaagatgcttaatcctcaccggagcaggacagaagtccttcgtagcaggtgcagatattgctgaaatgagcacattgacaaaggcagaaggagaagctttcggtaagaagggaaatgacgtattccgtaagcttgaaacattcccgatcccggttattgcagccgttaacggatttgcattaggcggcggatgtgagatctccatgagctgtgatatcagaatctgttctgataatgcagtattcggacagccggaggttggtcttggaattacacccggatttggcggaacccagagacttgcccgtcttgttggagcaggcatggcaaagcagatgatttataccgcacgtaatatcaaggctgatgaagcatatcgtatcggacttgtaaatgcagtatatacccaggaagaattacttcccgcagcagagaagatggcagcaggcattgcaaagaatgcaccgatcgctgtccgcaactgcaagaaggcaattaacgaaggcctggatgcagatatggatcaggcaatcgtaatcgaagaaaagctcttcggtgactgctttgaaacagaggatcagaagtacggaatggctttcttccttgataagaataaggaaaaggtaaaagagccttttaaaaactgctgattctggtttataatcaatgtaaatgacggcggaagaactgcctgcgggcagtaagccgctgttcagaataagatttaagaaaatttaggaggaaaagaaatgaaagtaggtattattggtgccggtaccatgggacagggcattgccaaggcatttgcccaggttgatggatatgaagttgctctctgcgatatcaagcaggaatgggcagaaggcggaaaagcaaaaatccagaagggttatgcaaagcttgtagaaaaaggaaaattaacacaggaagctgttgatgcaattcttgcaaagatcactccgggattaaaggaagacctttgtgcagactgcgatctgatcgtagaagcagcatttgaaaatatggaagttaagaagaatacctttgcagagcttgataagattgcaaagccggaatgcgtatttgcatccaacacatccagcctttccatcacagagatcggtaacggattaaaccgtccgatgatcggtatgcacttcttcaatcctgctgaccgtatgaagctcgttgaagtaattgccggtgtaaatacacctgttgagattgtaaataccattaagaagatttctgaagaaatcggcaagacaccggtacaggttaacgaagcagcaggtttcgtagtaaaccgtatccttgttccgatgatcaacgaagcagctttcatcaagatggaaggtgtatctgatattgcaggtattgacgcagctatgaagcttggtgccaatcatccgatgggacctcttgaacttggtgatttcattggacttgatatctgccttgctattatggatgttctttacaatgagaccggtgacagcaagtatcgtgcatgtcctctgctccgtaagatggttcgtggcggtaaccttggtgttaagagcggtaagggattctatgtttacaatgcagacagaacaaagacccctgttgatgcacagtaaatataattggatcaaatgtgattccaatatcatatataatggaggaaataaaacatggattttatgttagacaagcagcatgaaatggtaagaactcttttcaaagagttctccgaaaaagaagttaagcctcttgcacaggaagtagacgagacagaggtattccctcgtgttactgttgaaaagatggctaaggcaggatttatgggtattccgattccgaaggagtacggtggacagggagcagatgttcttacttatgcaatgtgtgtagaagaattatctaaggtttgtggtacaacaggtgttatcgtatccgctcatacctctctttgctgtgacccgattcttaccttcggtacagaagagcagaagcagaaataccttgttccccttgcaaagggtgaaaagttaggtgcattcggtcttaccgaacccggcgctggtacagatgcacagggacagcagaccaaggctgttttagagggtgacgaatgggtactgaacggttccaagatcttcatcaccaacggtaaggaagctgacgtatacgtgatcttcgctgttaccggtatgatcgagaagagaggcaagatgatgaaagagatctctgctttcatcgtagaaaaaggaactcccggatttacctttggtaccaaggaaaacaagatgggtatccgtggttcatccacatacgaactgatctttactgattgccgtattcctaaggaaaatatgttaggagcacagggcaagggatttaatatcgcaatgcatactctggatggcggacgtatcggtatcgctgcacaggctcttggtcttgcagaaggggctcttgacagaactgttgaatacgttaaggaaagaaagcagtttggccgtgccatcggtgcattccagaatacccagttccagttggctgatatggctaccaagaccaaagcagctcagctcatggtatatgcagcagcctgcaagaaggacgagtatacaaagaaccctaaggtatcttattctgtagaagcagcacaggctaagctttgtgcagcagaggttgctatggaagttactaccaaggctgtacagcttcatggtggatacggatacatcagagagtacgatgtagaacgtatgatgagagatgctaagattactgagatctacgaaggaacttccgaagttcagagaatggtcatttccgcgaacctgcttaagtaa

SEQ ID NO: 32 - DNA, 7979 bp, unidentified
  source 1..7979: mol_type = unassigned DNA
tcagatgtgctgcaactctttcaggccgtctttcaggccgtccagcagggcctgcacatcttcgggggtgttgtccccgcaaaagctgacgcgcagcgccgtgcgcacggcaaggtccggcgcgcccatcgccatcagggtgtggctcggctcgcctttatcgcaggcggagccgccggaaatataaatgtgccgcccgctcaaatattcaataaaggtctggctgttgacacagttggtggaaaagttcagcacctccggcacggcatccgccggggagttcagggtgatgggtgcttgctgggccagctcttccagcccggtgcgcagctgggcgttcagggcgcggatatgcgcattgcggtcgctcaggtttttggccccctttgccgcagcaaggccaaggccaacgatataaggggtattctcggtgccggggcgcaggccgcgctcctgatggccgcccaggtagggcgggcaaagcgtctggcgcacgctgtcccggatgaacaaagcgccgattcccttgggggcatgcactttatggccggataccgagagagtatccacgttcttccactttttcaggtcaatggggatgcgcagccatgcctgcacggcgtccacatgcaccgcacagcggctgtttttggccttgacggctgtggaaagagcggcaatatcctgcaaagtgccggtttcattattgaccgccatgcagctgaccagaacggtatttttatccacctcggcagccagtttggcaacatccaggtgaccgtctgcttcgggcaggatttccaccacctcaaagccgcggtctttcagtgcacggatgggccgctgcacgctggggtgctcaaaaccggaaaccacaattttgctgccccagtttttgcgtgccatggcaaggccctgcacggcaaggttgttgctctcgctgccgcaggaggtaaaatacagatctttggcctggcagcccagggtgcgggcaatctgcccgcgggccgtggtcagggcttcatgggtttctaccgccggttcgtacaggctggaagggttcgcccaatcctttaataatgcttcatggatggcacccgcaatctccgggtccaccatggtggttgcggcattatccagataatgcagttcagggtccaacagcatgagaaagcctcgtttcgctacgcgtaaaattaaatcaaattaaaaaagaataatgaataaagaataatgttggtgcgccgcccgcggcggcgcagataaaacaggcagcaaactctggcatgcaacagccctgccagagcgccgaacctgttttcaatgtgatgccgtgggcatcacacagccattattcattattcttttttctttattatttttcttcgctcttttccatagtaatacatagtaaattatacacaccacacccgtaaaacacaagtagcgccatacaaaaaaggcgtgcggggttggccgcacgccggagaggcttcttttgtgttatcttgtgtgccggtcctttacttcgtgggcgtggccgattacggcgctgcgcttatggaacagcaggcccaccacggcaaacataccgccctcgatcaatacagtaaacagccagtcccccgttaccaggtagctgcctgccaggcaggtcagcagggtggggatcggcatgctgatgcagatagccgcaaagaactgtttcggcttcatgttggcgtgagcggcggcatagggaatgatgccgttgggcagccccggtgtgataaacgccagaatggtataaaaccaggggttcttgctgttgcgcacgctgttcagcaacttattcgccttggggctgtttgctgtgagcagttcaatgacttttgccaggcggcgcgccagcagaaacaccagaaagtttgccgccaccgatgccgaaaagctggtcacaaagcctttccacggcccataggcgatccccgccgccagttggaccggcatggccgggattaccagcgataccacctgcacgaacgccaggaaccacagcgtcaaaaagctgcgcagccgcccctcgcttgtcaaataattgctcagagcctgttcgtccccgctggaaaatgcagtccataaccccggcagcagcaggcggaatgtttcaataatcagcagcaccataaccagaattacggctgctgccgcaataacggccaggcgcttggtgcgttcggggggctgttgtttcatgcaggggtactccttaattctaaaatataatgtttattcgccgaaatcctgtgccacttttttgagcatatcccggatgggcaagttatacgggcagcgggtctcgcacttgccacagccaatgcaggcaccggctttcaccgtcagggtatcgtaccgttcgtgcgcccagcccgcaaggccataacgctccaggtagccatggaacaagaaacagctgggaatctggatgcccaccgtgcagggggcacagtaattgcagcggcggcagaactgggtgccaagggtatcccgcactttctggcaggcggctttctcctccggggtcagcggggcggtgttggcgctgcccgccacattctgttccaattcttccggcgcggccatgccggggatggatactgtgactgccgggttggaaagcacataccgcagcgccaaccgtccatcctcaatggcaccaccggccagcggcttcatatcaataaaggccttgcccttttccgcacagcggtcgatcagctctttgccctgctgctccacaatattataggggaacataatggtttcgatctcgtccaccttcagcgccttttcaaacgtctggctcaggtgggcggtaatgccaatgtgccccacaacgcccttggccttggcttccagcagggcttccatggcgccgccgggggccaggattttatccaggttttccgggctggggttgtggaactggtacaggtcaatgtgatcggtgcgcaggtttttcaggctggcggcaagctcggcttccatctctgccttggtcagcgcacggcacttggtggcaaggataaattcatcccgcaggcccagttcctccagcgcctggccgatccactcctcgctgacggtgtaagcgcgggcggtatcaatgtaattgatgcccgtctcatgcgcggctttcagcatggcgcgggtgccaggttcatcaatgcgctgcaccggaatgccgccaaagcccaggcgcgaaacccgcagcccggttcggccaaaatcaacatactgcatatttcattctccctttttgcggcgggggtgccctgccccgtctggacggttgtacaaagtatcactattatagcaggcaaggctttacttgtcacgttttttggcagttttttattgactttacacctgctgtgcgttaggattagactattcatcgggtatttgttggtacattataaaggatatgcacgttatagtagagggaggaaattcctatgcgttatggttttatcggctgcggcaacatgggcggtgcggttgcccgcgcagtgtgccgcggcgttgggccggaaaatgttgtgctggccaaccgcacccccgccaaggctgaagccctggccgaagcacttggctgccgcgccgccaccaacgatgtggtcgcgcaggactgcgatgtaattttccttggcgtaaagccgcagatgatggccgatatgctggccggcatcgcacccatcctggcaaagcgcagcgggcgttttgtcctggttactatggctgccgggctgagcatggcccgcgtgcgcgagatggccggcggtgcatatccaatcatccgcatcatgcccaacaccccggtttcgctgggggccggtatgacccagtactgcgctgacggcgtgagcgatgaccagatgttcgcctttttgggtgctatggccccggccgggcggctggatgccatcccggaaaatttaatcgacgccgcttgctgtgtttccggctgcggccccgcgtgggtataccagtttattgaagcattggccgacggcggcgttgctgccggattgccccgcgccaaagcccaggaatatgccgcccagacccttttgggcagcgcccgcatggtgctggaaagcggcagccaccccggcgtactgaaagatgctgtgtgcagccccggcggttccaccattcagggtgtgcgcgtgctggaagagcacgcgttccgcggcgcagtgaccgatgccgtcctggccgcctatgacaaaacaaaggaaatggggaaaaactgatgcgcattgttgtcaagatcggcaccagcacgctggcccatccgggcgggcggctgaacatccgccacaccgaagcactggtaaaagtgtggagcgacatcaaaaacgccgggcacgagctgattattgtatcgtccggcgcaaccggccttggcgtgggcaagctgcagatttcccgccccaaagatatggtgacaaagcaggccgccgcagccgtgggccagtgcgagctgatgtatacttacgacaagctgtttgccgaatacagccacaccgttgcccagctgctggtgacctgggaggactttgaccatccccaccggctgaacaacctgcaaaacacgctggagcgcctgatccagctgggcgctgtgccggtcatcaacgaaaacgacccgatttccaccgaggaatactccctgggcgataacgaccgcctgggtgccctgattgccaaatacacccacgccgacctgctggtgctactgagcgacattgacggcctgtacaccgccgacccgcatacccacccggaagccacgctgatccaccgggtagagagcgttacccccgaaattgagcaactgggcggcggctccaacagcggccttggcaccggcggcatgtccgccaagctgaccgccgccaaaattgccaccggtgccggtgttgacatggtcatcgccaacggtgccaacgccaatgtgctgtacgacattgtggacggcaaggatgtggggacgagatttgttggaaaaaataataaataataatgaataaagaataatgttggtgcgccgcccgcggcggcgcgaataaaataggcggacagctccggttaggatattggtttaccggagaaatagccctaattgaaatgtgacgccgcgggcgtcactcaaccattattctctattctttattcattcttaattacaaccaaaggagttctgctatgactacgcatgaaattctgttagcggcgcaggcggcaaagctgccgctggcgctggcggataccgataccaaaaacgctgcgctggaagccatggcagttgccctggtggaaaacagcgatgcaattctggccgccaacaagcaggatctggccgccgcacgcgggcgcatcagcgatgtaatgctggaccgtcttgccctgacccctgcccggctggccgccatggccaagggcatgcgtgaggttgccgccctgccggacccggtgggtgccgtactacgcaaaattgtgcggccgaacgggctgctgattgaaaaaacctcggtgcccatgggcgtgatcgccattatttatgaaagccgccccaacgtgacttccgacgccgccgcgctggccctgaaagccggcagcgcctgtgtgctgcgctgcgggcgcgatgcctgggccagctgccatgccattgtcaacgctctgcgctgcggtctggcccgtgccggcctgccggaaagtgccgtcagcctgattgaggacactacccacgcttccgccaacgagctgatgacggcaaacggtctggtggatctgctgattccccgcggcggtgccgggctgatccgcgcctgtgtggaaaacgccacggtgccctgtatccagaccgggaccggcatctgccatgtatatgtggacaaagccgccgacctgaacatggcggtggatatcattgagaacgccaaaaccagccgccccagcgtgtgcaatgccgaggaagtgtgcctggtacacaaggatgttgccgcagggtttctgccgttgctgaaagcccgcctggtggatgcccgcgcagctgccgggctggttccggtggatctgcggctggatgagcgcgccgccgccatcattcccggaacacccgccggcgagcaggattttgacactgaatttttgaactacatcctggccattgccgtggtggatgatgtggatgctgccattgcccacattgcccgccattccacccaccacagtgaggccatcatcacggcggacgataccgccgcagaccgctttaccacctgtgtggacagcgccgccgtgtatgtcaacgcctccacccgctttaccgatggcggagagttcggcctggggtgcgaaatgggcatcagcacccaaaagctgcatgcccgcggccccatgggcctggccgagctgtgcagctacaaatatatcatccacggctccggccagacccgcggcggttccgcggcaaaattgcagaatccgtgtaattgattgtagcacaggatacaacattcgcagaagacggtcttgaccgttccctacagagcattttattatgtgctgcctgccaataaatgtgctgtagggcgggatgccctcattctgccgcggagaaaccttgctgattgcaacaaacgatgcaaaccatttgtaggggacgatgcctgcatcgtcccgcatgtcgggccctgtctaatccccccacctcaaactccgtcgcccgcttaaatttccatcatcacaaaaagcatatgcccgcgcattccgcgcccggcatatgctttttctgttatcgcactataaacttattccccctgcgccatcggataataatactccaccaacaaattcacgcaggccccatagcttttcatgcccagggtctggtcatacccgcgcaggaaaccggtatacaccgtgctgcctgcctctttgaccggaccttcccacttggcccaataggtgtcgttgtcggccaggtcggtgcgggcagcatcgcacagggtgcggtaattttcgctggcggcctgcgggtcagcgctgtaccaggcgttggaaaggtacaggtagcccatcagccagccggaatattcatatgccgcatcaccacaggtggtggaagcccggatcgccacaaagtttgcttcctgctcagccgccacgccgcgctggtggctgaactcgtgcgcaatggtggcgggcaaaaacaccgccgggcagtccacattcagggtgctctcgccaaacagggggcacaggtagccggtaaagcctgccgcgctcatcagcttggaataaaacgccggtttggggctgcggtgcggcccggccaaaaagggatattccgccacaatgccgtcatacacatggccggtgttcagcaaaattttctccttgctcacggcgaacagaccggtttcgtcccgtgggacggtatcagcggcggcgttcacctgctcggcaaaccacacggtggtggcggccagctgttccacgctcagggccggggcctgcatgttggcctgcgcggcaaagctgggtgcataatactgggtgccccacaaagcgcacaccccggcatagatccacaccgccgcggtgcccacatgcagcacccaggcggcaaagcctgcctgtttgcggtgcatagcccgcacaatgcgctgcaccagccgaaccaggcagatcagaatggccgccgtggcagccagctcacaaaagctgaagggtagcggctccaccagcgcagaaacaaaccgcttgaccggcatggaaacatactccacccaccactgcatggccgcggcactgcggcgtgcggcccagaacacccccagcgccgccaccccgccgcccagcagggccagcccggctttgtgggcgcggccaaacgcacgcacggtggctgatacttttttctgcat

SEQ ID NO: 33 - DNA, 11188 bp, unidentified
  source 1..11188: mol_type = unassigned DNA
atgaaaaagatattaatcacaggagcctcgggcttcatcgggtcctttatcgtcgaagaagcccttcgccgtgggctggagacctgggccgcggtgcgccccaccagttcgctccgctacctccaggatgcccgcgtccatctcctcacgctggacctccaggaccccgcgcggctcatggaccagctccgtccccatcgcttcgactatatcgtccatgccgccggggccacgaagtgtcaggaccccgccgacttcttccgtgtcaaccgcgacggcacgcgccacctcttccaggccgtccgggcgctgtcgatgcccgtggagcgcatcgtcttcctgtcgagcctcagcgtctttggcgccatccacgagacccagccctacacgcctatcaccgaggccgaccagccgcgccccaacacctgctacgggcggagcaaactggaggccgagcaggcggcgctggagagcggactgcccgtcgtcatcctccgtcccacgggcgtctatggtccccgggagcacgactacttcatgatggcgaagagcatcaagggccacaccgacttcgccgttggcttccagcagcaggacatcaccttcgtctatgtcaaggacgtggtggcggccgtgtttctcgccctcacgcgcggcaccgtcggacgcgcctacttcctcaccgacggggctgtgtatcagagcgccgcgttcagcgacctcatccacgaggccctgggccgcccgtggtggatccgcgtcacggcccccatctgggtgctgcgcctggtctgtggcgcgggcgagtggtatggtcggcgcacgggccagctgatagcgctcaacaaggacaagttcaatatcctccggcagcgcaactggcagtgcgacatcgagcccgcgcgccgggaactgggcttccagccgcagtacgacctgcggcgtggcgtggaggaaacgatccgctggtatcaggaccacaagtggctgtaggacggggtgacaagtcggtcgagaggcgcttgtttcgactgcccgtttgatatgtggaggtagcaaatttcatagcgaaagtggcgtttttcgattctttaaccgttcttcgccgtagattgatactttttttaacgttcatcctttcccaagcaaaataaaatgcgtaattttgcattcgaaacaaaacaggtataataccgctgcgggaattcccgtggcaccaatttaaggcaaaaagagactattcatcatcattaaataacattcacaaagcaatggcaaagtttgatcaaagcattttgactcagtacggcatcactggctctaccgtgatcgcccacaatccttcttacgagcagctcttcgaagaggagaccaaggctggccttgagggctacgaggttggtcagaacactgagctcggcgctgtaaacgtaaagactggtatctacaccggccgttcccccaaggataagtacatcgtcatggacgagaactccaaggacaccgtttggtggacttccgaggagtataagaacgacaaccacccgatgagcgaggaggtctggaagaccgtcaagaacctggccgtgaaggagctctgcaacaagaacctctacgtcgtcgatgctttctgcggtgccaacaaggacacgcgcatggccgtccgcttcatcgtcgaggtggcatggcaggcccacttcgtcaccaacatgttcatccgtccgaccgctgaggagctggagaacttcgagcccaacttcgtcatctacaacgcctccaaggccaaggtagagaactacaaggagctgggtctccactctgagacttgcgtcgccttcaacgtgacgagccgcgagcaggtgatcatcaacacctggtatggtggcgagatgaagaagggtatgttctccatgatgaactactacctgccgctccagggcatcgcttccatgcactgctctgccaactgcgacatggagggcaagaacaccgccatcttcttcggcctctccggcacgggtaagaccactctctccaccgacccgaagcgccgcctcatcggtgacgacgagcacggatgggacgacaacggcatcttcaacttcgagggtggctgctacgccaaggtgatcaacctctccaaggagaacgagcccgacatctacggtgccatcaagcgcaacgccctgctggagaacgtgacggtagataaggacggcaagatcgacttcgccgacaagtccgtgaccgagaacacccgcgtctcctacccgatctatcatatcaagaacatccagccgggttcttccgctcccgctgccaagcaggtcatcttcctctctgccgacgccttcggcgtgctgcctcccgtctccatcctgactccggagcagacgcagtactacttcctctctggcttcaccgccaagctggctggtactgagcgcggcatcaccgagccgaccccgacgttctctgcctgcttcggccaggccttcctggagctccacccgacgaagtatgccgcggagctggtgaagaagatgaacgtctctggcgccaaggcttacctggtcaacacgggttggaacggcaccggcaagcgtatctccatccctgatacgcgcggcatcatcgacgccatcctcgacggcagcatcctcaaggctgagacgaagaagatcccgatgttcaacttcgaggtgccgacggctctgcccaacgtcaacccggccatcctcgatccgcgcgacacctacgccgacgcttccgagtgggaggtcaaggccaaggatctcgccgcacgcttcatcaagaacttcacgaagtacacctccaacgaggcgggcaagaagctcgtcgctgctggtccccagctctaaggtgtcctgactccgaaacgcttcggagatagaagagccaacatctgccgccgctccttaggcttcaataccaaggggcggcggcttcttttcccgacccaaatctatcacaacgcaaactatggaatacttgtcacaagagtgctacgaccggctcacccaggagctcaacgaactggtcagcgtcgaactgcccaaggcacgaaacgaactggaggaggcgcgcgccaagggcgacctcagcgaaaactttgagtatcatgcggccaaacgggcgcacgggaggctgctgagccgtatcagctacatgcagaagacgctgcgcttcgcaagggtgatggacacctcgcggctggacaacgacaccgtgggtctgctgcgccgggtggagatcaccaacctggcgaccaacaccaccatggcctacaccatcgtcaatcctcacgaggccaacgtcaaggagggaaagatctccatcaagtcgcccatcgccgaagccctcctcggcagaaaagtaggcgacgtggtcacggcccacgtgccctgcggcgtcctacgactccgaatagagaaaataacggtgtagcaagcccattgcttccaccatgttttgcgaggccggctttatctgaacaggtctgccatcgtcacctgacattgaatgtcgtcagaatagccgcccggcgcaagtccaaaggaggtgatcatggtgagaagtaccgttttctcagtacctgtctccctgatgaaagtctccctgcggttgcggatgcggttgtcctcttcttctgttatgacgtaaggagcgttggtgtatttcatctcacagagattgatggtgtcgtcgtttctgtcgatgagcatatcgatctgtgctcccttggtcagcgtcttgccggtgtcagggtctttcgttcccttgtacgtccaggagtggacgctgctcacaacggctgagaagccgagggccgccttgatttggctgacgtgctgcatgcagacccgctcaaatgctcttcctgcccagctataatggatgggtgatcctgcggaggaggaccagaaatgctcatccccattggtgttctccgatatgaaatcgaagtagaacagggtgtagttgtctatgagctggtatgtcgcctccttggtcttcttgccgatggcagtaaacttgcggatgaacccgcattgctccagttcctgcagcgctttcgaaaattcagcattgtctgtgagtttcgacgttttcagcagctcttccctgagcagcccctgcttcttcctggcaagcgcggtgatgatggcaatgtggcagcgtggtttcttgaacagagaagcatagagggcgtcaaactcttgtgtgagttctccgcctggctggaagaatatgcggtcgaaattctgcgccacgctcattccctttttcaggaaactccaatagtatgggattcctcccagagccatgtaggcttcgaggatctgccggtccttgtagcccaggctctttgcttcgcaatactgcttacactctctgagggtgaatggttgcagcagcaccttgcaggtaaggcggttgtgaagcccgccgtagttcatgaccacattgtcgataatccacgacgtggcacttccgcagatgaccaggatgaggtcttttctcgttgaagcccaggcgttccagaaatggtcgagcgaacgtacgaagttggatttaggcgtgtccatccatggaagttcgtcgatgaaaatgactttcttctcttcgttttcaggaaacgctttcaggaaagcccacagcagtccaaatgcctcggaccatgtcttaggcattgcgcattttcccattcctgcaagataaagagactctcggaagtcgcttagctgctgcctgcgcgtggctccgtaagtaccggtatgctggaaaacgaaatgggtcttatagacctctcggatgagaaaggtctttccgacgcgtcgccttccgtaaacagccacgaattgtgattcatcagaagtcatcagtccgcggagtgttgctatttcatattctcttcctattaacatatcgtatcctttctttatttcttggaatgtaacgatagtgcaaagatacaaaaaaagttcgataagccgtggaaatgtgccttttttaggccgatttccacgacttatcgacactttcttgctgatagcggaggactttttattgacaaagctgcaagttgggggccctgttgaatatgaaaaacaacttgaacaacttttacaacttgtaacaacgctttcgataagccatgggcagaaccgagctcgctcgggttatgccatggcgagaaagggtaccatgaaatggaacctacacgcttcgcgtgtcacaatcctgctgcatggtaaacaacaaaatacaacgctttcgataagccatgtgcagaaccgagctcgctcgggttatgccatggcgagaaagggtgccatgaaatggaacgcttcgccttggacattcctgccgattgtccttgcgaagcgttgttcatagttgtttcccttgcagcaacctttggtcaacacgggcctcgaagaggcgatgtccccgcgaagcgttgtttaaagttgtaaaagttgttcaagttgttttcctatatgtccacgtgtcagtccccgcgaaagcattattgtaaaagttgttcaagttgttttccctactcagcaggccgtattggaaacaactcaaacgtccctctcactcaaatatcggatgaaccttcctaatttatgaatgaagagctgagcctttacttcgccacaaacttcttgccgttttggatatagacgccctgcttgggaggctgctgcaggcgaacgccctggagggtatagacgcggtggtcggtagcgaggcggttgtcggtgtgagcctttacgctatgctctatggagcaggcttccgaaatattcattccacggaaagtgacctcgacgccccggaattgtcctggaagcaaagtggaattgagcacacttgtgccactgccaatcaactcattgtagctccattccatgccatccacagaatagtggaccacgcgataataggtgccaccaaagcacaaggagtccaccttggtcacttcggcacgagcctccctttcagaatcgacatggacgaggtcgccgacttggcagtcaaactcatacatgattctcggctctgcgtcgtcgggatagtaaaaataaatgttgcgtccctcctggtaggcggggaccgtcccgatctcggtctctacgagcttgcaggttctgccccttacgatggtgtcgcccaggacgctataccgtgccgagtccttaacgaccaacgcgccttcatatcgggcatcatagttgaacaccgtccatgttttgccatccgccaaaaacgggatgcgatcctgcgcctgtgccttctgaggcattagcgcgctcattgccaaagccaaaagagccatggctgagatgttctttcttacgtttttcatcatgacatgtttttttaaatttgttccactctgttttttcctattgcagaagcctgcgcttctacttcaccacaaacttcctgccgtgctggatgtaaatgcccttgggcaagtggcgcacgtccatgcggcggccctggaggtcatagacgcggtcgtcggaagcgaggcggtcggaggtgactaccgtctccacgccagcgacaatggcctcataggctttctctcgcgtgttgacatagacgcggtggccttcggcatcgtagtagttctcaaggagcgagaagtcgaagaacgtgttcggtgcattgtcgtggcacaggtagtcgaacggcgtgccttgcatattgacgcagcccacgccttctatcaagcggtggcccgacgacagcaccaacatgcggcggctctgcccgtcggagagcgtcgtgtcgccctcttgtacaacggtgtactgcgtgccaaggtaggcgtcgcccacatgcgcgtcgtagtcgtagaggatgtattcgccctcgtcgttcgtcgggtaaacgttgctcgcctgggcaaaggctgcacggtagctgtcggcatcggccagcacgcggccgccctcacggcgcatggcgaaaagatatttgttggaataaaccttctgatacgtctttccgttcagcgtcgtctcgccagcacaagcgtagcttctcctgccatgtctcagaaaatacaattcgtgggtctcaatgttattcgttttcctatagtcggcacaaatccattggcgatcgcaatgcggaatacgcaaaaaatcattgcttgtgaaaagcaacttgccatctactttgcaagaatcaaacgtcatataggacgaagtgacccaatcaaatccagggccaggatcgggaccgacgtcgctccctatgccctcgacccaatattcctgcgtgtcaccatttgagtaatccgtgccacccccataatagctgtaacaaccgattcccaaacggcgatagggctcaccgtccaccaagatcgtgtcgaccgtattcacattgaggcggaagtaatcgtgagacacggtcgtgtctcctttgccaagggagaaatcataaacgagatgactactccagtcggaggtgtcgtagagggaacccactttgcccaacaccttgccgttctcctcacgcagaaatccttctaccacgtttccatcatacaatttcttgtaggcgactccgtccaagatcgtatcaccctcgatccgctctgtgtgaaaaaattctccaagaaaatagtggacacaccgagtgtaccactccttgccctcctggaggaaaggcttagaggtttgcgctgcggaggcccgaagacccgtctggccaacagtctctcttccggtttgcgatacttgttgtgccatgccggggagcagggggcacaaggtcataagaatagataggtaaatcttcttcatacaccaacaatttatagtttataatagtcttaacgcttgcaaatttacgcactttttattataacgccaaatatttttagcattattttatcctgcatgccacattaccccccccgaatcaaaaatcatcctttatctacttatatatcaataagttacactccaacctccccttcgaagttttttttcggcaaatgtgcagaaaagccagtagcctgaccgaagtttgagggatacgcaaaggccaccgggagtcaaaagagcgttgcctcttggtcccggtggccttattgcattttttaattaattaaagaagagacgcttctacttcaccacaaacttcttgccgtgctggatgtaaatacccttgggcaagtggcgcacgtccatgcggcggccctggaggtcatagacgcggtcgtcggaagcgaggcggtcggaggtggctaccgtctgcacgccagcgacaatggcctcataggctttctcgcgcgtgttgacatagatgcggtggccttcggcgtcgtagtagttctcaaggagcgagaagtcgaagaacgtgttcggcgcattgtcgtggcacagatagtcgaacggcgtgccttggacattgacgcagcccacgccttctatcaagcggtggcccgacgacagcaccaatatgcggcggctctgcccgtcggagagcgtcgtgtcgccctcctccaccacggtgtactgcgtgccaaggtaggcgtcgcccacatgggcgtcgtagtcgtagaggatgtattcgccctcctcgttcgtcgggtaaacgttgctcacctgggcaaaggcagcacggtagctgtcggcatcggccagcacgcgaccgccctcacggcgcatggcgaaaaggtagctataacgcgggccggggtccaggccagcacaacgcgacttggtgcagttgtagatcttctgataggtgcggccgccgatctccagctcgccgacggcagcgtaggtgcgcttggcgtagttgatcagatagggggtattggccggatagatacgatagtcgccctgcacccattggcgctggctttgaggcacgcgcaagaagtcgttgcgggtgaaaagcaacttgccgtccaccctgcaggagtcaagctcgtcgtgggggccgatgatgaacatgccccaaatgggatagaggccataggagctgccgatgccctccacccaatactccatcggagaggcgaagcgggactcttcgtaatacgagtcaataggcgcgatccccagacggaaatagcgctgcccgtccaccaagatggtgtcgctcgtcgatacgacgacgccaaactcatccttgagcgtatcattgagctgaaggttgaagtcgaacaaacctcctgccgagacgctgctcaccttgtgtccctcttcgtgtaggccatcaagaaacttgccctgccagttgaccagtttccaataggaaacatcacgcacgagggtgtcgccacttatcttgcggtagtagttttcgtcagctccacggggggcatagacgctgcggtaataccactccttgccctcttggagcatctgttgactgttttgcgcaacagagggaagctgaccccaaaagacaaacagcaagactaaaagacaaaaaataaatcttatattctttcgcatgactatcattttttagttataactcgcattgcaccacctttgaaaactttgaagtcattttttataatcgctccattctttgtttccaaaatggcctgacctcttcttattgttacacttcctgcaggctgattgctatcaacatgactgcctgctattatttccgttcctgttatctttgcatcggaatcaatgttccgattttgcaaatacacaagatctccgtccaatacatacatggtgtaaggtatatagccatactttgtaatacataccgttacatcatttggcacatctgccaaatcaactactttgtcaaaattcacaattttataataaaccaaattgttgttctcgaattttgaaaggcaaacctggcacgagtcaatgcctacgccaatcttcaagttcccattgccataatcaatttgaacattgttgaacctattgggagtttgcaagtatggatgcatttctggatcagcaagtggatttaaagtacgaatattccatccacacctatacagcgaatcattaaagaatggcatatactgattcttggcaaagctaacagcctcgcctatgctcatcttgtacttcattatgccaagataaaacttttcgaataacgacacctcgctgttaggcgagtagtttccctgataccaaccctcacgacaattaccgacaaaggccaacacattgctatttttgttcaacataaaaccttcacctaagcaaagtgaatccggtttagtatcaaagcaattaacataacaagaaatagttgttataaaagtatagcccttgttttgcaactcttgtgcctgagaaaccatttagttagaccaattgtcaagaaatccccactgctgtttccaaccatgacacatcatgtcaacgaaaagataaccattctccagctgactttgcagattttcaggatttacccgatagtgcgtatcgccttcaaaatctgtcttggtgttataaaaacgaaacattcgcccattccagtatggttctatgtttttattatatagagtttctcctgactgctgaacaccactaagtccaatgccgctcattagcattttgtcagacagcatttcttctttgggcgatttctcataatctacaagacgatctaccatgtcaatagcatcggacaaggtagttacggacaatcgggagatggccacgtctgccatggcattgaccatgtctccactggtaccatcttcagcaaagaggccattctgatttttgtcccaatctaaatctacaaagctagcgtaatacaagtctgtaggcgtatcatacgtcacagagtcgctaagcggccctaatggacaaatcaaactgggcacaacctccacgtcgccacccagcaggacatattccacctgacccttgtattccatgatagcgcgcttgatacgcatgggcatgatggggtcgctgtacttttggcttatctcctctacagtcagcaccttacttttaacgcctttggtggttttccaattcgccagacgctgaaaggcgggcttcagctcctcgttggtgataaccaaatacttgacagggaaactgttcgcaatagaattttgtcgggcagctgtagggtaaagtgcgtcgatatcatccgaattatacaccaa

SEQ ID NO: 34 - DNA, 6935 bp, unidentified
  source 1..6935: mol_type = unassigned DNA
atgaaagcaagtctgccttataagtacatcacttccgtgaagaacggaaaacagtatgttgtctttgatttcaaggataaagtgggaaagcgtaagcgcaagtgggtgtcaacgggactgcctgagaaatgcaccaagaaatctctcaacgaagctgtcgaggagatcgtagctgagtttgcagagcagtggaacaataatcaggtcgtgctcagtatcaaccgcaagaacgatagtgacgccgaaagtgatgaaaacatcatcgttaataatgaacttaacagtttcttttccgattggctcactgcgatcaaggcgaattctgccagaaccacattccagtgctacaagagaaatgcagagcgttttgtaaaatacatggctgttcattatcctgatgtgacgcttgccgacctgaaccatacacatatccaggcttacctcaaccataaaatggacgagggcgttaagggaagtacagtcaagcagtattaccttgctttgcattcggcttttgcctatgcagtaaaaatggaaatgctgacacagcaccctatggacaagatgagcgtaccgagagcagacagacatgaggctgtcttttataatgtagacgagctgaatgaattgtttgaggtattcaaaggtcacaagctggagcttatcgtgcatatcgcagcatactacggtctgagaagatgtgaaattcttggattgaagtgggattcaatcgacttcaagaaaggtactatcactatcgaacgcaaggtcgtaagcgattatgacgaaagtggacagcccaagctctttgtggagacaagactgaaaacaaactctacaagaagaacacttccgctgattcctcatatcagagatatgcttctcgaaaagaaggatatggataagcatcataaaaagctctgtggtaaagattatattacggagtttgaaggctttgtatgctgtgatccttatggaaagctcatcagtccaaacacggtcactcatgattttcatcaggtgatcaagaagaatggaatgaagatgcttagattccatgatctgagacatagctgtgcgagtcttttgcttgcaaatgatattccaatgaaggcgattcaggaatggctcggtcatgcaacatttaatatcacggcaaatctttatagccatttggagtatcatgctaaggtcacttcggctgaaaccattgcaagggttctcagcggcaaaaaggaagatgctcccaccaacacaaaggagactgcgccggaagaagcatctaagaagtcaaacagcagaaaaaagaagaaagatacccctgcggacaagtcacagaccgcagccgtgtaattatataatatactgtgacaaaaccgaggacgaaatagaaagaatcgaaaaagagcgattttggtagaaaaattggtagaaatttttggtagaagtcaattatatgatttcacggaagcttcgcaaatgccgtaataccgaaagaaaaagcgtataaaacgaaaaagttcatataatgcgctggactttgtcccgattttatggtataatgtaagtgtaagaaaaaacttgacatatttgggaggtaaagaatatggcaaaaatactcgttacaggcggagcaggatttatcggaagccacacctgcgttgagcttcttgaagcaggctatgaagtagttatagttgataacttttcaaactcaaagccggaggctcttaacagaataaagaagataacaggcaaggactttgctttttatgaggcagatcttcttgaccttgcggcgctcgaaaagatatttgaagaaaacaagatagacgctgttatacattttgcaggtcttaaagcggttggcgaatctgttcagaagcctgttgaatattaccataacaacatcacaggcactctcatgcttatcaaggcaatgagaaaatacggctgtaagaagatagttttctcatcttccgcaacagtttacggccctgtaaacaaagctccttacacggaggatatgcctacatcagcaacaaacccttatggctatacaaaggtaatgatagagcagatactgagagatgtttatgtttccgacaacgattggtcagtttcacttctgagatacttcaaccctatcggcgcacataagagcggccttatcggcgaagaccctaacggtataccaaacaatctgcttccttacatttgtcaggtagcagtaggaaagcttgaaaagctcggtgtgtttggtgacgattacgatacccctgacggaacaggtgtaagagattatatccacgttgttgaccttgctaagggtcacctttgcgcagtcaagtatgtaatggaaaacaagggtgttgaagccgtaaacctcggcacaggaaaaggctcaagcgtttatgatgttcttcacagctttgaaaaagcctgcggaaagaagctcccatatgtagtaaagccaagacgtgcaggcgacctcgcaacctgctatgctgatacagcaaaggcaaagaaggtctttggctgggaagcacaatatggtcttgatgaaatgacagcagatagctggaacttcattaagaataatcctaacggactttaatacataagcatagaacataataattttcctaggcagggacacacaaatgtgtgtccctgttttttatgccctttttccattcatgcaataatgcgacaaaaaaatcccacagtaagtgataatatattttcagcggataaaacgaaaaaatgaaaggaatgataaagcatgaatgtggagataaaaaactatccgtcagccagaactcttgtggcagagatatgcggcgatatcgaccaccatacagcaaaatatttcaggggagagatagataaagccattagaagccataaccctcttacccttatcctcgactattctcaggtgacttttatggatagctcaggcatcggacttgttatgggcagatacaggataatgtcagaaatgggtggcgaggtgatagtggcgtcgcctcctgcttatatccgaaaggtcttgcagcttgcaggtatgcacagactcacaaagatagtcacggatattgccccgtatatacaagagaagaaagcagctcaggaacagaatgaaagccccgatgacaaaacaaaggagagtgataaaattgaaacgaaaaccccttaatgaaatgaaagtcagttttcccagctattctgaaaatgagcgctttgctagagttgcagtcagcggtttccttactcagcttgaccctcagatcgacgagcttgcagatgtcaagaccgcagtgtcagagggagtcacaaacgccattgtccacggataccgaaacaccctaggggagatattcatgcagataaggatattcgagaacagacacgtctacataaaaataagggataagggctgcggtatcgctgatatagagcaggctatgcagccgcttttcaccactgcgcctgaggaggaaagagcaggccttggctttgcggtcatggaaagctttatggataaagtgaaggtgcgcagcaagcttggagaaggaactacccttatccttgaaaaaaccttgaaagaaagagtataaaatgagcagcatagtcgagacccctcttgcagaagaaaatctggggcttgttcacctgtgcgcaaaccgcttccgcaaccgtggcatagagtatgacgacctctacggtgcaggctgtataggtcttgtaaaagctgcgaaagcctttgacagcgaccgtggtgtgaaattctccacctatgcagtgccagtgatattaggggagataaaaaggcttttccgtgacggtggcacgataaaagtgtcacggagcataaaagagctttccatgcgccttgtaagagagcgtgagcgattttccatacagcaggggagagaacctacagtaagcgagctttgtgagctgtcaggagaaagcgaagaagccgttactctagccatgaacgtcgccctgccccctgttagtcttactgaaagctcagatgaagacgaccgccacggacaaatagatatccctgttgatgctcctgacatagaaattgctgacaggctctctctccgtcaggtcatagcttcccttgaagcggaggatagaaagcttatatacctgagatattttcagaataaaactcagatggaaacggcaaaacaacttggtatgtcgcaggtgcaggtgtcaagacgagaaaaaaagctgctcactttaatgcgtgaacagcttaaataatatcattacagtgggcggcttttggtcgcccattttttacaaataagatctgagtatctcgatagtttcttcatgtgagcaaacagcgtcagaatctataaagtgctgaaaataatcccagaaagcctgaacaaggctcgtttcgcttatcttcaaataagaaaaatcagagaagcagttgtttctggcaatgatgttaagacttgtgttgtcagaaatgttgatacaaagatttttcgacaccgcaaaatagtcgttctttattatcctgtagtctgccatgccgttttcacaaagcgatatcattatctggagcattatcttgcgttctgcaagagtgggaaaagtatatgaatttctcggaagctcaaaaatctctcccgtcgtcataaactctgcaagacccttttcactgaacagatttacaaatttgtgttcagaaagagccttcttgcccatggtgagctttgcttttacaaatttctttgcgtcagctggcaaaagtgcatgggcgttgtatatatcctctgtaagacaaagcatggtgcatggctgaaaatctacgccgatgaaatttgcgttgtcatcgtaccaaaagtaaacatattccaaaatatccacggcgtggtcgagaagctttgcacattttgtcttgaacttttcaaactgccgcatataaaattctaccataggcttagatctgtatataacgccctcgcaataatcgctgtctgttctgatcagaaaattattcgttatcattatgtttggcatgatgttcgtggagttgaaatatgccgacgcaccctcataataataaaaagcctcatatttttcatgcttttgtgcaaggtgacatatgaacggaaaaatatccagattgtattttgcggtgtttttttcacctgaggtgttgtcaaagaagaacagatggtttatggtagactcgctgccttctgcggcaatggacagcagattggtaagaaactctgttggctgagcgatgacctgaatgtcagaaccgttatgaacatcgctgcatataagcacctgcaggttttttctaagctcacgtttgtcggtgtagatggatatctcaggcacagagtcaatatcaacttctgtcttgaaagtcagagcgtcaggctcttccatgtttgtgtttgccatatcgtgtattatctttgacacctgcttgcggcgattgtagacatcttcccccatctcagaaatgttataaagctccatgagcctgcttttatcctctgtggaaagcatgagctgcaagcttatattttctacaaaatctacgcttggcactttcctttcccctttgagtatcttatgaagatatgttctgtcgataccacatttttcggcaagagcttttatagtaatatcttttttctttatgtattctctgagaagttccgaaaattgtgacattggcatcatatcctttctgtagaaaacaggcatttaaagtatatttaaagtatatttttacataccgatacctatattatatcctatttacgcacaattgtcaacctttgataattttatcttattaaggcaaaaaacgtatatttttataaacagctgcaaaaaatacaagcgtaaaatggaatactttaaaatttggaggagttttcatgaaaataatattctatgacgcaaagcagtatgatatagattcatttgaaaagcagcgaaaaaactatcccgatatagaaagcgtttaccttgaagccgacttgacggaagacacagcaaggcttgccgagggctgtgaaggcgtgtgtgcctttgtaagctcaacgataacaggctcagtgcttagacggctccatgaacacggtgtaaagcttcttcttatgcgatgtgcaggctataataatgttgatataaaagccgccgataaatacggcataacagtgcttagagtgcctgggtattctccggaagccgtggcagaacacgccatggcgcttgcgcttgcagtaacaagaagaatacacaagggctatataaaggtaagagagaacaatttcagcctgaatggtcttatgggacttgatttccatggcaagaccgctggtataataggcacaggcaggataggtgcggcaatgtgcaggatatgccacggctttggtatgcgtgttatagcttatgacgtttatcagaaccccgaccttgacttcgtgaaatattatccccttagcgaagtcctgcgggaaagcgaccttatctcgctccattgccccctgacagaatcaagctatcatcttatcaatactgaaactatctcccttatgaaagagaatgttgtttttgtaaatacctcccgaggtgcgcttgtgaataccgaagaccttataaaaggtatcagaagcagaaaattccacggagtgggtcttgatgtttatgaggaagaaacggagaacgtctttgaaaaccgacaggaggatatcctagaaagctccgtgaccgcaaggcttctgtcttttcctaacgttatcgtcacctctcatcagggctttttcaccgaagaagccctagccgccataagccgcacaacgcttgagaatgcttgtgcttttgagcgtggcaggataataaaagaaaatcaggtcaaatag

SEQ ID NO: 35 - DNA, 5149 bp, unidentified
  source 1..5149: mol_type = unassigned DNA
gaattgcagccggagggttatctggtgttgggcgataccaactcctgcctgtctgccatctctgcgaagcggctacacattcctttgtttcacatggaggccggcaaccgctgcaaggatgagtgcctgcccgaggagaccaatcgccgcatcgtggatgtgatttctgacgtgaatatgtgctattccgagttcgcccggaagtatctggcagataccggcctgcccaaggagcgcacttaccagaccggctctcccatggcggaagtactgcgcatgaatctggagaagattcagaaaagcgatgtgctggaacggttgggtctggaaaaggataagtacattctgctgtccgcccaccgggaggagaacatcgactcggaaaagaatttcctgagtttgttcactgccatcaatgcgctggcagaaaaatacgatatgcccatcctgtactcctgccatccccgcagcaagcatcgtctggagaagagtggcttccagctggaccctcgcgtccgggtcaacgagccgctgggcttcaacgactataacaagctgcaaatgaacgctctggcaatcgtctccgactccggcaccctgcccgaggaaagcagcttctatctgtccatcggtcatcccatcgctgccgtgtgcatccgcaccagcacggaacgccccgaggcactggaagccggtgacttcattctggctggtattaccacccgggaactgctcaacgccaccgatatggccattgagatgaagcagaagggtgttctgggcaagccctgccccgattatgtggacgagaccgtgtccatgaaggtggttcgcatcattcagggttatgtaaatgtcgttaataagatggtgtggagaaaagggtaagggtgataaaaatgggtaaaacagtattcattaccggtgcatccggttttatcggctccaaccttgccaaacgtatcctgaccactgagccggataccaaggtcattggtctggacaacatgaacgattattatgacgtccgcatcaaggaggctcgtctggcggagcttcagaagttcgagaactacacctttatcaagggtaaccttgcggacaaggcacttatcaacagcatttttgagcagtaccatccggatattgtggttaatctgggtgctcaggctggtgttcgctactccatcacaaacccggatgcctacatcgagagcaacatgattggcttctacaacattctggaggcctgccgtcattatccggtggagcatttggtgtatgcatcttccagctctgtctacggcagcaacaagaaggtgccctactccaccgatgacaaggtggacaatccggtttctctgtatgcggctaccaagaagtccaacgagctgatggcacatgcttactccaaactctacaatatcccctctactggtctgcggttcttcacggtctatggccctgctggtcgtccggatatggcatattttggctttaccaataagctggtgaacggcgaaactatcaaaatcttcaactacggcaactgcaagcgggactttacttatgtggatgacatcgtggaaggcgttgtccgtgtgatggcgaaagctcctgaaaagaagaatggcgaggatggtttgcccattccgccctatgcagtctacaatatcggcaactccaacccggagaacctgctggactttgtgcagatcctgtcggaggagctggtgcgtgccggtgtactccctgcggactatgactttgaggctcacaaggagctggttcccatgcagcccggtgacgtgcctgtgacctttgctgacactgagccgttggagcgtgacttcggttttaagccccataccccactgcgtgaaggcctgcggaagtttgctgagtggtataaagagttttatatggaataaggcggtgggaggaattatatgcgctgcgaggaaagattctacgaaatatatggaaaagatcccgtgggcgtcagcttttgcccctatcggatttgccctattggtgcccatagtgatcacaacctgggaaagatcacaggacttgcaattgataagggaatccatattgcatataagcccaagatgaatggcgttgttgagatgtgcagtcttcaattcccgaaacgtgcccagtggcatatccgggagatcggcgaaaaaaccggcgactgggcagactatctgcgtggcgctacctgggcgctgagcaatcggtatccattgacagtcggactcagtggcgtcattgagggctctttgcctatcggagggctttcttcctctgcagcggtgatactgtccttcctggatgcattgtgccaagtcaatggaattaaactggagccgtctgaactgatcagcattgcgtttgatgcagagaaaaactacgtgggcgttaatgtgggaaccctggatcagagttgtgaggttctgagtaaaaaagaccacttgctgtatctggactgtaaggataacagctacgagctgattcccacgaatcccaatatgaagccctacaagattgcggtgtttttcagtggattggagcacagtctgactggctctaaatataatatgcgggtggatgaactgcgatccggtgtttacgctttgcaggcttttgcgggtctggagtacggaaagtttaatgaggccaatgcccgtgatgtttcgtatgaaatctaccagacatacaaggacaagctgccggcacaatgggcaagacgttgcgagcactggtatacagagttcaagcgtgtggaagctggtgcgaaagcatggcggcgaggcgatttggaagagtatggacgcctgtcctttgaatctggctggagcagcatccacaactgggagtccggtgcgccggagcagatcaaactctacgagattatgagggagaccgctggcatttatggtgggcgcttcagcggtgctggctttaaggggtgttgcatggcattgattgatcccagcaagacagatgtcattcgggaagaagtggagcggaaatatctcaccgcattcccggagatgcgtggcaagtacagttttcatctgtgcgagagtgcggacggcgtagggcataagacggaggactaatatgaagtgcttgattttggccgcgggatacgcaacccgcctgtatcccttgacggagaactttcccaaacccttgctgaaggtaggggataagaccatcttagattggctggtggatgacattgatgccgctggtttggtggatacctatgtggtcattagcaaccacaagtttgcccaccattttgaagactgggcggcaaccaagaaacagaatatccgggtggtggacgatggaacaatcagcaatgagacccggcttggtgctgtatgtgatgtgcaatttgccattgaccagttggggctggatgatgacctgctggtgattgccggtgataacgtgctggatttctccctctccaggtttgttgcctatgccgacgagaagaaaacctcttgcatcatgcgctattatgagcccagcgaaaagaaactcaccaaatgcggtgtggtggaactcgacgaccaagatagaattctgtctatggaagaaaagccagcccaacccaagagccactggtgttgccctcccttctatgtctacacccgagaggatgcccaaaaggtcaaggatgcaatttcacagaagaagtgtggtactgatgctccgggtagctttattgcatggctgtgcacggtagcggatgtgcatgctatggagatgccgggcaagcggtatgacattggaaatctggaaagctatcagcaggttcagcaggagtatcagggaatcaaggcataagtcttgctaaggatggaagaatgtatagaaagggagaaagactatgaaaatcgcagttgcaggtaccggttacgtcggtctgtctattgccacgttgctgtcgcagcatcatgaggtcatggcggtggatattatcccggagaaagttaatctcattaaccagcgtaaatctcccattcaggacgagtacatggaaaagtatctggcagaaaaggacttaaatctgactgccacgctggatgctgaagccgcctataaggatgcagactttgttgtcattgcagcacctaccaactatgacagcaagaaaaacttctttgatacttctgcagtagaagctgtcatcaagctggtgatccagtataatcctgatgccatcatggtcatcaagtccacgattccggtcggttttacggcatctgtgcgtgaaaagtaccactgtgacaacatcatcttcagcccggagttcctgcgggaatccaaggctctgtatgataacctctatcccagccgaattattgtaggtactgacgtggacaatgcccgtctggtgaaggcagccaataccttcgccggattgctgcaggaaggtgcaatcaaggagaatatcgataccttgattatgggctttacggaagctgaggctgtcaagctgtttgctaatacttatctggctctgcgtgtgtcctacttcaatgaactggatacctacgccgagatgaagggactgaacacccagcagattatcgagggtgtctgccttgatccccgcattggcagccattacaataaccccagcttcggttacggcggctactgcctgccgaaggacaccaaacagcttcttgccaactatgctgatgtgccggagaatctgattgaggccattgtggaatccaaccgtacccgtaaagactacattgctgatcgtgttttggagattgctggtgcatacgaagcaaacgaggcttatgaccccagcaaggaacacaatgtggtggttggcgtatatcgcctgaccatgaagtcgaactccgataacttccgtcagagttccattcagggtgtcatgaagcgtatcaaggcaaagggcgcaacggttatcatctacgagccgactctggataatggttctaccttcttcggcagcgaagttgtgaataaccttgaagaattcaaaaaccgcagccaagccatcattgctaaccgctatgatagctgcttggatgatgcgcaggacaaggtctacacccgagacctgttccgcagagactaa

SEQ ID NO: 36 - DNA, 12297 bp, unidentified
  source 1..12297: mol_type = unassigned DNA
atgaaatatcaaattgcgattatcggtggagggcctgccggctatactgctgccgaagttgccggaaaagccggcctcagtgttgtgttgtttgaaaagaggagtctggggggcgtgtgcctgaatgaaggttgcattcccacaaagacattgctctattccgccaaagtgtatgattatgccaagcacgcttccaaatatgcggtcactgtgcccgaagcttcttttgacttgggaaagattgttgcccggaaatcaaaggtagtgcgtaagctggtgttgggcatcaaggcgaaactgactgcccatcaggtgaatatagtgacgggagaggctactgtcatagacaagaatatggtgaaatgcggcgaggagatttacgaatgcgagaacctgttgctttgtaccggtagcgatacatttattcctcccattccgggagtggatggtgtggattattggacacaccgtgatgcattggacaataaggaagtgcctgcttcactggccattgtcggaggtggcgtaatcggaatggaatttgcttctttcttcaatagtttgggcgtacaggttactgtggtcgagatgatggatgaaatcctcggtggaatggataaggagctttcggcaatgctgcgtgccgagtatgccaagaaaggaattaagttcctgctgagtaccaaggtggtaggagtggcaaaagaggagaacggagtaacggtctcttacgaaaatgcagaaggggcgggaagtgtttcagccgaaaagttactgatgagtgtaggccgtcgccccgtaatgaaaggtttcggattggagaatctgaatttggaattgacggaacgtaagtgcgtcaaggtggacgaacacatgcagtcctcggttcccggtgtctatgtgtgcggagacttgaacggtgtctcattgttggcacatacggccgtgcgcgaagcggaagtggctgttcatcatattcttggaaaagaagatgcgatgagttaccgtgccattccgggcgtagtctataccaatcctgagatagcgggtgcaggcatgagtgaagaagctctgcaggctgccggcattacttatcataccataaaactaccgatggcatattccggtcgctttgtggcggaaaatgaaggagtaaacggggtttgcaaagtattgactgccgacgacggaacggtattgggtgcccacatgctgggtaatcctgcttccgagttgattgtgttggcgggcatagctatcgaagaccgcaagaaagtggatgattggaaacgatatgtgttccctcaccccacagtaggagaaatcttcagagaactgtaaacattctcaaagagtatcctgcctagcattccaccacccggtacacattccccttagcggtatgcacccgctcgcccggctgggtggtggaaaggctctgcacctcctgcgaatggtcctcctccgtggtaaagcggaagcagaggcattttagacggacccagcttgtcgaattcatccaagtaggccgtaggcggagagtccggcttcggcggatgccggtgagctgaggtcgtaacttctacaccaagcagaatgtcatcacctaatgtgttggcaaatgaagagtaagtgtcccaaacagacttgagaactttgttcttcgcttttttacattcagcacggtcaaaccaaagatagcattcactgccttattcatccattttcgaactctcttcatggttatagctatttaacagatttccccataatttccatcctatcgctttttatggtttcagtaccctaaactcgcactgagacgtgcctatgttcccgattccatccgttccttctaccacgcccacaaagcttgtattgatgtccgaacagaagaattctacttcggctactcctttctcatcggtgacaatgtccggtttccacagcaagacgttccgcgcgtccggtagcgggctttgcatatccagctcatcgggttggtagaactcacgcgtgccgtaatagcctttcacacgccacaggttgttcatgcggagaagttcttcttcggtaaattcctcacctttccaaataatctcgtctagtttcgttagaatccatttgttattctctccttttggctcatattttatgagataatatttccgaccgataacgggggagcttatttttccaggaggaggtaccggacatcctataggatgatgtgaataacctttataatcattaaggtactctatattacctccccccgatatacacccagagcatacccatgctgctccaaccttcatttgtgccaagctatctaaccttcccatcatcttatcccgaaatactcttcctttcttacctgtaactgttatctcggataaaaggatactattatcctgactaataacaggataatcaagctgcaattccgaaaacacttgcgaaggattcatatatgggaaataagactgacaagacttccgcaagctatccaccttactgaaagattcttctatcacaatggaaggcttgtattcatctttatccagcatcggcttcaaataaacatatccgcctcgcaatccgagcatcaagtccgtcggcaccacgaactttcccaaagagtctataaacacaaaacggttttcagtgttcggaccggaaacttgtagcaactgctctccatttcccaactctttccgcttctttttcttaccgataatctgccttcctctgatttcatccgaaaggaaacagtccgccaacattgccgtatcagctttttcccatacatacctgcgccacccttgggtaagcagcaacaggtcgagagcagcctggcggtctttgttgttgctatcaaagtaatacgccggattatggatattaccctttatctcggtggaaaggtagcaatacgaaagcatattctcaggattcagttcattctgataagcacggtcgaaaatgctcagccccagatgcgcctgtacaggattgcccttctcgtccgttacctttacgttcagtttgcccttgccacgggtaaagtagcgcgcactgtccgtgttcaactcgatgtgcaatttccgttcgggatggacatacaccaagcgttccgccatgggctgaccatcggcattgtataaagtaaactcggcaatgccctgcatcggaaactctttcaatgggattcggattttcaatctctcgctcaaggtgcctgttgccgtgcagcaaagcccgccgcgcattttgccttccagcttgattgcctgcgccgctgcccctttcggttgggaaagaagaaactccagatactcatccgtctgtttacgcaaatggacggacaaccccgaagataccacttccgcaaatgggaactcccttccatcggacaacaccgccttatatgaagctccttttatcggaaggataaacacaaaacccataccgtcgtgcacggactctaatttagcaatgtccttaccattctccagcaaccggcctgccacttttgccggcattcctttggcatccagtgctttaaaagccaccttggtgggaattccgtcaaccagataaccaccttcggggaagaaggaaaaccgggcaacaggttggtctttttcctgtggggtgttcgttcctttgtaggctatgctctttataacacgtatcttcttgggatagaccggacgcaacgtgtcattcagaaaaaaaaagcgggtataggcatggatgcggtaatcgccctctttcaagtccttgttcacataaatatgccctccagcaatgccggaaaggatggggtatttctcctgccacacgatgctgtccttggcattgagcatttccacaaacagcgtcttgcttcggtcggaaagggcaaggctctgagcgtccagagtgtaagtcttgaaccaaaggtcttcaccggtctcgtaaatccccttgtctgtctggaggtatagaagttccctgcactccgaaggcgtttcttcctgcgaatggcaagtaaacgtatgaccaacaaacaaatacaggagaaaaaataataataaccttatattataaagccgcatttccattatttttttatgataaagattactctttatgctgttgttttaatagtttctccaaattataaagagcagaagtcagtcttcctccctcaaaagtccgggcagccaaaggacggcaagcaatggcaaacaaaaagaagacaagggacagtaaagacatgaaaaatcgtttactccctgaaatattatttatatttgttgttcccttcataatctttaacaaagatatgccttttaaagaccgggtgtttttatcttaccatcaattatgtattgttaaactattttatactactacggtgactggcaagtccgcaaagcctggttacccattgattttacgttgtttatcaggcatttatccggcatgaacaagcctaacgaaccgctgataaagcttccactattgctaatacgattccactacccggtacacattccccttggcagtatgcacccgctcgcccagccggggcaggatgcggctcaggctgtagacggtcatgcccctcatgaccgaaggatgggtggctttcatgcgttcgaataattgggtggcggaaagggtcagcacttcctgcggatggtcctcttgggtggcaaagcggaagcaaaggcggaacacttcttcttcgggtatgtgtttgtagaacagggcgttgtgttgctgtatggcctgttcctcttccttgttgaaccagcttcgttcaccggacaggagttccgctttgagctgggcgtacagctgctcatgctctacaggagtgacgcagtcaatggcgtgctccaagctgacacagagaaagcggcgtgagccggtgcggtccaccagcaggtcttcccggttgctggtgccgatgaacgaggcgatgcggggcagtgccgacgcactgcgtttgtaggccttgcggatgttcagtgcggaggcttgcatcaggttcttcagcaggggcattttggatgcgctgagtttgtcgaattcatccagattgatcagaccgcaggcggcagaacgtacttttccctaatccttggcggctgctcaccagcaggggggccacgctgttggtactgttggtatccggccggaactgcatccattgggcggagagtcccagcatccagcggtggaaaccgttcacccataccgggtcgtcggacacccggcgggcaagtgcggatacgcggtccttgccgtcccattcgggaagttgttcaaagtaggctgtaaagggatggtatttgctgatgtggcgcgagcgcacaaagcgttggatatccctgtctcagcagtctatgcctgtttcgatggcttctatgctgagtgtgttcatccatcgttcgtccactttggtgtagcgcaggtgggtgccgggcatggtccgacaaagcggcatcagtccgttgagggcggatacgaggtcacggcgtggtgttccgtcggagggaacaggagctgacaggaatttgcttccgaagaagactgttttgagagtggcgaatacattcatgagcactttttttagatttgacgaactacaaatatacaacataaaaaagcctttgtcaagagagaagacaaactaatccaatcccggcacagaatatgacggagcctgacacaatgacatatatacgtgcaggctcatgcgtacgtacgtgtaggccgatgcgtacgtacgtgtgggcttatgccaccgtatgtgtagaccgatgcctacgggggtcaaaatgtggataatgctgtcgtttcgtgcgtaggggcgaggtttgctcgcccgaaaacggtttgttttgtgtcttcgggcaggcgaaccctgcccctacaactgacgatgggatagcccggtttcgttttgacacacttcccatgctgcaaaaaagactttgatgttttccaaaaagaccttgatgtttaaaaaaagcctcaaagtctttttaaaaaaggtcgttgtgttttcagaaaagctcggcatctttttaataaagctcggtatgtttttcatgtaggggcagattgcatcatcccctcattaagccggtcatccttcttttccgttcatccttacattttaattaaaatactcacataatcagtcgattaagaatgacagcacatcccctcatcctcccttcagccgcgcttcccgagtcccttcacaatcccttgtgtactttctacacctcttttcagcctgcccctacaagcaaaatgcaagaaacgtgacaatatgattgaaatgtatacttatttctcataaagactatggtttgtccgcttttaacaaagaaaaaacactgataaacaacaaaataacctctttcaagagcacaaattcggggtcacaaaagcataaaggtggtccctggacctagtgagcctaaataagacagtcaacacactgttattcaacactttgactacatcaccactttgcaaacccagcaccattttccaactagacagaaacaagtatccaaagcattgcttatcaacacattaagatcgtttttcagcactataacgcccctccaaaaaggccttggagtttaaaaaaaagactaaggtctttgctaaaaactccttaatcttttgataaaacactttagtcttttagagcctgttcaagtttcattcgaaagctctttaattttggtgctactttataaatcatttattatcaatgcatttaaaaaaatcatacaaccagacgcagtattttacattctgctgcattatataaaatacaagaaaaccattattaaccttttaatcaccacctttatgaagaagattttaaattatttattcgtgttatgcctgctcgttggagcatacggttgcagcgatgatgacagagatgtaaaacggatttatccggaggaaaaacaagaaccttttgaaagagagaatttgaaaggatatttaaggtatgataattcccttaaaagatggataatctatcctgttgacgaaccggaattccgaacaggagatgaagatagtatatcttttttaattgaaaacatgaaggatgaatacaaggcttatgaaggtgatgttaccttcagtggcatccttttatatttatattatgaagcgagattgcctataacaggttgccatggtggtacttacatttactctctccatctaaaagacattcagaaaagagaaccggcagaaagtccctactaattgatacgaaacaattaattttaaatgcataatactatgaacaaactttttacttatctgcttgcattatgcacggctacttgtctatatggttgcagtgaagaactagaggaaatgacttctacagaagaatctccttcaaacattgtcagccgttcaatccctgaaagtttttcttgtggaacgatagaaacagacccaccggcatggtatttcaatactcctcgcgtttttaataacaatagcatttataccttaaatatttatatccatgtcattagaagttctagcggagtgggattttataatggttattatagacacaaattctctgcagagcaaatagccaaaatgcgcagcatcattagccaaagagaagaagtaagccccactattcatcaaaaacagattatcggtcccaaacatttctccaacagcggtacctactcgctgagtgtattaaatgccgatgaaagcgtgagatgggaagtaacggcctacagtgaaaacggttctaccaaaaccacctataccacttctacattgactttgtcttccacccagccaacctattacagtatcgtggcttccatcacatcgcctgccggaaccaagtctgtcacaacccatgccacttgcaatgaaccatctccctacatcggaagcttgtattgggaaaccaaccaagggcaatacagcattaccgatgccacaaactatggcgaaccctctatgtatccggaaacatcaacctgagcctggaatatagagacaaggcaggaaacacatcggatgctcttccgggagctgactttatgtgtaccacagcaagtaatcgccttgtgcgtggcaaaacattttcgttgacacccgccgactgcgaaagggatttgtatattcgggccaaagatgcctgtggcacggcagaatcgtttttcgtcattccttgccaagtgacgaactattattatgatgtcaatgtagctttgggtgaagttgccattggtgtagtgaaaaccgacaatgcagaagtaaacgccattttgactgcccaaaaagcaaaacaagctgttgtctttaatgcagcaacagatgtcaaaatcaaatcggtagtagtttacacagaaaaccggcaagtgctttattccaaagaatacgccatgggagtttctgaaataaagatagatgcagtctcatgggcttcgggagtttatcacttaagcatttcgaacggaacggaagtgcggcatcagaaaataatgattccataaaaacataccaacacaataaagaaggtgtctcgaaactctcataagtcaaaaggggttgtgtcaaataagttattggggtcattgggcggacacatgggtccgcccctaccgtaaagtattatcgaaaaagttcaaaagccggaagaagtattacagatgaaaggaggctgaaacgacaatacggaatgtccatttactaccggaagccccattaacagggcgtttcaacgactaatgaaaggaggaagggagaaacagattttcgctttctttcttgcaggttccatgcttttgttatatattgccaccctgttttaaacaggcttagaatgaattttattcttggaaatacatctatcaatgaaacgagccgtattatttttattactgaacttgactatttgtgctatttatgcccagagccaacctgtttcccaaaggctggatgctttgctgaacgacgaaatcctgaaaacttccgaagttggtatcacggtcttcgacctgaccacgggtgaatctctttatcggtatcaggatgagaaactgtatcgccctgcttccattgagaaggtgattacttctgtcacagcgcttgcccgtcttggggcagattatacaatggatacccatcttcgctataccgggaaaatagagaatgatacactgaaagggaatctttatctgatagggggctttgacccggagctgatggatgaagacctggatagcctcgtggcggcggtggaagcgcagggcatccgctatgtgacggataccattgctgccgatgtatcgatgacagattccgtatattggggaccggggtggtcgtgggatgatactccttattcattccagccttatctttctcctctgatgctgaatcgcggttgtgtggatgtgtctgtttcgcctgctcagaaagattttttgccggcagtactttgtactcctgtttcagattattaccgcgtttgtaatcgggcagtgagccgtaacccgcaggcagggaaattggaaatcacccgcaactggctttccaatggcaatgtaataacggtttcgggcaatgtgtcccgaccctatacaggacaggtgaatatttatacttccaaagactttttcttccatacgtttatccaacggttgaaagagaagggaattacctccggtgtgcatacttatgcagattgccccgtcatccatgacagcattgcaaccttttgcaccatcagaagacccatcagacaggtattggaacgtgccttgaagaagagtgataacctgtgtgccgaatccatgttttatcaccttgccgcgcaacatgccccacaccatcgggtgactgccgatgacgggacggatgccatcgccgattttatgaagactgtgctcggttttaatcccgataactataaaattgtagacggcagcggcgtttccttatataattatatctctccgcgattgttgctggagtatttgaagtatgcctattatcaccgggatatctttttgccgctgtatgatgcccttcccattgccggagtggacggcacgttgcaatatcgcatgaagcaaaccaaggcgcgggggaacgtccgtgccaagaccggttcggtgacaggagtaagttcgttggcaggatatgtgaaaggggccgacgggcatcagctggcttttgtcatcattaatcagaacgtgctgaaattaagccgtgcgcgtgttttccaagataaagtttgcgacatcctttcccgatagcggcgatgagttgcccggagtgtgacgtatttgggaataagtgaaagtgattttgctgtaaactggacaaaatttacaccttttctgaacgattactgtatcttgaagtggtggatgttttgtaattttgcccgaacagaaaatcaaatgaataccatcaaacacatataaatagcgtatgaaaacaaattatgaaattcgctatgccgctcatcccgaagatgccaagcattatgatactgcaaggatacgccgcgactttctgatagaaaaggttttttcggacaatgaggttaatatagtgtattctatgtacgaccgtatggtggtagggggagcccggcccgtaggtgaagtactgaagctcgaagccatcgagcctttgaaagctccttattttttgacccgtcgcgaaatgggtatattcaatgtgggaggtcccggtatggtaagagccggtgatgccgtgtttgaattggattataaggaagctctttatttgggagcgggagaccgtgaagtgacttttgaaagcaaagatgcctgcctgcccgccaagttttatttcaattccactaccgcacatcgtaattatcccgataaaaagattaccaaggcagatgccatcgttgccgaaacgggctcgttggaaggctctaaccatcgttgcattaacaagatgttggtaagtcaggtgttgcctacttgtcagttgcagatgggaatgacggagctgaagccgggaagcgtgtggaataccatgcctgcacatgtgcacagccgccgcatggaagcctatttttattttgaggttcccgaggaacatgctgtctgccattttatgggagaagtggacgagacacggcatgtgtggatgaaaggagagcaggctgtcctgtctcccgaatggtctgttcacagtgccgctgctacgcataattatacctttatctggggaatgggtggtgaaaatcttgactatggagaccaagatttctgtctgataacagacttgaaataataaaaaagcgatgtaaaaaagagttttattaaatgttttgtgtacgataacggaagatttttattacctttgggcatcgtaatggataagaaaatacaagaaataaattattatactaataacattaaattaattactatggtgaatttttcattggaaggtaaggtagctcttgtaacaggcgcttcttacggaattggttttgctattgcatcggcttttgctgcagcaggtgccactattgttttcaacgatatcaagcaggaattggtagacaaaggcttggctgcttatcaggaaaaaggtatcaaggctttcggttatgtttgtgacgttaccagcgaagaacaagtgaacgctttggttgcacaggtagaaaaagaggtaggtgttatcgatatccttgtaaacaatgcaggtattatcaaacgtattccgatgtgcgacatgagtgcggcagaattccgtcaggttatcgacgttgacttgaatgctccgtttatcgtgtctaaagccgttatccccggcatgattaagaaaggtcatggaaagattatcaatatctgttctatgatgagtgagctgggacgtgaaactgtatctgcttatgcagctgccaagggtggtttgaagatgctgacccgtaatattgcttctgaatatggtgaatacaatattcagtgtaacggtatcggtccgggttatatcgctactcctcagacagctccgttgcgtgaacttcaggctgatggttcacgccatccgtttgaccagttcatcattgccaagactccggctgcacgttggggaactcctgaagatttgcagggtcctgctgtgttcctggcatcagatgcttctgatttcgtcaacggtcatgtgctttacgttgacggcggtattttggcttatatcggtaaacaacccaaataa

SEQ ID NO: 37 - DNA, 5715 bp, unidentified
  source 1..5715: mol_type = unassigned DNA
atggcaatgcatacatggtttgaatgtaagatccgttacgagaaaacaatggaaaatggaatgaacaagaaggtgaccgaaccgtacctggtagatgccctcagttttacggaagcggaagcacgcatcatcgaagagatgacgccgttcatttcgggagagttcaccgtatcggacatcaaacgtgccaactatagcgaattgttccccagcgaagaggaagctgccgaccgctggtttaaatgtaaactggttttcatcacactggacgagaaaagcggtgcggaaaagaaaacctctacccaggtattggtgcaggctgccgacctgcgtgatgcagtgaagaaactggatgagggcatgaaaggcacaatggccgactatcagatagcatctgtagcggaaaccgccattatggatgtatatccgtacagtgcagagcccgacgacaaaccggaagtttaatttaagttatgagttataagttatgagttattattgcgacccataacttataactcataactcataactcaaaaaaaagatgattgcagagaatttaaaacaagtactgagcgaactgcctggaaaggtacggctggtggctgtttccaaatttcaccccaacgaggcgatagaagaagcatatcgtgccggccagcgtgtgttcggagaaagtaaggtgcaggaaatgactgccaaatacgaaagtctgcccaaagacatagaatggcatttcatcgggcatctgcaaacaaacaaaataaaatatatcgttccttacgtagcgctgattcatggcatagactcctacaagctgttggccgaagtggacaagcaggctgccaaagccggaaaaaccgtcaactgcctgctacagctgcacattgcccgggaagagaccaagtttggattcagctttgacgaatgccgggaaatgctggcagccggtgaatggagagagctcaagcatatccggatatgcggattgatgggcatggccacgaatacggacaatgacgaacaaatcaaaactgagttttgttctttaagtagcttcttcaatgaagtgaaagccaagtggtttgccgatgcagagtcattccgggaactgtccatgggaatgtctcacgattaccacgaggccattgcagccgggagcaccttgatacgtgtaggaagcaagatttttggagaaagaaactattaaccataaaaaatcattatcatggcaacattagaaactacttttgcagggctgaaactcaaaaaccccattattgtcagtagctccggactgacggacagcgccgccaagaaccagaaactatctgaggccggcgcaggtgccattgtgctaaaatcactctttgaagagcaaatcatgatggaggctgactggatgggagacccgaacatgtaccccgaaggcagtgactaccttgtaggatatatccgcgaacataagctgggtgaatatctgaacctgattaaggaaagcaaaaaggtttgcaatatccccatcatagccagcatcaactgctatcagaatgccgactgggtggaatttgccaccaaaatagaagaagctggtgcagacgcactggaaatcaatatccttgcactgcagacggatgtacagtatacgtatggaaccttcgagcagcgccacatcgacatcctaagccacatcaagaagacggtcaagatacccgtcatcatgaagctgggtgacaacctgaccaatccgatagctctgatagaccagctgtatgccaacggtgccgccgcagtagtgctgttcaaccgcttctaccagccggacatcaacattgagaaaatgatacaagtatccggtaacgtattcagcaatgaatccgatttgtctaaagccctgcgctggataggcatcgcttcggcagccgtaaacaagctggactatgccgcttccggtggtattcactcgcccgaaggcgttgtcaaggcaatattggcaggtgcttcggccgtagagatatgcagtgtgctttatcagaattcagctaccatcattgaggagtatatccgtttcctcaacttgtggatggaccgcaaaggtatggaaaccatcagccagttcaaaggtattctgaacgtaaacgacccgaagggggtcaataccttcgaacgtacacagttcctgaaatacttctcttcacatgaatgagacaaaagactgacaagaagacaataaaattgaaagggtgataacactacaatgacgttatcaccctttcattttatactataccgctatctttttatttcttcttatccagcgcctcaaagcaggaattcttgcttacgaactccggaacaatatccttcatggcagcaacaattttcatctggtcataggtgtaacttacatcaatcagtttctggatacgctccttcacctcgtcatagtcatactcacgcaccgtagcaatcataatcttctcatgataggtgggctttgtaagctccttcacattcaagagttcttcgtagagcttctcgccatgacggagaccggtaaattcaatcttcacatccgtacgtccagaaaggctgatcatacgcttggcaaggtccacaatcttcaccggcttacccatgtcgaagatgtagatttcaccgccgttgcccatactgccggcctcaagaacaaggcggcaagcttcgggaatggtcatgaagtaacggattatctcaggatgggtcaccgtcaccggaccgccacgctgaatctggtcgcggaaacggggaatgacagaaccgttggaacccagcacattgccgaaacgcgtagtgatgaactgagtggcatggcctccctccttctgcaacttcttcgcaagagactgcacataaatctcgcaaatacgcttggaacagcccatcacgtttgtagggttaacagccttgtccgtagaaatcatcacaaacttctcggcaccgtatttcacggcaagatcggcaacggtgcgcgtgccgaatacgttcacctggatggactcggaaacgttgtcctccatcatcggcacatgcttgtaggcggccgcatggaaaatatactggggcttgaactccctgaagatatcctccatgcgcgtggcattggagatgtcggctatgatggtctcggcatcgatgtcgcgccaacggtcctgaagttccagacggatgtcgtgcagaggggtctcggcctggtccactaaaataagtttatagggattgaacgaagccacctggcgcatgatttcactgccgatggagccggcggcgcccgtaatcatcacacgcttgccctccagatgagaggcaaccttatggatatctatctcgataggattgcgctgaagcaggtcctcaatctgaatttccttcaactgtgtgcggctcagcgcctgaccgttccactcgctcaaaggaggcgcagtcatcagtttgatgttgtgcaccagcaggcggtcagccatgtcggacttcttcagttcctccatcttggcaggagaaatgatgatggtctgcacatcgcggtcgttcagcacatcaatcagcgtatcatcgttggggaacaccctgacacccatcatcaccttgttgataagctcaggttcgtccgcaatgaatccgcgcagacggtagtggttgcgcagattgacacgcaatgccttggcaatgttgaccccggcttccttggcaccgtaaatgaacacattggcactatgggtgccgtcgaagttcagcgcctcgaagaaagtcttgacaatcacacgggagcatgccatcatggcaaagctgatgatataagacatgaacagcacgctgaccggagccaggttgaactccaaatagctttccgtcaggacgctcgttatcatcagcagtgcatacgacaccgtcaatgacacaaaaatgcgcatgatatccacaaaggaagagaagcgcaacacattggaatacgtacggaaaacacggaagaaaatcaagttgacaacaaccgtccataaaatggtcttgtcaatggtagaggattccaaaaaaatgcttctgaaatcatatcggagagcataggccaacagactggatatgacgatgataaatacgtcaattaatagaatagtccatatcggaagcactttcgcggaaagataccgatgaaaaaaatttcgcttcatttcgcttgacagttttgttttaggcgaggcaaagatacactattttagtcaaaacggacaagaaatcgataaaaaaatgttataataattatttatcgtctataaagaaactatcccgcctccctcgttttaacagttggaaagcgggatggaaataattttaccccagaaaatgcggtatccgctacatcagattacttgccaactcgctcaactggctacgttctcctttcaccagattgacatgggcaaacaagttctggtccctcatacggtctatcatataaacaagcccattggactgactgtccagatagggttggtctatctgctgaatatcaccggtaaacaccatttttgtgccttcaccggcacgggtgatgatggtcttaatctcatgcggagtcaagttttgggcttcatcaataatacagtaggtctcgctcaaactgcgcccgcggataaaggctaatgcctcgatgaccaattgttcacttttttgcatatcctccaagcgtttcacttcagaggaattggcagcgaactgatgcttgattacattcaaattatcgaacaaaggctgcatgtaaggagccactttctcattggcatcaccgggaaggaatccaaggtctttattggatagggccacgatgggacgtgccaggagaatctgcttgtagtcggtaagttttcccaatgcggcggccaatgccagcagggtcttgccggttcccgccttgccggtcagggcaaccaacttgatgttcgggtcgttcagcacctcaaaagcaaagctctgctcggcattgcgcggctcaatgccataattctttgtcttgtggacccggcaaatcgaatgggcaaagggattataacgcgcaagcacactgctgcggtcactcttcagcacaaaacattcgttgggacgaatgatgtccttaaaatcgaactcgttgatgtccagtccttctttggaagaataaatgcggtctatcagcgcagggtcaataccctcgaacacttcattcgacttttcgaatatatccacattgattaccttatcattgatgtagtcttcgcacagcagaccgatggaacgcgccttcatgcgcagattcacgtctttcgtgacaaggatggttttcattttaggctttttggtggaaagccagtccactaccgacagaatctgatggtcggggatgcgttcgggaaaggaatcacgtactcggggagagtccaccatgcctgccaccacaaacagacggcctaagccctctcccaatggcgcccctttggtgaacagattatcatcggtaatcaaatcaagctcacggacgaactcacgcgcattgaaattaatctgctcattacctttcttgaatttgtccagttcttcaaggactacgatgggaagataaatgtcattctcttgaaaattcttcaaacagttataatcgtgaagaatcacattcgtatcaatcacaaaatttttcttagctcccat

SEQ ID NO: 38 - DNA, 5185 bp, unidentified
  source 1..5185: mol_type = unassigned DNA
tcactccgtcagccccaacagataatcggtcgacacctgatagaattgggcaagctggatcagatggagaatctcgggacatttgtcgtgctcccatgcgtagactgcccggcgggtcacacccatggttcgggcaagctcggtctgggtatagccgtgcgtcaggcgcagatgctgcaaacgttctgatataatggtcatagctgctctcctttaaataatgggcgtcctctcacagcccggcggatctctgtctttacgggtgcatttttaaacaacgtcaagggtaatggtgccgctctctttggtgatgatctcatactcggtggtctggatatcccgcaataccagcttttcgatgctcaggatgctggcaagggggatggaaagcatggtgtgtccggccatgaaatgcagctctgatttgttccggtgcgtgtgtagctggatgtcttggaacgcgatttctgccccggaaaaacggcgcacccactggctttgcactcggatgtctcggcaagaaaggtgtcaatagcgattttataagtatccatgaggagcctcctgtttttatatatagcactactctcactcgtgcccttgctctctgtcctgctatgatttagtcagccttcacgaacagctccatgcagtccgcacagatgacccgcacttccttggtgctccggatgatggtaccgcacttggggcatacccaccgccgggtgctgctctttgctttgggaggcttcggggctccggtctgactgctgccgggtgccttgctgcctgctccggtgcctgccatatccgaccatgccagccgctcacccatctggatatcctgccagccttggaagatgataaagtccaacagctcttcggacgggctcgtgatggtccagccgtacttttcgtggtggtcgacagtcaagccgtgtgcctcggcctgctccttaaagcgccggttgtggtagaccccgttgttgctggtgtccttgatgccggtctccatgcagcactcatgcaccatctcatgcagcagggtggaagcggtctcttcgatgggacggtcaagggtagccgacgaaatattgatctcgtacttgttctcgccgcctgcctgccagaccttagagcaggtgatgtgaccatacgcggacggggtctttttcaggctgataatgggctcgggcagcttgtctgcaaagtagtgcttgttgagctcgcggaacatcttttccaactgaccagcagcgcgggtggttttgacagtctgtttcatcttatgaactcctattctctttacaaaaaagaggggagcggctataatagtcttgtaatctgaaccgctccccagcggtctttactggctcttgtaaatgcagtttcctaggcggtatttgcaagggcttttctttttcaggtgatgctcaggcgggtgccggtgaccgttttgctatactggtcgtacagatcgggagctacggccttgatggctttgctgtctagtcgggtgctggagaaatcggacaggcggactttgtggcagcctacttccagatagttggtggagcgctcagccagtgcttcgcgaatctggatcttcagctgttcctgttcagcctgtgcggcctcgatcagttgggcggcttccttgtactgctcgacaagggtcagtaaaacgttaatgctcatgtgcgtacctctcttcaaatcgttgggtgaatggtcggatgtgagaaccggtgttcccgatggcatgagtataccagttaactggacttgcgtctattgacataataaacaacgttaactggtttatctctgcggaaaatgtacaatgataccaattaactggtattgcaaaaatttactataataggtgtatttatggcaacaaaagaagcgcacagcagggcaaatatagaatataatcggcgccaggacaacatcatgattcgaccctccaaggagatgggggcaataatccgccagtctgctgcagccgaaaacatgagtgtgcaggggtatgttttgcagaccctctacgcaagaaccggcgcaacagggggcggggtgattaaaaacccggagacgggctccctttccttagaacagcggagttgtcttatctccccagaccgggaaaaaatcttgcgggacattctgcaggatatcgtgctgaacacagctccgggcgaacgaactacgctttcagagatgctggtgcagattataaatgagagcgtagagcaaaatgcggacagcgtttatcagacgatgacggattcattgctgtaaaatcggcctctgtctttcacagaaatgtgatcggcaggggcctttttagcgcaaaaatagcctgacccagagcaggtggtagctgcagtgacgggatgctgattgtacctatatataaataggggcagcaggggagaggataaaaattgtgtagtactgtgcgatatacctcgtcagaactcctgactgatgtgacggcatgaactggcttttccgcgcgaggggcgcgttctatttaacggctgtcattacatcggagcggctatcacacctgactgcactctccagcgccttggacaactatatgaccacacattttgtccatcgataatttcatctggagctttcatgcgaaactgggcaatgtgcaaaaaagttctggctgaatcgcatttttttctaaaacatggatggatacatttcctcggatttctattgattcccagatataaccatgatagaataataaaagaattcagacggccacgtagaagaactggtatcttccgttttgagatggaaggatacgccttgattgcggtaagtaggtgaatcctgtgggcttatgtctgtttgcgaataatcatgtgatagatcataaggaaacccgaatgatagaccaaaataaaaagcccactgctgtttcccttgctggcgtgatgcgcaaaggtgaaaatgaagtgggcttgttgaggttctacaaaaatgtgaaatattgcatactggaagcaatacacatgcggcgcttgagctgcagcatgacgttctggctttcattacggccacattgcagttgaaatgaccttgggcgaagctgtcgtccgagggcttttgcttacccggagatcaggaataacggtctgccggttttaggaaaagaggaacggttatctaaaaggaaggtgcttgcgggaacggtgtgagttaaagggattactttatagcagtttgtgtttttaaggcgcaagcagcatccgcaaactgcatatcgcaaatatgccgtgttgatagggcactatttctgaaaattgcgataaaacgaatgacgataagaagtgcatagacaaggatttatgtgaggagaaaaaatggctacgaatactgttggaatcgataaggaagttgaagttaaccgcaaggaaaatctgcgcgaccatcgcctgtactggattgggcgtcggacgcaggacgtgatcctgtcatcgctggcactggtggtactgtcgccggtcatgctggctacggctatcgcaattgtggtggacgacccgtctgcgggtcctgttttcagtcaggaacgtatcggccgcaacggtaagcccttcaagttctataagttccgctccatgtgccccaacgcagaggcaaagctggacgatctgctggatcagaacgagatggatggtcctgtgttcaagattaaggacgacccccgcattacccgtgtgggcaagtttatccgcaagaccagcctcgatgagctgccgcaactgtggaacatcctgaagggtgatatgagcatcgttggtccccgcccggcacttccccgcgaggtggaacagtacggcgactacgaaaagcagcgtctgtatgtgacccccggcctgagctgctattggcagatcgccccgcaccgcaacgacctctcttttgaggagtggatggatctggatgtgaagtatgtcaaggagcgcagcttctgggtggattggaagattatctttaaaaccttcaaggtatgcctgctgggacgtggggagtaaaagatcgcgataccgcctttcgggatgagtacatagatattggaaaattaggaatatggaggaaatttaaaatgtctgcatttgataacgcaacccttatgatcactggtggtaccggttcttttggctctaccgttctgaagcacttcttggattctgacctgaaggaaatccgcattttctctcgtgacgagaagaagcaggacgatatgcgccacgagcttcaggccaagcatccggagaacgccaagaaggtcaagttctacatcggtgatgtccgcaatccccagtccatccgtgacgccatgcccggtgttgactacatcttccacgctgctgctctgaagcaggtcccctcctgcgagttcttccccatgcaggctgttcaaaccaacatcatcggtactgataatgtgttgcacgccgctattgacgctggcgtcaagcgtgttgtctgcctgtccaccgacaaagctgcttaccccatcaacgccatgggcatctccaaggccatgatggagcacgtcatctacgcaaatgcccgtgtggctgcggagcgtggcggcaccaccatctgctgcacccgttacggcaacgtcatgtgcagccgtggctctgtcatccctctgttcattgaccagatcaaggctggcagccccatcaccatcactgaccccaacatgacccgcttcctgatgaacttggacgaggctgtggatttggtcatgttcgctttccagcacgccaaccccggtgacctgttcatccagaaggctgatgcttctaccatcggcgatttggctaaggctgttcagcagctgttcggcgataccggtacgaatatcatcggcactcgtcacggcgagaagctgttcgagaccctgatgacccgtgaggaacgcctgcgcagccaggatatgggtcactacttccgtgtggctgcggataaccgtgacctgaactatgacaagtttgtggtcaagggcgaagtacatacaatggctgacgagtcctacaccagccacaacaccgagcgtctggatgtggaaggtactgttaagaaaatcctgaccaccgagtatgtccagaatgagctgaagggcatcccgaatgtctaa

SEQ ID NO: 39 - DNA, 12543 bp, unidentified
  source 1..12543: mol_type = unassigned DNA
atgagaatcgtggtcgtcggcctcggcaaggttggccgtgccctgaccgcccagcttacggcggaaaataacgacattgtcgtcatcgaccaaaaccctgacctgatcgaggacattgtcaatatttatgacgtgcgcggtctggccggcaacggcggctgctatgacgtgcagaaggaggcgtttgaggacggcgcagacctgctgatcgccacaacgtccagtgatgagagcaacatcctggcctgcctcgtcgccaaaaagctgggcacgcagcacacgattgcgcgtatccgcaacccggagtatgagaagcagctgcgctttatgcgcgatgaccttggtctgtcgatgttcgtcaacccggaaaaagccacggcgcgtgagatcgcccgcgtgctgcgtttcccgtctgccatcaagcgtgagcagttctgccgccagcggtttgagctgatcgagtaccgcctgaccgacgacaacccgctggtgggcttgcagctgtcggacctgtaccgcaacatccgggtcaaaattctgatctgcgccgtcgcccgcggcagcgagacgatcatccccacgggtatgtttacgctgcgggccggggacaagatctacctgacggcctcggcccgggatctggaatccttcttccgcaagctgaacctgttcaaggccaaggccagcaacgtcatgatcgtcggtgcaagccggatgacctactatctggtcaaggagctgcaggacatccagaagcgggtgaccgtcatcgacagcgatgcggcccgctgccaggagatgagcgagaagttccccggcgtgctggtcatccacggcgacggtgcggatgccgagctgctgagcgaggagcgcatcaccgatatggacgcctttgtggcgctgaccggcctggacgaaacaaacatcattctggcgatgtacgcctcccagatgaactcctgcaaggtcgtggccaagatcaaccgcgagtccttcgccgagctggccgctgccaaggggatggtggacagcgtcgtctccacggcgtcggtcacgtcggagtccattgccatgtacgtccgcgccatgcagaacagctttgagtcggagaacatcaagacgctgcaccgtctggtgggcgggcgcgtggaggcgctggaattcaacgttgcgccgggtttgccgttcatcggcgtaccgctgaaggatctgaccctgcgcaaggggctgctggtggcgggcatcgtgcgccgcaatggccagacggtcatcccgtccggcaacgattccctgcaggagggcgacgatgtcgtcatcgtcaccactgacacaacgctgcactcgctgcgcgacattgtaaagtgagggcgcagccatgaactataaaatggtagggtttgtgctggggcgcatcttcctgatcgaagcagccctcatgctctttcccatgggctgcgccgccatctacggcgagtggagcgttgtgctttccttcctgtggccggcgctgatcgtgctggcgctgggcctgatgaccagcctgcgcaccccccaaaacacgaaaatctacgcccgcgacggcctggccatcgtggcgcttgtctgggtgctgatgtcggttttcggcgcactgccgtttgtcatctccggcgagataccgtcctttgccgatgctttttttgagacggtctcgggctttacgacgacaggctcgacaattctgaccgacgtcgaggcgctgagccacggcacgctgttctggcgcagcttttcccactggatcggcggcatgggcgtgctggtctttgccatggccgtgctgcccatgaccgatggccgtgccatgcacctgatgcgcgccgaagtccccggcccgacctgcggcaaaatttccagcaagctgagcgacagcgcaaagattttgtatgccatttatctggtcatgaccgtcatcgagacgattttgctctgcgcgggcggtatgccgctgtttgacgcgctcattcatgcgttcggcacggcgggcacgggcggcttcagcaacaaggcgctgagcgtcggcgcgtacaacagcccgtattttgagatcgtcatcggcgtgttcatgctgctgttcggcattaactttaacctgtattatttcctgctgctgcgtcatttccgtgaggcgttcgcctccgaggagatgcacgtctacttaggcatcgtcgcgttctcgacgctgacgatcacggcgaacatcgcgagtatgtacgacagtgtcggcacggcgctgcgcacggcgttcttccaggtgtcatccatcgtcacgaccaccggctacgccacggcggacttcaacctctggccgacctactcccgcatcgtgattgtgatcctgacgtttgtgggcgcatgcgcgggctcgacggcgggcggcttgaaagtatcgcgcgtcatcatccttttcaaggcggcacggcaggacctgaacaagatgctgcacagccatgccgtgacgacggtccgctttgagggcaaaccgctggacgaaaagacgctgcgcggtgtgcacaactatttcaacatttatatgctgctgctgacgctgtcggtgctgctgctctcgctggacgggttcgatctggtgacgacgtttacatccgtcgcgacctgcctgaacaacgtcggtcccggccttgagatggtcggcccgatgggcagctttgcggatttctccgctccggccaagctgctgctggcctttgacatgctggcgggccgtctggagctctacccgatgctggccctttttgccccgcgcctctggcgcaagcgcatcaatgcgatgcacgaggcaagagcgaagtaaggggcgggtgttctttctttacaaagaaagaaccaaagaaattccaaaccaatacaatcatagaaccgggcagctgccatctttacggcagccgcccggttttggtttatgtatggacgtttcgggggtagagtgtagggcggccagccctctggccgccgcaaggggcgtactgccttgcgatgccaatctgtttttaaagggggctataggcgggaaaaatgtgagtatccccacaagctggaatttgacactttgtatttatcgagaatactcttgaaaccattttgcaaagcgtgatttattgaaaataatgaatttatatagttctccatttttcatattaactgttgcaattggaaagactacccacttccaagagatttcttttatttcctgcatcggcaaaactaaatttctgtattttttgtcaactgtaagcttgtttgtcttgtaagtaagcgactgactatcgaggtacagacctcctccaagtatgccattgtgacacaaactgcaaacaaaagatttcatagaaacatccctccattaaattgcgatttaccttattataccacaccccgccgctgcgtgtctatttcccgccgtgcccgcataccctgtaccaaaccacaacaggggaggggcttgccatgcggcgggatgcagacagagaggaacgaaacgcaagattgctggcgggcgtggtgctggcggctatgttggtgctgctgtccggcatcatccatctgctgtaccaccgggagtacgccgagacggacacccccaacgactgctttgcggtgtcggcggcgacgggggagacggcgctgcccaaaatcgtctgcctgacctttgacgacggccccagcaaaaacacccggccaattctggaaattctcgataaggagcaggttccggctaccttctttgtctgcgcgcaggacgccaacgaaaaatatctgccccttgtggcggacatcgcggcggcgggacatcagatcgcgctgcacagcgcgacgcatcaatactccaaaatttatgcgagcaccgacgcattctggcaggacatcagaacgctgcgccaggcgttggagccgtatgtggatgtggcggccatcgactggctgcgtttccccggcggcagcacaaacacagtcagccaccgctacggcggaaacggcatcatgaaggccctgaaggcccaggccgaggacaagggctaccactggatcgactggaacgtctgcgccgaggacgccaccgccagccacccggatgcagcgcagattttgcgcaacattcgccgcgatgccgatggtcaggacacctgtgtcgtcctgctgcatgatacaaaagcaacaggtcagaccgttaaggccctgcccgatatgatcgcctatttccgggaacagggctacaatttttgtacggttgcacagatggatgccttgcaatgtgaaacaaaatagggtataatgtacaagaatcgaaaaacggtgggaggcggaacgatgcgcaaaacggaaagccagaagatagccctctgcggtatgctgggggcgctttcggtggtgcttttgctgctgggcagtgcactgcagatcggcacctatgccgcgccgatgctggcggcgttcctgctcatcccggtgctggaggaatacggcacgcgctacgcgctgaccctctacgtctgcgtggcaattctggccgtgctctttgtgccggagaccgaactggcgctgttttacgtgctggtcatggggtattaccccgtgctgcgcgtcaagctgaacggcataaaaagcacgctcctgcgctgggtgctgaaattcgcggtgttcaacgcgggcacggtgctggtgtatcttttgctgtttgcgctgctcgggcccgccgtgctggacgagctgctggccgacggcgtcgggatgctggcagcactgctggccgcgggcaacctgtcgttctggctgtgtgaccgcgcactggcggcactgacgcggtattaccacgtcatactcaagccaaaactgaaaaagaagttttaattcggggaggaaaacaacatgtggtacgatgaggcagtagtttatcagatctatccgctggggctttgtggcgcaccgctgcaaaacgacggtgaccaggcgcaggcgggcgagcaccgcattctgcgggtgctggactgggtggagcacatcaagcgcctgggcgcgacctgcgtgctgttcaacccgctgttcgagagcgacgcccacggctatgacacccgcgactacaataaggtggactgccgcctgggcacaaacgacgacctcaggcaggtctgcgcggcgctgcacgcggcgggcataaaaatcctgtttgacggcgtgttcaaccatgtgggccgtggcttctgggcgttcaaggacgtgcaggagaagcgctgggacagcccgtacaaggactggttccacatcagctttgacggcaacaccaactacaacgacggcttctggtatgaagcgtgggagggctgcaacgagctggtcaagctgaatctgcagaacccggcggtgaaaaactacctgtttgacgttgtgcgcggctgggtgcgggactacgacatcgacggcctgcgtttggatgttgcctactgcctcgacctcggctttctggccgagctgcgcgggctggccgacagcatcaagccggagttcgcactggtgggtgagacgctgcacggcgactacaaccgctggatgaacgaccacgcctgccacagcgtaacgaactacgagtgctacaagggcctgtattcgagcttcaacacgggcaacatgcacgagatcagctacagcctgaaccgccagttcggctccgagcagtggtgcctgtacacgggcaagcacctgctgagctttgtggataaccacgatgtaacgcgcattgcgacgattttgacggacaagggctgcctacgccccatctacggtctgctgttcggtatgcccggtgtgccgtcggtctactacggcagtgaatggggcatggagggcgacaagcgcaacggcgacccgacgctgcgcccggcggtggagaagcccgaggagaacgacctgaccgcctggatcgcggcgctggcccacgcccacacgggcagcaaggcgctgtgccggggcagctaccgcaatgtgctggtccagcctaagcagctgatttttgagcgctacgccgacggtgagcgggtgctggtggccatcaacgccgacggcaatccgtttgacgcccactttgacgcgggctgcggccgcgcggttgacctcatcacaggcgccggccacgactttggcggcggcagcacgctggagccgtacagctgccacttctggaaatgtgagcgataatacgatataaaaaggcacctgtccgtgtgggcaggtgcctttttgtgctatgctgtatgttgtagggggcggcgtcctcgacgccccgcagggcagtatgtagggcggcctgccctcaggccgccgcagcggggtgagggtgccccgccctacaatgtatgggttaaaggggcagcccctgtaaaccctacggggcggcccatgtatgggttaaggttttaaagtttctttgcctactttcttttcaaagaaagtaggtcacaggttcgtatatcccatcagcttttcatccacgacggcggcggtgtcgcggccctcgcgcagcgcccagacgacaaggctctggccgcggcgcatatcgccgcaggcgaacaccttcgggtcggcagtggcgtacttcacatcggccacggtgccgcgcttcgtgcgctcgacgccgaacgcatcggccacatagggctcgcagcccgtaaagcctgccgcgatcagcaccaggtcgcagtccacggtgaactcctcgccggtgggcaccatctggcggcgtccgtccacgacctcgcttttcagcttggagatcagcgcgccgcagacctgcccggcctcgttcttgtagaactccttgaccgtcgtctggtagacgcgggggtcaaagccgaatttggcgatggcctcctgctggccgtagtcggttttcagcacgcggggccactcgggccagtcgttgccgggggcacgggttgcgggcgggcagggcatcatttccagctgcatgacgctctcgcagccctggcggatggccgtgccgacgcagtcgttgccggtgtcgccgccgccgatgaccagcacgcgcttgcccgcggcggaaaccgcctttccgtccgcaaagttggaatccagcagactgcgggtcacgctggtcaggtaatccaccgcaaagaagatgccctgcgcgtcgcggcccggggcctggatgtcgcgggcctgcttcgcgccgcagcacagcaccacggcgtcatagcgggccttcagctcctcggcgctgaccgtattgccgacgtcggcgttaaaaacaaactcaatgccctcgtcctgcaaaattttcacgcggcggtcaatgacccacttttccagcttcatgttggggatgccgtacatcagcaggccgcctgcgcggtcctcgcgctcatagatggtcacgcgatggccgcgcttgttgagcaggtcggccacggacaggcccgcgggacctgcgccgatgaccgccacggtcttgcccgtgcgggccgggggcggcacggcatgaatggcgccgctctcgtaaccgtattccacgatggcacgctcgttttccttgaccgtgaccgggtcacccgtgacgttgccgcaggtgcaggccgcctcgcacagggcggggcagacccggctcgtgaactccgggtatcggttcgtggcgatcagccggtgcacggccagatcccacttgccctgatagaccaggtcgttccactcggggatcaggttgttcagcgggcagccgctgaacatgccgcccagctgaacgccgctctggcagaaggggacgccgcagtccatgcagcgtgcgccctgggcctgctgctcgtcggtgtgcagagggacgtgaaactcgttaaaattccggatgcgctcctcgggcggcagctctaaactggtctgccgcgtaatttccataaatcctgtcggtttgcccatggtactctgcctcccttactttgtgcttttcatggcgtagaacgcctcaatctgggcctgctcgctgtcctcgcccttttcctccatctgggcgatcaggcgcagcattttgtcgtagtcgtgaggcaggaccttcttgaacttgggcagatactcgccgaagttgtcaaggatttccttgccgcgcggcgacccggtcagctccacatgctcacggatcaggtctttcaacagcgatacatcgtacttgtgctccacaggctccagactgaccatgtccttgttgacgcgctggtagaagtcccagtcctcgtccagcacgtaggcgatgccgccgctcatgccggctgcaaagttcttgccggtcttgccaagcacgaccaccgtgccgccggtcatgtactcgcagccatggtcgcccacgccctccacaacggcagttgcgccggagttgcgcacgcagaagcgctcaccggccacgccgttgatgaacgccgtgccgcccgtagcaccgtacagtgccacgttgccgatgacgatgttctcgctgcggtcaaaggcggcgtccttcggcggatagacgacgagcttgccgccggacagacccttgccgatgtagtcattcgcgtcgccgaccagctcgagcgtcaggcccttggggatgaacgcgccgaagctctggccgccgtagccgtggcagacgacatggaacgtgtcgtcgggcagcgtgttgccgaacctggcggtgatctcgctgccaatgatcgtgccgaacgcgcggtccgtgttgccgacgtccagcgtgacggtgctgggctttggctcggcggagtcgaagctctttttgaacttcttcatcaggatgcgcatgtcgggggtcttttccagctggaagttgtaaacatctttcgcgttgaagtgtacgttggagttctcgaccagcgggttctgcaaaagcgcggtcaggtccatctcgccggcgcgggagcctgcgggcgcggctttgaccttgagcaggtcggtgcggcccaccagctcatcgacggtgcgcacgccgagctttgccatgtactcgcgcaggtcctcggccatgaagcgcataaagttcatgatgtactcgggcttgcccttgaaccgcttgcgcagctcggggttctgggtgcagatgcccatggggcaggtgtcaaggttgcagacgcgcatcatgacgcagcccatggccaccagcgggccggtgccgaagccgaattcctcggcacccagcagggcggcaatggcaacgtcgcggccactcatcagcttgctgtccgcctcgatgcggacgcggctgcgcagaccgttcatgatcaggcactggtgtgcctcggcaatgcccagctcccacggcagacctgcgttgtggatggagttgcggggggctgcgcccgtgccgccgtcaaagccggaaatcaggatgacctccgcaccggccttggcaacgcccgcggcaatcgtgccgacaccggcctcgctgacgagcttgacgttgatggctgccttgcggttggagcacttcaaatcgtagatcagctgcgccaggtcctcaatcgagtaaatatcgtggtggggcgggggagagatcaggccgacgccggtggtcgagttgcgggtcttggcgacccacgggtagaccttgccgccgggcagctggccgccctcgccgggctttgcgccctgtgccatcttgatctggatctcactggcggagaccagatacttgcttgtcacgccgaagcgggcggatgccacctgcttgatggcggagttgcgctcggtgccgaagcggtcttcggcctcgccgccctcgccggtgttggacttgccgcccagacggttcatggcgatagccatgcactcgtgggcctcctcggacagcgcaccgtagctcatggccgcggtcttgaagcgcttgacgatggagtcaacgctctcgacctcgtcgaggggcacgccctgctcgggatagttgaagtccagcaggctgcgcaggtgcatcgggtcgccgttctcattggcagcggcggcggtgtactgcttgaaggtatcgtaattgccggtccagcaggcctgctgcaaaaggtggatggtctgcgggttgtagaggtgctgctcggcagcggggccgccgcggaatttgtgcgcacccaggctcggcagctcgcggttgatgtccagacccagcgggtcgaatgcttcctgatggcgggcttccagatcattctggatgtcctggatcgtgatgccgcccacgcgggagacggtgttcgtaaagtatttgtcgatgacctctttcgagatgcccagcgcctcaaagatctggctgcccgcgtaggactggatcgtggaaatgcccatcttggacgcgattttgacaatgcccgccagcacggccttgttgtagtcgctgacagcggcgtagtagtccttgtcgagaaggccgtcggaaatcagctcaccgatagtctcctgcgccagatacgggttgatggcagctgcgccgtagcccagcaacgtggcgaagtcgtgtaccaggcgcggctcgccgctttccagaatcagcgccatggcggtgcgcttgcgggtgcggaccagatacttgctgaccgcgcccacagccagcaggctgggaatggcgacgtggtactcgtcaatgtcgcggtccgacaaaatcaggatgttcgcgccgtcgcggtaggcgcggtccacatcgacaaacaggcgctcaatggccttttccaggtcggtgttcttgtagtagcagatggacagcgtcacgaccttgaagccgggcacgtccatggccttgatcttgagcagatcggtctcggtcaggatcgggttctcgattttcaggaccttgcagttgtcggcgtcctcctccagaagattgccctgcgcaccgacgtagacggtggtcgaggtgacgatcttctcgcgcagcgcgtcgatgggcgggtttgtgacctgcgcaaacatctgcttgaaatactcgctcagattcgggcgggtgtggctcaaaacggccagcggagtatcgctgcccatggccccggcgggctcgccgccgttcttggccatcggcagaatgatcgtggagacgtcctcataccggtagccgaacgccttctgcagctggacaagctgatccttcgtgtagctgggcaccttcttgttgggcaccttcaggctggacagcgggacgaggttgcggtccagccactcgccgtagggctggcggctggcgtagtcggccttcagcttttcgtcgtccaccagctcgcccctgacggtatccaccagcagcatcttgccggggcgcagacggtccttgcgcacgacctcgtcagcgggaatgtcgagcacgccgacctcgctggaaaggatcaggcggccatccttcgtgatgtagtagcggctcgggcgcagaccgttgcggtccagcactgcgcccatcacgtcgccgtcgctgaacaggatgctggcggggccgtcccacggctccagcatcgtggcatagtactggtagaagtcgcgcttcttcgggtccatcgacttgttgttgtcccacggctcgggaatcgtgaccatgacggccagcggcagatccatgccgttcatgaccatgaattccagcgtgttatccagctgggcagagtcggagccgccctggttgacgatgggcagaaccttcgtcatatcgtcctttaaatagttggaaccgatggtttcctcgcgggcaagcatcgtgtccacgttgccgcggatcgtgttgatctcgccgttgtgcaggatgaagcggttggggtgggcgcggttccagctcggggatgtgttcgtcgagaagcggctgtgtaccatgccgatggcggattcatagtcggcgtcctgcagatcgggatagaacaggcgcagctccttgacgaggaacatacctttatagacaatggtgcggctggacaggctgcaaacgtaggtgtcggggctggactgctcaaacacgcggcgcgccacatagaggcggcggtcaaaggcaatgccggcctcgacgcgctgcggcttgcccacaaagccctgccagatgctgggcatacaggcaatggccttgtggccgagcacctcggggcaggtgggaacctcgcgccagcctaagaagggcagaccctcctttttgcagacgatctcaaacagcttcttggcctggttgcgcttgagctcatccttctggaaaaagaacatgccaatgccatattcccgctctgcgcccagggtcagcccctgctcggcagcggccttctggaagaatttgtcgctgatctgcgtcagaatgccgacgccgtcgccggtcttgccctcggcgtccttgcccgcgcggtgctccagatgctccacgatctgcagcgcgtcgtcaatggttttgtggctcttgcgccccttgatgtccaccacagcgccgatgccgcagttgtcatgctcaaaccgggggctgtacagcccggcgggggtcttgcgctcggtaaagttttccat

SEQ ID NO: 40 - DNA, 24449 bp, unidentified
  source 1..24449: mol_type = unassigned DNA
ttatacaaccgtcacaacacctatttcaacttgattattgattctggggatgaatacggtgttgctcagacctgcgcagacaatcatttttgtgccgtcaaggtcaaattcgcctttgtcatatttcggaaaaagtccctgattcggagcgattactccgccgatgaacggcaattgaatctgtcctccgtgggtgtgaccgcagacgattaagtctatgtcggttttctttgcatcctcggcaatgtattcgggctggtggtgcagaagaattgtgaaattgttctttgctttttcggcaaattcttcccacagcgttcttgacggaacatcgtcatcgggagtgtagaactcgtaataagggtagtcgctcattccgccgataagcacactcttgccgtttttggtgaattttatgtattcattatcgagcaatacagcgcctgttgaatttgtttcgcttttaaaatccgttccgaattcggcagcattgtcacgctcatggttgccgagacagcagtatgtgggtgcaatttttgaaagcttttcaagcacatctttcatctttgttgtgtcgggatcgccacggttgaccatatctccgcaaactgcaataaaatcgggattttgttcttttacaagctctgcaaggtctgcgttcttttctccgtattccttgttgtgcagatccgtgatgacaacaaatttcagctttgcgtcgttcttagtattgtttacacagtaatttgtgattgcaattgtgttgtcacagtaaacgccccatattacgagagtcacaaacagcacaagtattattgctccgaggattatcgaaaaatttttcattcaatttaccgcccatattaagtatggtattattttaggctcgttttgtgcggttgtcaacaaatgtgtgtcgaacaagtctgattattactgctccttgtgctttgattgtcggattttaagttgatttaggaattgctttgtttgacattccttttgcactgttgtataataaatcataattgtatttatatgttactcgggaaatttacacaaagttaaacagaagaggtatgggttatgaagaagattaatttgcgtaagatgtttctggctctcgcagatgtgtttattatcgttgtcagcggtattcttgcaaattatattctcttgcttgtcggctacataggtactgcttcaagcaaaggcttgttgagctatattgttattgatcttgtcatgtgtctgtttacgctttatataagcggaacatattcaaaattgtggcgatactttaacgcaaaggactatattgtgtgcggaactgccgtcttttcggggtttacgctcggctttgtaatctcgttgtttttgcagattccgcagagaaagattttttgtgtagtacatttcgcaatagcccttgtcggaattcttgcattccgttttgttttcagaagggcttttcttgaccttaccgaggcaggaagggcagagggcggagagcgcacccttattgtgggcgcaggcaatgccggcagaatgattgttcgtgaaattcacaatgcgaaagagcagaatgatgttaataatccttcaaaaagcatcattccggtatgctttgtcgatgatgatttgaaaaagctgaatcagaaaatcgaaggaatccccgttgtcggaacctgtcccgaaattgttaaaatatgtgatgaataccgcatagacaatattattgttgcagttccgtcatgtgaggaagatgagaaaaggaagattcttgactactgttccgcaacagagtgcaaaatcaagattattccttatctcggtgagcttttgtttgatgacgggcatacacagcttatttcacaggcaaaggaaatcaagattgaggatcttctcggaagaaaacccattgagtttgaccgaaaggagattcatgaccttatcaacggaaagatttgtcttgttacaggcggcggcggttcaatcggcagtgagcttgtaagacagattgcaaagaatgatccaaaacaaatcatcattgttgatatctacgaaaacaacgcatatgacattcagcaggagcttgtgcttgaatacggcacaaagcttaaccttgtaacgcttatttcatcggttcgtgattacgataagatggagcttatcttcaagacatatcgccccgaactcgtattccacgctgccgctcacaagcatgttccgcttatggaaaccgttcccgaggaggctgtaaagaacaacatcttcggcacattcaatgttgcaacccttgcagaaaagtacaaggcaaagaagtttgttatgatttcaaccgacaaggctgttaatccgacaaatgttatgggcgcaacaaagcgtgcgtgcgagatgattattcagtacaaggctcagcacagcaccgataccgaatttgtaacaacaagattcggtaatgttctcggctcaaacggctcggttattccgctgtttcgccgtgagattgaaaacggtgcgcccgttaccgtaacacatcccgatattatcagatattttatgactattcccgaggctgtttcgcttgttcttgaggcaggtgcaatggcaaagggcggtgagatttttgttcttgatatgggtgctcccgtcaagattacaacccttgccgagaaccttatcagaatgtacggtaaggttccgtacaaagatgttccgattattttcacgggacttcgtccgggtgaaaagctttttgaggagcttcttatggacgaagaaggtcttaagtcaacacagaacaagaaaattttcataggaaatcaaattaaaatagacgaaacagatatgctgtcaaagcttgaggttctcaaaaagaccgcagaaaacaatgacagtgaaaagacagttgaacttttggcagaacttgtacctactttttgccacaaggtcaatgattaaccgaaaaggagaaattttatgtgcggtattgtaggttatgtaggacctaaggattgcagtgaggtgcttgttaatgctctcacaaagcttgaatacagaggctatgactcggcaggtattgcggtttttgataacggagaaatcaagaccgtaaagaccaagggtaagcttcaggacttaaaggataagcttgcagaggtcggcactccgaaaggtcatgtcggcataggtcacacccgttgggcaacccacggcgagccttcggatgtaaactcacatccacacagcggtacaagggttacaatcgttcacaacggtattattgaaaactatatggagcttaaagacttcctcatctcaaagggaagaacttttttaagcgacacagatacagaggttgttgctcagctcctcgactataaatacaacggaaatcctcttgaaacaattgacagtgtaatggctgagcttaagggttcgtttgcacttggaattatgttcaaggatttccccgacagagtttttgcggttcgccgtgaaagtcctcttatcgtaggcgttgcagaaggcgagtgctttattgcgtccgatgttcccgcaattcttcagtacacaagggattattatcttcttgaccatgatgaaatcgtaacactttcatctgacggtgtttcgttcgttgacgaacaccttgatccgattgaaaaggaacttcagacagccgactgggatatggaggctgccgaaaagggcggttatccgcactttatgattaaggaaatcaacgaacagcccgaggctatcagaacaacgattatgccgagaatcaaagagggacttccgttccttgaggagtgcggcatcacaacggaaacaatcaaggatttcaaaaatatcacaattgttgcctgcggtactgccatgcatgcaggtatggtcggcaagtatgttattgaggatctcgcaagagtttccgtaaatgttgacattgcgtccgagttccgttacagaaatccgattgtaggcgagggcgaccttgtaatcatcatttcacagtcgggcgaaacagccgacagccttgccgcaatgcgtcttgcaaagcagaagggtgcaaaaactcttgcaatcgtaaacgcaaagggcagttcaattgcccgtgaggcggatatgctcatctacacactcgcaggtcccgaaatttccgttccgtcaacaaaggcatacatcacacagctttccgttatgtatctctttgcctttgagcttgctcttgcaaaggaaacaatcagcacagccgagtgcaagcgacttgtttcggctcttacaaaaatgcctgaggcagttcagtatgtaatcgacaactgcgaggatacctgcaagttcgttgccacaaagcttgttgcaaccgacagcttgctttacataggcagaggtcttgactatgccctttcaatggagggttcgctcaagctcaaagaggtttcgtacattcactcagaaagctacgccgcaggcgagttaaagcacggcacaatttcgcttattgacgaggatgttccggttatcgccgttgcaactcagacaggtattatccccaagacaatcagcaatgttgttgaggttaagtcaagaggcgcaaaggttattcttgtttgtacagacgcctgtgcaagagaactcaaggacggtgttgcggattatgttatcgaaattccgcatacagacgagcttcttatgccgattacagcggttgttccgctccagattcttgcttattacacatcaatcaacagaggtattgatcccgataagccaaagaaccttgctaagtcggttactgtagaataaaatgtgatttcgttcgggaagagagttcgcaaaatgcgagggttaagttgcccgaacggcagtcttgtttttaattgaaaattgaaaatggaaaattgaaaatttcggttggcggtgtgccaccgcagttaattcgagaagatagtcagataaagaaattgcattgatgcccgatacggcattgatgcaatttttgttttatatgaaagtgaatgtttatttatataattttaatttgtacaaatctttgcgtggttatctgcaggcggataatatccgcacatacagttttgcaacaacttccgtatataccgaaaatatacaaaaacagtcgggcgacaatgttttgtatttttgcgaattgtcttctcgaccataattttccattttacattttcaattttcaattttatgcacgctcgggcgtaatatgttctttaatatcatactgtattcacgaatagggtactcttgttttcaaatttcagcggtaaaaaccttgtatttttttgacagattatgtataattaattagatatacattctaaaaagcagtattgatgaatctaatttagtttcgggggaatatacggacatgatgaaaactgtttttaaaagagctgtaacgcttgcaatttgtgccgtaacggtattttgcggtatttttgcctgttcaggcgcaacaaaagattacgagattccgcagattgacgatatgacgctttcaatgcctgacggtatgagcgctgttacaagggacagtaaaagcacagataaatatttttccgttttcggtcttgattatgacacaacaatgaaaacctttcagaacggaaatatctatcttcagggtatggataatatgtcatcggttattctgaccgtgacaatgacaaaaaatgagagcagcgagaatgtcggcaactatgctcagctttcttcaagcgagctttcaaatatacgcaacaattttcttaattccgacgagtatcggagctgtactcccgaccaaaaagaaaaagttgtgtggcttgtgtttgacgcaactgctcagagcagtaagggcgatgtgaaaacctttattgccaacacggtttatgacggtatgaacattaatatcacaatgcagagaacagagggtgatgttacaaccgttgactacgatactttttccaaagttgtatcttcggtaaaattcagcgacctgccgttttcaaagggatttattccgtacataatcatcggcggcggtgttattatccttatcttgattgttctcatcataatttttgccgtgagaatcagaaagcataaaaaggctaagaagaataacgctattcttgaggagcttgcagtcaagtataaactcggtgaaaagggtacggactacgacattgacaattttgacgattctcccgaaaagcccgataaacactcaaagaaaaagcagagatatgcggaagaagttgaagaagaaccggctttgccgggcagaagatatgctcccgagccgataatcgaaaatatggaagaaccggaagaaattacaagtgagtattcaaactttggttatgatacggatgatgccaaggaaaaagaaattgacgagataatcaactccgcaaaggcttacaagagtgagcttgagcgtgaggcatataaaaacaactacggttacgaggaaaacagcacggaggacgaaaaaaaaaaggagcctaccgcagcagatacctcagagactgaacccgaaaaaattgacgaaaacgaaaaagataacgcagaaacacctgaaaaacacgaggacataagctcttcgtcgggtcctacactcgttatccccgaacccgaacacgatctttttgaaacaagcgagcctgacgatatcgaccgtgaggacgatgccgatgttgaagaaaccgaggaggtttccgaacaaaagcatccgcttgaaaaaaaggttgacaagtacgcaaacatcattttcggcagtgacgatcccgaggagaaaaccggggaagatgttgatgatgaggagcttgtaagggcaaaggctaagaaaaacaagtttgacagcggttatgacttttttgacgaagctcccaaaaagtcaatgggggttatcaaaagctcagacctcagagatgccgaggacgttgatgttatcggcgaggttgaaagaaaagcagaaaccgtaaagcagaacgcttttgaaaaagagaataataaagaaaccgagggtgaaccgaatgataaacggtcaacggaagaggttcttgccaatgtaggcaaaaacatcggtaacgctctcaggggctttgcaggcggagttaagaattttggcattcattgcggatatttctgcaagaatgtttcaataatgataaagcgtaagcgtgcaattgccaaacgcaaaaaggcagaggaagagagaagagagagagaaagacaaaaggcagagcgtgcaagaatgcgtgccgaaagaggcgagagtgacggacttgttcaggttcacagcagaaccgaccgccgcccacagcagaatcaccgccctgcaaacagaaacaagagaagataatttcttttcttaacggaggaaaaacatggaaatgctaattaaaaacgcagtggttgtttcccctgccgacaagcttaacgaaaaaacagatattctcataaaggacggtgtgattgccgaaatcggcagcggcattacatcagacggggagattattgatgcagacggtctttgtgccgttccgggatttgttgatatgcacgtgcatcttcgtgatcccggtcagactcacaaagaggatattatcacgggatgcaaggcggctgccgcaggcggtgttacaagcctgcttgcaatgcctaacaccaacccgacaaccgacagccccgaaattgtaaagtatattcttgacaaagctaaagacgccgacagccgtgtttatgttgcggcaagcgttaccaaggggcttaaaagcgaagaacccacagacattgacgctgtgaaaagtgcaggtgcaatagcacttaccgatgacggcagacctgttgaaaacacaaagtatttgagtgacgcaatgaaaaaagctccaaagctcggcatgacaattgttgcacattgcgaggacttgtttcttgccgacggcggtaaaattaacgagggcgaggtttcggaaaagctcggagtcaagggaatccctgccggtgccgaggactgcggaactgcaagagaaatcgcacttgccgccgctcttaacgagcctattcatatctgccatgtcagcaccaaaacaagcgttgcacttatccgtgatgccaaaaggagaggtgttaaggtgaccgccgaaaccgctccgcattatgtttcgctcacggatagggagcttttaagaggtgacgctgattacagaatgaatccgcctctcagaactcaggctgatgttgacgagattatcaacggactttgtgacggcacgcttgatgccatagcaaccgaccacgcaccgcacacacccgaggaaaaggctgattttgtaaaagcccccaacggttcaatcggcatggaaacctcgtttgcggtctgcaacacatacctggttaagacaggcagaatgacgctttcacagcttgttgaaaagatgagtgttaatcctgcaaggattttgaaaatcaacgcaggcactctttcagtcggtgcaaatgccgatgttgttcttataaatcccgatgaagaatggacagttgatgctgataaacttcacggcaaaagcaaaaacaccccgtttaaaggcagaaccctcacaggtaaagtcaaaaagacaatcctcggcggtaaggtagtttttgaggattgagtttgttttaattgtagatgttgatacgattaaaattgtgcaaacggtagctgtactacgctcgggcataaatgttttttatttgtcaaactgtctgcacgaattggggacggcggctcgccgtgttcgctcaccaaataaatttaatttaatataaactttaacatgaaggagtaaaattatggcacagaaaggcgacctcctgtcggtaagacaggatatcagagtagtagacgcaacaatccgtgacggcggtctttgtaacgatttcagatttgacgacaaatttatcaaggctctttacaatgcaaatgttaaagccggtgttgattatatggaattcggctacaaggcatcaaaggaaatctttaacgaagaagatttcggtaagtggaaattctgtaacgatgcagatatcagaaaaattgtaggcgacaacaagacttctcttaaaatcgctgttatggctgatgtcggcagaacagattttaagaaggatattatcgcaaagaaggacagcccgattgacctcatcagaattgcaacatacatcaacgcaattcctgcggctgttgaaatgattgaggacgctgcaaagaagggctacgaaacaacaatcaatattatggctgtttcaaaggcaagaaccgaggatattacagcggctcttgaaactctcggcaaaactcccgtaaacgctttctacattgttgacagctacggcgcactctatcccgaggagtcaagacgacttgcagacctttactgctcaattgccgacaagtacggcaagtcggtcggtattcacgctcacaacaaccagcagcttgcttttgctaacacaattgaggctatgactcagggcgtcagctaccttgacgcaaccgttgacggcatgggcagaggcgcaggcaactgtgcgcttgaacttctcctcggtttcctcaagaacccgaagtatcaggttgctcctattctcaaaatcattgaggagtacacccacaagtttaaggctgagggcgttaagtggggttacgatattccgtaccttctcacaggtcagtacaacacacatccccgtcctgcaattcagttcgtaaaagaggacagacaggattattacaagttctcaaatgaactttatgatattattaacagctaaaaataataattcgtatgggcgaacaacagcattgtaaaaaagatattgcagtcgggatatgaattgtttgcccgaccatagaaagaataacaaaaaatgaggagaatcactatggcatttgacagacttatcgaaaatattgtaaaaatgcagaatcctacggttgcaggtcttgatcctaagcttgactatgttcccgaatcaatcaaaacaaaatgctttgaaaagtatggcaagacgcttgagggtgcggctgctgcactttttgaattcaacaaggcgcttattgacgcactttatgatattgttcctgccgtaaagccacaggctgcatattatgaaatgtacggctggcagggtgttaaggctctttgcgacacaatcgcttatgcaaagtcaaagggtatgttcgttatcacagacggcaagcgtaacgatatcggcacaactatggaggcatatgctacggcacacctcggtcatacagatgttgcaggcgaaagtattgacgcattcggtgcagacgcactcacggtaaacggctacctcggaacagacggtatcaagccgcttgcaaaaatttgcgattcggacgacaagggcatttttgttcttgtaaaaacttcaaacccaagctcgggcgaacttcaggatatgaagcttgaaacaaatgagagcgtttatgagcatatgggcaagatgtgcgaaggctggggcgaagaccttatgggtaagcatggctattcggcagtaggcgcagttgtgggtgcaacatatcccgaacagctcggtgaaatgagagcaaaacttccgcacacattcttccttgttcccggttacggtgctcagggcggcggtgccgatgatgttaaaaacgcatttgacgaaaacggtcttggtgcaatcatcaactcaagccgcggcattatgtgcgcatggaaaaagcaggggcttacagaagatgattttgccgttgccgctcgtaaagaggctgagcgtatgagggatgaaatcgttggctgtatcggcaaaattaagcttgactgattcatttgcacaacagaatcacgaaatttttcgatttttatgctttagtgctatgaatttgttgactttagcgtgctaaaagcgtataatttaggtgtatttatttttacaactatatttttaaattttctttaaaaagggagatatcagaaatggcaagagtatataatttttcggcaggtccttcaatgctgcctgagtctgtgcttaaaaaagcagcggcagaaatgcttgactacgaaggcagtggtcagagcgttatggaaatgtcacaccgctcaaaaatttacggtacaatcatcgagggtgccgaggctcttttgagagaggttatgaacattcctgacaactacaaggttcttttccttcagggcggtgcgtcaacacagtttgcggctatccctatgaaccttatgacaaagagcggtaaggctgattatgttatcacaggtcagtgggctaaaaaggctcatgcagaggctgcccgttacggtcaggctaatgttgttgcttcatcggctgacaagaccttcacatacattccaaagcttgatccttcaacattcacaaaggacgctgactatttctacatttgcatgaacaacacaatttacggtactgtttatcacgagcttcccgacacaggtgatgttccgctcgttgcagatatttcttcctgtattctttcaagaccgattgatgtttcaaagttcggcgttctctatgcaggcgcgcagaagaacatggctccggcaggtcttacggttgttatcgttcgtgaggatcttatcggcaacgctatggatatcactcctacaatgcttaactggaaaactcacgctgacaacggttcaatgttcaacacaccgccttgctacacaatctacattgcaaagcttgttcttgaatggattaagaacgaggttggcggtcttgataagatgtatgaaatcaacaagaagaaggctgaccttctctacggtttcctcgattcttcagagcttttcaagggtactgttgttcccgaggatcgttcgcttatgaatgttccgttcgttacaggtgacgctgaccttgacgctaaattcgttaaagaggctactgaaaacggtcttgttaatatcaagggtcatcgcacagtcggcggtatgagagcttcaatttacaacgctatgccttatgagggcgttgaaaaactcgttgagtttatgaagaagttcgaggctgaaaacaagtaattattgaatattatgatataacgggcgaacgctgttcgcctgttattgtaaattcttaaaataaaaaattaaaaaggattgattttgatgtataacattcttacattaaacaaaatcgccgctatcggcacaagccgtctcggtgataactataaatacggtgacgatgttcagaaccctgacgcagttcttgtaagaagtgccgcaatgcacgatatggaatttgccgataaccttcttgcaattgcaagagcaggcgcaggcacaaacaacattccgaaggataagtgcagcgagcagggtattgttgttttcaatacaccgggtgctaacgcaaacgctgttaaggagcttgttatcgcaggacttcttatttcaaaccgtaaggttattgagggttatgaatgggcgaagactctcaagggcaacggtgcagctgtcggtaagatggttgaaaagggcaagagtcagtttgtcggtcccgaaatcaagggtaagactctcggtgttatcggtcttggagcaatcggtattcttgttgcaaatgccgctgttgctctcggtatgaatgtaatcggctttgacccatttatgtctgttggcaacgctctcaagcttgctcctacagttaagctcatgaagagcgcagaagatgttatggtaaattgcgactacctcacaatccatgttccgcttactgacgacacaagagatatggttgatgccgatatgattgccaagatgaaagacggtgttcgtattctcaatttcagccgtgacggtcttgttaattcaacagcagttcttgaggctgttaagagcggcaaggttgctaagtatgttacagacttcggaacagacgatatcctcggtgaagagaatattatctgcctcccacacctcggtgcatcaactcccgaaagtgaagaaaattgtgctgttatggcttgtgatcaggttaaggagtacctcgagaacggtaacatcatcaactccgtaaactatcctgcaatttcacttgcaagaacaaatgctgacgatacccgtttctgcgttgctcacaagaatgttcccgagcttctcaagaaggttctcacacagatcagcggcaatgttgaaaatatgctttcaaagagccgtggcgactatgcttacacaattattgatgttgcaggcgccggtgcagatgaccttgcaaaaatcgcagcagttgacggcgtaatcagagttcgtgcaatctgatttcgattttaattgagctttaatgttgtaaaaaattatccgagcattgttttgatgctcggattttttgcgtttatttgtacaaatggttacaatgctacactcgggcatgatatgcctttaatattacaaactgtctgcacgaacggggagcgatggtacaccgaccaggtggtattttttggcattggcaattataaatgttacggaaattgcaacggcacacaattctgcaacgggcaatgccgaccatacaccgtttatgcctataaacatcggcagaatcagcattgcggcacactcgaaaacaagcgttcttgcaactgaaattacggctgaaatcttgccgttgttgagtgcggtgaaaagtcccgatgcgaaaatattcattccgcacaacagataatttattgcaaaaattctgaatccgctgagcgcaatctgctggattttttcgtcgcctgccgagaaaattccgacaagcggttctgcaaaaaattcagatgccgtaatcattgcaactgaaattatcagcgtgatttttatgcataatttgaacagcttttgcagtttttcgtggttttgtgcgccgtagttaaagctgatgacgggtgaaactcccgaagtgaatccaaacgaaaccgcagtgaaaataaagtgaatgtacaaaatagcacttatagccgcaacgccttttgcgcctgcaaagtgcatcatctgaatgttgaacagtgctgttgtcacggctgttgaaagatttgtcacagcctctgacgagccgtttgccattgcaaagaggatttcacttaccttgaattcaggcttaccaaagtgcagagtttgcttcttgttgaaaaagagcaaaagcggaattgcacccacagccattcctataatggtgccgagtcctgcgccgattattccaaaatcccacactgccataaaaagaatgtcaagcacaatgtttgtgcaacccgacagtatcgagaaaacaagcatgatatgtggcttgtctgctgttacaaggtacgattggttgagcatttgccagcacattacaaagccgtacggaatcataacgctgccgtagtcaatgcagtaggggagaattttttcgtttgagccgaacatcatgtacataggttcggcaaaaattgtgaacagcacagcaatgataacagaaatgaccgttgccgtgattgcaacaccggacataagtcggtttgcttcctcctgtttgccttctcccattttctttgcgattatagcatttgagcctgttgaaaacattaagcccacagccataaatacgagcgtgaacggatatacaatattgattgcagacaatgcgtcacttccgacacagttcgcaacaacgattccgtcaacaaccgtgtaaagtgacataaaaaccatcataagaacggttggcagagtgaacttcagaatcgtttttgctttgataggttttgcataaattgatgttgccataaaacttccttaccctcaaatttatatttttcacagaccatttaaatgattgtatcataactttgtcgcaattacaactgatttgtctttttttgtaaaatatgctattatatacagacttaaaagcgaaaaaaggggcggttttatgtttaagggcgcagtttttgatatggacgggcttatgattgacagcgaaaggcttgtttattcaatctggcaggaaatgcttgatgaggacggcaaagagtttaatctcgacattttcaaaaagacaatcggacttcgcagtgaggattcctacgaatattacaagtcggtttacggcgatgattttgactatcctgcttacaaggcggagtcgagaatccgctattttaagcgtatcgaaaagaacggtgtgcctgtaaaaaaaggcttgtacgaaatttttgattatttaaaatcagtcggttgtaaaatttcgcttgcaacttcaacctcgtcacaaacggctttgaagattatgaagaaaatcaatctctatgataaatttgacgcattcgtgtgcggtgatgatgttaaaaacggcaagcccgatcccgaggtttttttgattgccgcaaagaagctcgggcttgagccggtggactgcgttgcgtttgaggacagcattaacggcataaaatctgcacatgccgcaggtatgaccacggttatggttcccgatttgtcagagccgacagacgaaattaaaccgatgatagattttttgtgtacggatttaagcgaagcgataaagcatttataaattgaaaattacggtgagccgccgttcccaattcgtgcaaatttgaatacacaatttatgttatatcaaaacatatgtgtatggacataatatttcatcaaggcgggcgtccaatgaacgcccctacagagaaaattacaaataattacaaatggttacaatttacaaaaatacaattgagcagggctgattattatacacattttccacatagttttcaacaattgttaaaaaagaacggcaatgcctgttgagcgttgctacggttactgcggaaaagggaaaaattaaaaataatcattgaataacagcacgataatatgttatactttggtaaacaacaatctttacggaggacaaaatgaagaaaattataaataaaaagtcactcaagggtgcgcttgctgttatgttatgtgccgttatggcgttttctgtctgtgcctgtgactttgattctgacacagaaccaaccaaaacggatgcacaaattcagttcgataaatattgtgacgatttgttttcggaagaacttgaggatgacgctcttaccgcacattttgacatttcaaatccgtcggactacggtctgaaatatgacgaggaggactataccctcggtcatgtgtccgatgaagatacaaaagaatcctttgatgaactgaaaaaggcaaaaacggatttggaggagtttgaccgttcgggacttacttcttctcaaaagcagacatatgacacccttgaaagctactttgaaattcagctttcatatgagggtacaacagaattgcagagtatatttgcaccgcagtcgggaattgttgcaaacctctttaccaccctgtccgaattcactttctatgaaaaggatgataccgacctttaccttgctgttttgaaggacacaaaacgctatatggacgagtgcattgagttcacaaggaaacaggctgaggacggttactttatggctgaagatatcgcacagcagtcaattgacgagtgcgaaaagcatattaagaatgacaagtccgtgcttgttgacgagtttgagtcgagaataaagtcactcggtcttagcgattccgagaaaaagactgttgtagaaaccaacaaaaagtattttgaagaatactacattcctgctttgaaatcagcaaattcagcacttgaaagtctcaaaaaatcaggcaaaaacgaagaaggtctttgcgggtacggcaaaatcggcaaaaagtattattcggcaattgtcaaagacaaaacaagcagcagcatgactcccgaggagcttaagtcataccttacaaacagctttacaaaggttggaatgagcatgagcaatgtttcacaggatgacttgagcaaatttcaggactacaaacccgactttaaggacgccgatgaggtgcttgaatttttgattgagaatatcgaggaggactttccgactcccgttacaacctcttacacggcagattatatgagcgattccgcaaagagcgacaatgtgggagcgtactatgttcagggacgaattgacgatacaagcgttaatatcatcaaaatcaaccccgactttgcaaataagggtatgactcagatgtacacaactcttgcccatgaaggctatcccggtcatctttatcagtttaccgcatcaaatgcaaacaaggatatcccgaatgtccgtaagattttaagctttatcggcgcaaccgagggttgggcgcagtatgcctcgaaatgtacgcttgattaccttgatacaagcgagggcattaagaagcttatctacgcaaatgatattctcggctatattctctattccatggtcgatgtcggtgtgaactacaacggctgggattatgaaaaagtcaaggagtatatgtcaacggcactcggttcggctgacagcgagagcgttacagccgcaacaaaagaggcgtatgaccttgcccgttcaaatccgggttattttctcccctataccgtaggctacctcaagatgattgatatgcgtgaaacagccgaaagcgagcttggctcaagctttgacgcaaaggaatatcacacattcattatgaatctcggaatcacaagcattgatgtctatgaaaaagcccttgatatgtggcttgaaagcaaaaagtaaatttttggtgataatcttgaatattttttacaggtatgatataattaactcattgatatgataaatataaattggtatggatttttctaagatgtgattcttattttcgccatacactcgttacgggtgtgtggcgatttttattttacgcaaggggtgttaatatgggcgttaaaacggaaaataaaatggcttatgaacctgtcaacaaacttataattcaaatgtcggcaccgccgctgatttcaatgttctttcagtattcatacaaccttgttgacagtatgtttgttgcagggataaatgaacaggcacttgcggcagtatcgcttgcattcccgattacaacgcttatgaatgcgttgtccgtgtggataggtgtgggtgttaatgttttgattgcaggttatttgggacagaaaaatcagcaaaaggcaaattctgcagcggctctcggagtggtaatttcggtagttgtcggagtgctgataaatttcctttcgcttttcataataaatccctattattcggcttttacgcaaaacaaagagatttttgaatacggaattgcgtatatgagcgtctgcgtttttatgcagataccaaatatggtgcatattgtaattcaaaaaatacttcaggcaacaggcaatatgattgctccgatgtggtttcaaattgcaggtgttgtattcaattttgtgtttgaccctttgctcattttcggcataggtccgtttccgaaaatgggtgtggtcggagctgcagttgccacggttttaggctatgttgtttcaacaatcattgcgttgatacagctgtttcttacaaaacaaaaggttaagccggtgtttaaaaactgccttgaaccgcagatgataaagctgatattttcctacggattgccctcgtttgttatgaatgcgttgggagcattcaccgtgaattttgcaaatatgtttttggtgcgatattcggacacggcggttgcatttttcggagcatatttcaaggttcagcagttgatttttatgacggtgaacggactaattcaaggctgtttgcctataatgcggtttaattacagagcaaaagagtacggtcgccttaaacaagcaaataagagcggaacaattatcgcgactgttatgatgattgtcggtatgctcttggtgctgattttcccgaaagagatattgtttttgttttcggcatcggaagaaatgtgtgcttttggagtgccggcaatgagaattatgtcactcggatttgtgttcagcggcttttctgcaatgattgcaacctatgaacaggcaacagacagtattatgcccggcgttgtagttcaactgttgcgacagggcgtgctgttagtccccgtaatttggcttttaaacagagctgttcaaatgacaggcatatggcttgcgttcccaattacagaatttgtcacatttcttgttgctgttgtatttgcaaaaattaaaaatcattgaataaataaaaataacaaccgccaaaacccgatataatggattttggcggttgtttgttatttaaaatatgtttaattttaaattgtttttgcaaaaacattatcagatgattttgctctgaaaattgtttttacgagcaggaatgttatataaacataaagtgcggtgtagatgattgccgtaaatttaaggtttataagctcgtaggagaacagatagtagcaatagcctctcaggcttataagcgttgacacaatcggaatccacaaatgttttgcacttaccgccgcatagacaattaaaataatgtcaagcagataaccgtagcgttcgtgcattgacgaaaggaacatgatacaggtgaacacagtccacgctgttgtcagaagaaaagtttcaaggtttttcaaatcaacctttttatagatgataatgcacatcataattccgagtacggcaattgtcagaaagaccgaaaactgcttgaacagataataatatgtcatatcgtttccgtcacatatgagtgcataaaagttcggacagttcatctgaataagctttccgtagtcggtctgttccgcatatattgtgatgatatcgataaacggtctacccataataattgcaggcaggcacattatcacatcaaccgtagggattataaagaaatgcagaatcgaaattttctttgccgaaatccagtaataaagcagaacaggaatgatgaatacggtttgcagcttgaatgcaaacgcaatgccgatgaacacaaacgatacaatcggcttgtctttgtgcaaaaacaggattgcaaggattataaacgaggtgtaaattgaatcgcattgcgcccaaaacgatgagttaaaaataacggttgccgaaagaagtacggctgagtaggtgagtatcgctttgagccgtcggttattctttgcaaacgaataaacaagcattgcggttgaaattgcaagtacaaaatcgaatattattgatacgattttgtacgcatacagagcatttagcggcaaaagagtcataagatagattatgacttgatacggaatgttgtagttacccacctgagttgcaagccccgtaaaatcattcagcttgattatgctccaccatgaatttaaaaagctgttgaaatcatcgctttgaaaatccattccgcagactctgaggaaaattgcaataatcgttaccgcaacgagtaaaaataaaagaatgtgtttttttataaagtcaatgactttgctttctgcttttgtcatagagaaaattcctgttcgggtttaaataaaaccgattttcttcataaccttgcccattgtgcggctgctgattttaagggcaatttcatcggcttttctgtaacagctttcaagatatgccttgtctgcaacaagcttttcgtagcgttcacgaatcggacgaagttcttcaacaactgcctcgcctacagctgtcttgaagtcgccgtagcccttgccgtcaaaatccttttcaatctgctcgtatgaaagacctgtaactgcgctgtaaattgccataaggttatttacaccgtctttgccctccgcatagcgaacctttgcctcgctgtccgtaacggctctcttgaacttcttcattataacctcgggtgcatcaagaagatgtacacagccgttgacattttcatcggacttgctcatctttcttgtcgggtcctgaagactcataacccttgcaccgttctttggaatgaaaccgtccggaatcttgaacacattgccgtaaataccgttaaaacgctctgcaatgtttcttgtaatttcaatgtgctgtttctggtctgcaccgacaggcactttgtcagcctgatagagaagaatgtcggcagccatgagtacgggatatgtgaaaagaccggcgttgatgttgtcggcgtgctttgcagacttgtccttgaactgcgtcattcttgaaagctcgccgaactgtgtgtaacagctgagcgcccatgcaagctctgcgtgagtgtgaacatgactctgaatgaagaaaaggcttttttcaacatcaataccgcaagccataattgaagcataagcatcaattatattcttacgcataacggcaggagtctgtcttaccgtgattgtgtgcaaatctgcaagagcgtaaatgcagtcatattcgttctgcattgtaacccagttgcgaaccgcaccgagatagtttccgagtgtaattgttccgctgggctgtattgcgctgaatacaacctctttttttgtctgattttccattattcccctccgtgattaaagactgtttgcatactcgccgaggattttgattcctctttcaagctgttcgtcagtcggtgttgaaaagtttattctgaaactgtgacaggtttcgttttcgtcagttaaaaatgcgttgcccggaactacgcaaacctttttgagaacgagttctttgcagaaattcggcatatcaatatcctcgggcaagtcacaccaaatgaaaagaccgccgtcaattttatgatatgtgattttcggtgcgcagtatttgtcaagaagctccatgcagaagttcgctttctttgtgtagatttcacgaagctttgcaaggtgagcgttaaagtcatactttgtgatgaactcatcgcatacatattgtgcccagatgtttgtatgtacatcgttgccctgtttgcaaacaacaagcttttgaaaaatcggctttggtgcaattgtgtaagcaacacgcatacccggtgaaattacctttgagaatgaaccggcatagattacaattccgtccgtatcaaagctttttatgttcggaacatattcaccgctgtaacgcaggtcgccgtacgggttgtcctcaatgatgagaacaccgtattttttggcaagctcataaaccttcttacgcttttcaaggctcattgtaacacccgaaggattttgaaaattcggaattgtgtaaatgagctttgcgttcggattggcttttaaagcctcttcaagcttttctgtgctcataccgtcaggctcaacgggaacacctgcaagctttgcgttgtagcttctgaatgtgttgagcgagccgatgaatgacggtgcctcgcagattacaacatcgccctcgtttacaagagcctttgagcataaatccataatctgctgtgcgcctgttgtgatgagaatgtcgtcattgtcggagcctgtgttatgctcctttttcatatattccgtaaggtgctttctcagcggagtgtaaccctccgaaacgctgtactgtaaaaccgaaatcggatcttctgcaaaaacctttgccgagatttccgcaatctcctttgagggaaatgcatcgggcgacgggtttcctgccgaaagcgacacaacgctcggatcggcggcatatttgaaaatttctctgatagcactcggcttcaggcttgaaaccctgtcggaaaacctgtattccataaaaatatctccttttaagatgataaggattttttaaaattccataccctgtaattctatcacgaattgcatatatgttcaagaaatttgactgtttttactgcgattttattcaaaaaatgtgtaatttattattttgcgtttgtaaatgttaattcacggaaattgtattttttgtgctttttgtattgtttttgatgagtttctgttgtataatctaagtgataatgtccttacggtcagagcaaggcttgctttgattcaaacaggagtacactgcgagtaattaatacacttatatattcattgaattcaaattgaatttaaaaatcttcagtttgggagagtaacactatgagcagaagaaacgattacgattattttgatcttgataatttcgatgacagcattgattcccgtgaatatcgtcgcagacagcaacagcgccgtcctgcaagctatgccgcaagaccgtcatcacagcgtcccgtcagaagacctgtaaaaagaagaaacaaaagaagaaccagaaacagaattattatcgttgcgagcgcattgataattctgtttgttattatttttattataacttcaatttttaagggttgttcaaaggaagatgcccttgcaagcgttcccacgggaacagtgggtacaacggcatctcccgacgaaaccgcaaaatcttcgactgctaacaaagcagacgagctttcccctacatactttatgacaccgagcataaaggacgacaataaaaacggaactctttcatacagcatttatgtgtggaacaaaacaggctacgaattgttcagcagtgatgatgcaagagcacagaactatgctcagacgatcaacggctttgcagacaagttcggcagctccgtaaaggtttatgatatgattgttcctaaccataccgaaatgggacttccgcaaagactcaaagacagcgacgctccgtcaacctcacaggctgacaacatcaaggcagcttatgcggctctttccgacaaggtaactccgattaactgctacaaccgtcttgcggaacataatacagattacatctactttaagagcgaccaccattggacaggcctcggcgcttactatgcttacacagcatttgccgatacaaacgatttgcccgttctttcgcttgatgattgcgaggaacagaagattaacggctttacaggctcgtttaccaactcggcagacggtcttgacagcgatacggtaagttattggaagttcccttataatgtaacaatggatatcacacaggcagacggttcttccgcaagctatgacagtccctactatgaagccgcagagggcggttcaaacacctacggtgtgtttattatgggtgataatgccctcacggttctgaaatcagcttcggaaaatgcggcggcaggcaagaagattgccgttgtaaaggaaagctacggcaacgcttttgttccgtatctcacaaataactacgaagaagttcatgttatcgacttcagatatttcaaacagaatcttgttgattactgcaaaatcaacggaattgacgaggtgctttttatgaacggtgtaatgagtgccaacactcaggttcagcttgacagtatgagcggactttttaactga

SEQ ID NO: 41 - DNA, 7736 bp, unidentified
  source 1..7736: mol_type = unassigned DNA
gatgatgtcagactcttccataccagctacgtgctggatagcaccggaaataccgattgcgaagtatacgtgcggacgaacagtcttaccagtctgtcctacctgaagatctttcggcttccagccggaatctacaactgcacgagagcagcttactgtaccgccaatagcctcagcgaggtcatcaagcagtttgaagttctctgcgctgccaactccacggccaccggaaacaaggatctttgcatccatgatatcagctacgtcggatactgccttaacgatctcgagaatctcaacgtacttgttgtccggagtgaagcccgggttgaattcgacaatttcagcttttctgccagcctcacggtcaagcttctgcataacgcctggacgtactgtagccatctgcggacggaattccgggcaagcgattgtagcgatcgtgttgccgccgaatgccggacgggtcataaggagctgaccatgtttctgctctttacccggcatagctacgagcgggaaatctccgatatcgagctgtgtgcagtctgctgtaagacctgtatggatacgtgcgcaaacacgcgggccaaggtcacgaccgattgctgtagcaccgattaagaagatgtccggcttgaactcgttgataacagatgtgatcgcatgagtatacggctcagttctgtaatcttttaattccggatcgtcaacaacgataactttgtctgcaccgtactcaccgagttcgtctgcaagaccttttacgttggaaccaactaaaactgctgttacagttgttcctaaatcttttgccaggtctttacctttaccgatcagctccagagcgatgctgctgatctgattgtctacctgctgtgcaaagacatatacacccttatattctgctaaattcatcacttttcaccacacttttctttttttgaattaaagtacatgtttctcagtaagtttctcaacaatgtaatttgcagctgcggacggatcaaggtttgtctccttaacgcctgcaccctttcttactttgtcggaagccttagcgatctgagtcggggatcccttaagaccaaggttggaatcaaggacatctttcagatcttttctgccccaaacggtgatctctttcttgtatgcatcgaagattccgcccggagtcatgtaacgcggctcatttaattcagaaagtgctgtaattaagcacggcattttagcctttaacatcatgtatctatcatcgaactgacgcttaacgattacggaatcgccatcgatctcgatgccctcagcatagctgattaccggaagaccaaggtgctcagagatctgcggacctacctgagctgtatcaccatcgatagcctgacggcctgtgatgatgaggtcatagtcaaggtttcttaaagcaccagcgattgtctgggatgtagcccatgtatcagcaccgccgagaacacggtctgtaacaaggataccgttatcagcgcccatagccatagcctcacgaagaacttcctcagccttcggaagacccattgtaactactgtaacttctgcaccatactgatcttttaagcgaagagctgcctccagaccagctttatcatccgggttcatgattgtgagcatagctgctctgtcaagtgttccatccggtttgaactttacgccgcccttagtatccggcacctgttttacacaaacaacgattttcactgtatttcactccttattttcatttatagttatgatcttccagctgttaaattattattttaacagtgcgccggagataaccattctctgaacttcacttgttccttcgtagatctcggtgatcttagcatcacgcatcatacgctctacgtcgtactctctgatgtaaccataaccaccatggagctgtacagcctttgttgttacttccatagcaacctctgctgcatacagtttagccattgctgcctctacgccgtaggacttctgagtagccttagccattgctgcacggtaaaccatcatctgagcagcttttacctttgttgccatatcagcaagctggaactgtgtgttctggaactgaccgattgtgcggccgaactgctttctctcttttacgtaagcaactgttctgtcaagagcgccctctgcaagaccaagagcctgagcagcgataccgatacgtccgccgtcaagagtatgcatagcgatcttgaagccctcacccttcttacctaagaggttgtccttcgggatgcggcagtctgtgaaaataagttcatatgttgcagatccgcggatacccatcttcttctcttttgtaccaaaagtgaagcccggtgtacctttctctacgataaatgcggaaatctctttctgcattttgccacgtttctcaacagtgcctgttacagcgataacgatgtatgtatcagcatacttaccgttagtgatgaagcacttggaaccgtttaatacccactcgtcaccgtctaaaacagcttttgtctgctgaccctgagcgtctgtaccagcgcccggctcagttaaaccgaatgcgcctaacttctcgccttttgcaagcggaacgaggaatttctgcttctgctcttctgttccgaatgtcataatcggatccatgcaaagggatgtatgtgcggaaacgataacgcctgtagtaccgcaaactttggaaagctcctcaacgcacatagcgtatgtaagcggatcacagccctgtccaccatactccttcggtaccggaataccgaggaaaccgtttttagccatcttctctacggtttcaaccgggaatctctcttcctcatcaacctcctgagcaaggggtttgacttccttctcggcgaaatcatggaacagtgttctcgccatctcatgctctttacctaatgtaaaatccatgtttttagttcctccttgtgaattgtatcatgtataacatgggggaatgtggatgcttcactcccccgatgtacctaatttagtacatgccttttcattataacatattgtgaaaaaataaacaatcgtaataaaaaaataattcgaaatttactcttctgttataaaaggcatattgcctgacgggataagatcaccgtcaggcaacccttacattattatttgctgtaatcgtagaagcccttgccggtctttcttccaagaaggccgccgcgaaccatcttcttaagaagcggatgcggacgatacttcggatcgcctgtctctgtctcaagaacgttcatgattgcaagaacaacatcaagaccgatcagatcaccgagagctaacggtcccatcggatggttagcgccaagcttcatggcagtatcgataccctctacggaagcaacgccatcagcgtaaatgccgactgcttcgttgaccatcggaataagaattctgtttacaacgaaaccagcagcctcttctacctgtaccggagtcttgccgatctcctcggagatcttcttaactgcttcaacatcttccggttttgtgtttaaaccagcaataacctcaaccagcttcataaccggagccgggttgaagaaatgcataccgattacatgtctctcaactgcgccgccgatctctgtgatggaaagggaagaagtgtttgtagcaaagatacagctcggtttgcagattgcgtcgagctctttgaatgtctgcttcttgatctccatgttctcgattgcagcctcaacaacgaggtcgcagtcaccacagatatcttttacgcctgttgtgatcttgttcaggatcttgtcagcctcttcctgagtcattttgccttttgcgattctcttctcgaatccagcggcaattttcttctttccgttcgctgcaaatgtctcattgatgtcgcagagcattacctcatagccttctgtctgtgcgaatgcctgtgcaataccggaacccatggttccagcgccgataataccaactttcatgattttatctcctttatgcaaacatatgatgtagacttactgatcgctgttcagactgaacagttccatttatttgtttttgaagccgtccacttttctcttttcgaggaacgccttcattccttccttctggtcctcggtctcgaagcactcggagaaatatttctcttcgatggagattgcgtggtcaaggtcggaaagataaccatctgtcagggactccttggaatttctgacagcgatcggtgcgttggaggcgatcttctttgccagtttcataactgtcggcataagttcttccttcgtgcacacaccgtttacaagaccgatccggtatgcttcgtctgctttgatattgacagcagcatataccatttcctttgcttttccggttccaatcagtcttgcgagacgctgcgttccaccgaatcccggagtgatgccaagaccaacctccggctgtccgaacatagcgttttcggagcagtaacggatatcacagctcattgcaagttcatttccaccgccaagcgcgaaaccgttgacagctgcgatcgacgggatcggaagtgtctccagcttacggaaaacatcgtttccagctttactgaactcacgtgcctcctgtacagtcattgtgctcattgcagcgatatctgcgccggcaacaaaggatttctcacccgcgccggtcacaaccagcactcttgttgtaccaagatcgatgctgtcaagaacagcgtctaaatcctgaataacctctgtatttaaagcgtttaatgcctccggacggttgatggtgataacaccaacaaaaccgtcctgctcatattttacaaaacccatatgtagttctcctcagattttgccaaagtcccagattagtctctctctacgattgtagcgcagcccattccgccgccgatgcaaagagttgcaagacccttcttagcatctgctttctccatctcatgaagaagtgtaacaaggatacggcatccggaagctccaaccgggtgaccaagagcgatcgcgccgccattcgggtttaacttgttaaggtcaaagccaagctctttgcctactgctacagactgtgcagcgaatgcctcgttagcctcgatgatatcgaagtctttgatctccatgcctgttctcttaagaacttttcttgtagctgcaaccggtccgatacccatgatcttcggatctacgccgccgagagcaccagcaacccatgtagccatcggcttaacaccgagctctttagctttctcttcgctcataacaacaactgcagctgcgccgtcgttgattcctgaggagttaccagctgtaactaagccgccgtctttcttgaatgccggttttaacttaccaagagtctcaaccgttgttccgtgacgcgggccttcatctgtatctacgataactgtctcttttttcttcttaacttctaccggaacgatctcgtccttgaatgcgccggacttctgagcagcctctgccttctgctggcttactgcagcgaacttgtccagttcttctcttgtaagaccccactgatcgcagatgttctcagctgtgatacccatgtggtagttgttgaatgcatcccagagagcatcgttaaccattgtatcaactaatgtagcattgcccatacggtatccgtaacggcctttcatcattgcatacggagccatggacatgttctccataccacctgcaacaacgatatcagcgtcaccggaaaggatcatctcagcagccatgttgacagcctcaagaccagaaccgcatacaacattgatcgtaacagccggaacctcgatcgggagaccagcttttaatgtagcctgacgtgctacgttctgtccctgaccagcctggattacgcagcccatgtaaacctggtcaacagcttccggagcaactcctgctctctttaaagcctctttgattacgattgcgccaagctccggagccggtactgtgcttaattcgccacccattgttccgattgccgtacggcatgcacctgcaagtacaactttctttgccattttcttttcctcctcatcataccgctgccaagctctacaccatatatttttccataagcaaggcagtatattatgtataactaatcatatcaccaaaccgttttgctgtcaaatcattatcaaaagctttttatatattttttctaaacaaattaggaactttactcttcatttcgtacaaaagttacttttatgctctgacgcgtcactttctgtttttgtcatgttttaccatttctttctattcctttttcaccggatttcttgaccttgccggcagataatgataaaataatatcagagtttggccccggatcctatgatcccggcaaagttctgagatgcagtaatatttttatggttacaaagagagggtattaaaatggatttcaaacagatgtatcaggaaaagctggtttccgctgagaaagcagcttccgttatcaaatccggtgactgggtcgattacggctggacaacagcaactccgatcgcagtcgataaggaaatcgcaaaaagacttccggaattaactgacgtaaacttccgcggcggtatcttaatgtgggtaccggagatcttcaagatcgagaacccggctgaacatatgacatggaactcctggcatatgagcgggatcgagagaaaagcgatcgcacagggcttctgctactacgctccgctccgttactccgagcttccgagatattacagagaatcccagaacaagccggatgtcgctgtcttccaggtttccccgatggacgagcacggtttcttcaacttcggaccgaacgcatcccatatggctgctgtctgcgagacctccaaggtcgttatcgtggaagtaaatgaaaatatgccggtatgcttcggcggtactgaggaaggtgttcatatctcccacgttgacatgatcgtagaaggtgacaacccggcgatcgctgagatgggcggcgctgcagctgcaagcgatgtcgatgaagcagttgcaaagctgatccttgaggagatcccggacggagcatgcttacagctcggtatcggcggaatgccgaacgcagtcggtgctctgatcgcaaaatccgacttaaaggatctcggtgtgcacacagagatgtacgttgacgctttcgttgatatcgcaaacgcaggaaagatcaccggcgcgagaaagaatatcgacaaaggccgtcaggtttatgcattcggcgcaggtacaaagaaattatacgactacttaaataagaatccggagtgcatgtccgcaccggtcgactacacaaacgatgtccgcacgattgcgtctctcgacaacttcatgtccatcaacaacgcagttgaccttgacctctttggccaggtaaatgctgagtccgcaggaatcaagcacatcagcggagccggcggacagctcgacttcgttctgggcgcttatctttccaagggcggaaagagcttcatctgctgctcttctaccttcaagaagaaagacggcaccttagagtccaggatcgttccgactctggctcctggctccatcgttaccgatacccgtgcgaatatccactatctcgttactgagtacggtaaagtaaacttaaaaggtctctccacatggcagaagactgaagcgatcatctccgtagcacatccgcagttccgcgaccag

SEQ ID NO: 42 - DNA, 8633 bp, unidentified
  source 1..8633: mol_type = unassigned DNA
ttaaagctcttttcgccacaccatcttgttcactacgcccacataactctgaatgatcttcacaacctttgtggagacattttcatccgtatagtcaggaacgggggtgccgtagtcgccgtttttaacaagttctactgccgtatcgacggactggagaagtcctttagtgtcgatgccggagagaatgaatcccgccttgtcgagagactcgggacgttcggtcgaggtacggatgcaaactgccggaaaaggatgtcctacgctggtgaagaaagaactctcctcgggaagggtgcccgaatcggaaacgacagcgaatgcgttcatctgaaggcaattgtagtcgtggaacccgagtggctgctggacctgtactcgcggatcaagtttgaaacctgtagcctcaaggcggtgacggctccggggatggcaactgtagagaatcggcatgtcatacttctcggccattgcgtttatcgcattgaaaaggcagaggaagttcttctccgtgtcgatgttctcttcgcggtgagcactcaacaggatgtagtgccccttcttgagtccgagtctctcgtgtacatcggatgcctggatctcggcaaggttcttatggagcacctcggccatgggagaaccggtgacgtatgtacgctcacggggaagtccgcattcagcaaggtatcttcttgcatgctcggagtaggcgagattgacgtccgagatgatgtccacgatacggcggttcgtctcctccggaaggcattcgtctttgcagcggttgccggcctccatgtggaaaatcggaatgtggagccgttttgccccgatgacactcaaacagctgttggtgtcgccaagaacgagtacggcatccggtttggttgcagcgaaaagcttgtagctgcagttgatgatgttgccgcaggtcgcgccgaggtcatctccgactgcatccatgtagacttccggttcggcgagtttcaggtcgcggaagaagatgccgttaaggttatagtcgtagttctgtccggtatgggccagaatcacatcgaaatatttgcggcatttggagatgacagcagcaagccggatgatctccgggcgggtgccgacgatgatgcagagtttgattttgccgttattttgccagtgaatgtcactgtaatcgaatttcggagttttggtttccatagatcgttttgattattcagccatcttgcggcttttattcgcttgctacgggatcgaagaaagtgtccggccgctccgggttgaaaacctcgttgcagtacatgacagttacaagatcctgagtcttggagaggtttatgatgttgtgcgtatatccgggcagcatgatgacgctctgaatcttgtcgcccgagacttcgaactcgatgacctcgtccgtaccctcttttcgctgctggatcaggccgtggccggaaacaacgatgaactgctcccatttggtgtggtgccagtgctgacctttggtgatacccggtttgctgatattgatacttacctgtccgcagttgagtgtgcgaaccagctcggtgaaggagccacggtcgtcgcagttcatcttcaggtcaaaaatggccttatccttgggaagatagctcaaataggtgctgtaaagcctcttggcaaagctgtcggccgggatctcggggatcatcagcgtcttcggcatgtcgtggaactgctgcagaagggcaacgatttcacccagcgtagccttatgagtgacgggacagtagcagtaacgtccttccgcagaaggcaatacggtcagcccttcgaactcgcaatggtgctcctggcctttcagagcggcgatcatctcttcaacaagatcgtcgatgtaaaggacgtcgagctccactttcgggtcattgaccgtgatgggcagatcgttggcgatgttgttgcagaacgtggcgatggcgctgttgtagttaggacggcaccattttccgtagagattggggaaccggtaaacaagaacctttatgccgttttcctctccataccgaagaaagagatcttcgcccgcctttttgctgcgcccatattcgctgttgccgaaacggccggaaagagatgcctgtgccgaacttgagagcattacaggggctttgttcccatgcttcttcagcgtgtcaagaagcgttgaggcaaagccgaaattgccggccatgaactcttccgggttctgaggccggtttacgccagcgaggttgaatacaaaatcacattcggaacaccatgcgtccagttgctccatggtgctgttcaagtcatactcaaagacttcatcaatctgaaggtctccatagcacttggccttacctgttttgatgttattaagttgggagcaaaggttccgacccacgaaaccctttgctccggttaccagaatcttcatctgttattcacttctataatcgcgggactttgctttgggctgcaggccgaggtcttcgcggatgaaattgagtttgaggagaagagccttcatgccttcgacatccagcctcttggtgttatggctgtgatagtcctccatgcggttgatggcatcatcgccttccgtgaagaatttgtcgtagttgaggtcgcgggcgtcgcaaggaatgcggaaatagttgccgcaatcttccgagcgaagcatctcttcgcgcgtgacaagcgtttcatagagtttctcgccgtggcgagtaccgatgattttcacctcggtctctccgtattggggatccaccttggcataaacctgcttgagggcttctgcaagtacgtcgagagttgcggccggcgccttttgaacgaagaggtcaccgttgttgccatgctcaaaggcatacatgacaagatcgacagcgtcatcaagtgtcatcatgaaccgggtcatgttaagatccgtgatggtgatcggcttaccttccatcatctgctctacccaaagaggaataacggaaccacggctagccattacatttccataacgggtgcagcaaatggtggtttttgcatccggacccaaagcgcgtccttgagcaatggcgaccttttccatcatcgctttggagatacccatggcattgatcgggtaggctgctttgtccgtagagaggacgacgacatttttaactccgtgagcgatggcggagagaagtacattattggtgccttctacattcgtgcgtacagcctccatcggatagaattcgcaagagggcacctgcttcaacgcagccgcagagaagacataatctactccgttcattgcgaagtctacagcctcacggttacgtacatttccaatatagaatttgactttgtttgaaacgtccggacgatttgcctgaaggaagtgccgcatgtcatcctgtttcttctcgtctcgggagaagatgcgaatttcccggatatcagagtcgagaaaacgacgcagaactgcattgccgaaacttcctgtaccgcctgtgattagcaggactttgtctttgaaaatactcataatgcttaaaataatgtattgtgcttttttagtttgaaagtgtttgtattgcgcgcagatgcagaatggatgtcgttgatatgaggcagtgattatttatcgctgtgaaactttgcataccattctgcaaatactctcaatccgttcctaaggaatgtcgatggcttgaacccaaagtcgtgctcaagaggtgttgtatcggcgtatgttacaggaacgtctcccggctgcatcggaacgagctctttgtgtgcttcaaaagcataatttgcgggcaggattccggctcgtactaattcctgttgcaggatatcgacaaaatccaacagattctctggctggctgttgcctatgttgtagactttgtaaggcggcaacggcagtccgtcttctccagttatgcgctccggtgcatgttgcataacccgaacgactccctcgacaatatcgtcgatataggtgaaatcccgcttgcagtttccgtaattaaagatgcgtatcttctctccttttacaagcttgtccgtaaatccgaagtaggccatatcaggacgtcctgcggggccatataccgtaaagaatcgtaatccggttgaaggtatgttatatagtttggagtacgcgtgcgccaacaattcattcgactttttggttgcggcgtataacgataccggattatcaactttatcatcggtcgaatagggtacctttttattcgagccgtatacgctggatgaggaggcgtaaaccagatgttcaactcctgtctgcccattatcgtaactgtgtcgacaggcttccaaaatgttataaaagccgatgagattactttcgacgtaggcatcaggattggtaatgctgtatctgacgcctgcctgtgctgccaggtttacaacgatagcaggtttatattcgtcaaacaagcggatgatgatttcccgatttgctatcgagtcgtgaatgaacacaaatcgatctccaaattcttccaggcctttcagtcgatcatgtttcagggagacatcgtaatagtcggtaatgctgtctataccgatgacttgcagttctgcatagtccgtcaaaagccgtttggcaagattcgatccgataaagccggcaactccagttaccagaactgttttgccgttcagtattatattgtagggtaacatataataggctgtttaatctcttctgaaaatatctcgggtatagacttttgtctcgacatcgcccaggcaggcgtcatagcgatttgctatgatagcagcactcatttgcttgaatttctcgagatcgttgacgaccttgctgccgaaaaatgtcgatccatcctcgagggtcggctcgtaaatgataaccgttgcgcccttggccttgatgcgcttcatgatgccttgaatcgaactctgtcggaaattgtcactattggatttcatggtcaggcgatatacaccgatcacgattggcttctcccgcttcttattgtaatcatttgtcgaagagtagctataatatccagcctttttcagaacctgatccgcaatgaaatccttgcgggtgcgattcgattcgacgatggcctcgatcagattctcggggacatccgcataatttgccagcatttgtttagtgtctttcggcaggcaataccctccataaccgaacgatggattgttgtaatgagtcccaatacggggatccagacctactccgaggataatggcttgagaatccagaccttttacctctgcataagtatccagttcattgaagtagctgactcgaagggccagataggtattggcaaagagcttcacggcctcagcttctttcaggcccataaacagtgtgtcgatattctctttgatggccccttcctgcagaagagcggcaaacgtatgggccgactttttaagcgcctgaatatcggcgattgcacgaatggcatcattctcctccttgaaccgctcatcgtcgatgatttggggaatacccacaataatgcgactcggatagaggttgtcgtagagagctttgctctcacgcaggaattcaggagagaaaagtagattgaaccgttttacccccttctgcatgtatttgatatacaaactccggcagtaacctacaggaatcgtcgatttgataaccatgacagcttgaggattaacctcaagcaccagatcgatcacctcttcgacatgacttgtgtcaaaatagttcttgacagggtcgtagtttgttggagcggcaatcacgacaaaatctgcattccgataggccgcagcaccatccaatgtcgctgtaagattcaacggtttctcggccaaatatttttcaatatactcgtcttgaatcggagactgtttccgattcagcatctccaccttttcagaaataacatcaactgctgttacttgatgatgctgagccaataatgtggcgattgacaaaccaacatagccggttccggctacggcaatctttaagtctttgttcaaatctgtgttcattatggttgattttactttgtctctttatcgaactcttcgaatcgggagttcttggacttgaactcgggaacgatcttcttcatcaggcgaaccatgtccggaatgacgacggcgcggcaaagctcctccaactcctgcgcacccttgagagcatcggcgtagtcgtactcgcggaccttggcgatacggatgcggtcgtgtgacgtcggaagcgtgttctccgtattcgacagcacctcctcatagagtttttcgcccgggcgcagtcccgtgtattcgatcttgatgtccttgtcgacctccagaccggccagttcgatcatgcgcctggccaggtgggcgatcttcaccgacttacccatgtcgaagacaaagatctgggtgcccgtagacatcgtggcagcctccattaccagacgacaggcctccggaatcgtcatgaagaagcgcgtgatgtcggggtgcgtaaccgtaaccggaccgcccttggctatctgctcgcggaagcgcgggatcaccgaaccgttcgaacccagcacgttgccgaaacgcgtagtgacgaacttcgtcttgcccttcaccttgccggcctcgatggccagaccgagcgactgcacgtagatctcggccagacgttttgtacagcccatgatgttggtcgggttgacggccttgtccgtcgagatcataaccatcttctcgacgtcatattcgatacacttgtccgccacgttgcgcgagccggcaacgttggccagaacggcttcgcaggaattctcctccatcagcggcacgtgtttgtaggctgctgcgtggaagaccacctgcggacgataggtgcggaagacgaaatccagacgcggaatcatgcgtacgtcgccgattacgggaatgaacttcagattggggtagcgatcctccaactcgaggcggatgttgtgcatcggcgtctcggagttgtcgaacagcacgatttccttgactccgaacgtcgccagctggcggcacaactccgaaccgatggaccccgccgcgcccgtaaccaggatcgtcttgccgcggaagttggcgatgatctcgtccatcgagatcttgatctcttcacgtcccagcaggtcctcgatcctgatctcgcggattgcctgacgctgcaccttgccgtcgaccacctcgtcgatcgagggagcgatcagcaccttgaggttgcagtccgtacaataatggattaggcgctcctgctcttcgcgagcctcatggacgtgggcgaagagaatggcgtcaatatccttgcagttgtgcaggtatttgacattctcttcggtttcgaagcagtagaccgggagatcggccagcatatgattcttcagtgttttgccgtaggtcaggaaaccgatgacctgatactcttgagaattttggagttgggtcaccaacgaaacgcccttgtcgccggtaccgtagatcaggatccgctggcatttgcaatgcctttgacggctgtctttgagccagtcatagacgacaaccatggcaacacgcataatcaccagttctgaaaggctcagcaacatgtcaaacaacagagtgatccagatcgctggaaatgtcgggccagcgacacccaaagccaatataactgcgatcccaattcccttgaaaacaacggcgacactcaaacggcccaaaccccgcaaggtggcatgacggatgattgatttgtgggtttggagcaacacgaacgcgatccaggaaaagacaacggatcctccgagccaccagccgattgttttccagataagggcttcagcacccaaaagaatgcttgcaactaacagtgagatgatcgaggccccggccgaaaccagcaggtccaatgcaagaatcaaccgtgaactgatataacgatccagtcgcagtttttcaattaaacgatacatgatttgatgtatgaatattttatttgtttgaaattcgaagaccgaaaacagcctgctcggatctcgaatccatgccccccccctctcctccgcggccaaactgacggtcgaaatcggccaagaggcgaatcagctgtgccttgctctttttgagtgattcttccgtgagccagggatcaatcaaggcgtgtgcttggtcgcatgtgactactttggcctcaatttccgcaaaacgatacgaacatcgggaatcgtaaagaattacaaaaactctttcaccgcgtgttcatgccatgcacgatactctgcggcggagaattctgccaccagcagtttcttgtaatcgtgcttgtcacaaaccggaatatgctgctggatgtaagcccgcaactcgctgtcgggaatgctgaccatcaccaccggaaaaggatagtccttatggctgaacaaggtggtttctcctttccggaagagccgctccaactggaaggccgactcttcgaaagcatgccaatagtcttccgttccgtatagccggatgtatcttttgttgtcctgttccttgcggagtatctcgaccatacgggtctcgaccagacgtttcaatgacatccacgcaggctcgacattcggtttgccgttcat

SEQ ID NO: 43 - DNA, 11630 bp, unidentified
  source 1..11630: mol_type = unassigned DNA
atgactctggcttctccggaaaatattttaaatgtaaccgaattatgccgtatagcaggggtttcccgttccggttattataactggttgaaaaatggtcagaagccaagtcaaaaagaatatcaggatcaggcagactttgctttaattcaggaagcatatgcatttcgaggctatgataaaggtgtaatgggaatttatatgcgccttctgcatatgggtatccgtatgaatcataaaaaaatccgacggctgatgcgaaagtatgggcttttctgtccgatacgaaaagcaaatccctatcgaagaatggcaaaagccatgcagacaaattctgtagcggataatcttttaaaacgggagtttaaactccacggcccaaggaaaatatttttaactgacattacatatatcccgtttaaggacagctttctgtatttgtctgttatcatggattcgtttacggatgaggtgctttcttatgtcctcagcgaaagcttagaagtagattttgttttacaaacagtaaaacagcttattgagaagcatggaatctctcctgattccgaagcactgatacatagtgaccagggatgccactacacaagtacatcttttcaagaggttatagcagatgcaggacttcgtcaatccatgtcaagacgcggaaactgctggaataatgctcctcaagaaagcttctttggtcatatgaaagaagaaatccatcttaaatcaaggagatgggcaactttttccgaagtaaaagaagccattgatgactggattgattattataataatgaccgatataaaatgggattaaagaacctgtctcccaaagaattttataactatatactaactggagagtatccgataaagatgcttcgttaaaattgggcatagaaagagctgactgtccttgacacgggtagtagtttagttcacgctgaggcggaagaagggcacagactagcttgatcctatctcctgtgcccacgttgaggcagaagaatgggcacaggcggaacttgtcctgcctacggcagccctacgttacgagtcatgcactcaattcataaatgtgtcgcaaaggacgctccacatttatttcattgacggctgtcgagtgtgtccgttggacgcacggtataaaaatagaacgaaataacctcttgtgtgagcaagctcccaccgaggtattccgttctatttttgcatggctcgtaactttcaatttacatcaataatacatcgctccctgtaaaaatccccaaaaataatacactccgcatacgaggtgccacaggtaagccatccactgtactgctacgacaatccttctcttccgggtgtcggcattcgctgtcgcgcggagcagtaccagcagcgctcccacaaatgcgaagaagattccgtacatgtagccccaagagaaattgaaatccacctcccggaatcctttttcatacaggaaaaatgccatgaggaagctcatcacatacacctgccaggagaaacggtagatgctgtccttgtgcagttccttgtagttcagcagaagtaccaggatcgggaatccgatggccagtccgatagccaggggcagattgccacaatactgcgcccatacatggccaaaagtaaatccgatgccgccttcctgtccctcctgcggtacgaacactccccggaactggtagagcagatccataaaagtcggaataaaacatactcccagccacaccgtggggacaaaattccggaatctgctgcggaacattctccacagcatcaaaatccccgcagctccgaccagcactatggtaaaactgggtttcgtcatggtcgccaacagcagatataatgcaaacagaatataatctctcttatgctctctgcccgcatttggctgctcatacaccggcagcaattcaccatacttaaaaaatgcaagaattgcaaacggccgtgccgccatataggtggcattgtggaatggattcggcgtaaataccccgagatatttgtatttgataccggggagataaatccctgtcggcggatacaccatcgacacaaaaaacagggataccgctacggttccagtgaggatccccggaagccaaggttttccgggcatagcttcctgtagctttgctcccacatgcttgtccagcatcaccttcagagcgatcattgctccgctgtttaacagcatcgtggccagtgccatagccagctccgctccgccagtaaaggaggcggtcaccagatggatcgtcgccgccagcttgaacaaaaccgggtaagggaagctgtaaccgctgtccagtccctgcatctccagaatatatgccttcatatcggaatgatacagtcccgttcccagcatgctttccacacactgccggtaaaacagccagaacgtaactgccgatgcgatggctaccagtgcagcaaacaccggaatttctatccaatttttcttattttctttcaaaataccgttccctgccactttctgattcattccgctatttcccatgatccggcacggctccacccattgccggatcttatttcagcttcgtgtaataagctaccacctttttcactgcatggatcacatcttccacatcgtcatccgtcaatccgtaatacagaggaatactcatcacctcgttgtaatacttctccgcattggggcacagtcccttctgatatcccagcttctcataataggaatgccagtagaccggcaggtaatgcacctgagggcaggtattttccgcatacagagcatcgaaaaactgccttctgtcgcagttcaggttctccagattcagatgcagcacatacagatgccaggtcgtgtcagactcagggatctccttctgcaggatcagttccggcattttgccgaacgcttcattataacgcttatggatttcttttctacgctgttcaaatgcagggagcttcttcagctggctcaatagcagtgccgcctggaaatccgtcatacgataattgaagcccagctctacctgctcgttgtaccacagcgcatcggtgggatgtaccatttcttccgggtccctcgtaatgccgtgggtacgcagccgcatcagatgacgatacagcttctcatcattagtcgtgatggcgccgccttctccgccggtcaccgtcttgaccggatggaagctgaagcaggtcatatctgccaggcttcccacaggctggcccttatatttcgtgccgatggcatgcgcggcatcctcgatcaggatcagatcgtgctccttacagatctcccggatctcatccagctccactgcctgaccggtgaaatctaccgcaacgatcgctttcgtcctgggtgtgatcagcttgcggatggacgccggatcgatattgtaggtctccggatcaatatctgcgaaaacaggcttcgcacccgcatataatacacagttggaggatgcagcaaaagtgatcgagcttacgataacctcgtctccctcaccgaatcccgccgccagcgccgccagatgtaaagcagcggtaccgttacataccgccactgcgtattttgcatgggtcagttcacacagatgctgctccagctccttcaccttaggtccgctggtaatcacatccgcagtcagcaccttggttactgcctctacatctgcctgatcaatatattgccgtccgtagaaaatcttcttctcacgtaccggttttcctccaaaaatggctaactgttccatattttcttcctcctgtaacatcttcatttcttttctatccgctgctatgatgcaaacatctgcaatttttagtctttttactcttttgccaaatctgaattttcaaaaggctgccactcgtcattcactgcttcatcttatcatattgccgggagaaaaacaacaatggtgttggcagcgccactcttgtgaagtataataaaactatctgaaatcagaaggatcaccggattcgccagatctgacagaaaggatgccctatcccatgaacaaacaaaccatacgtaaaaaatctccctggaaatttctgctttttgcccttgccgcgcttctgttggccggcattgtaaccagcggaattctttatttgaaaatatatgagcccaggaagcgttcctccgaccttggcagattacaacaggaatcctatcagggcatatttttgtccatgtccgcgccggaagctttccccgaagacatctatcccacctatatgggatatgacgcggtatgcggttcccaccggattgcatccttctccgacctgtccgattatctggaaacggccttctcctccggaaatgaggtatctcatgtcttcctcgtgctggatccgctctccctatggaacagcagcctgcacagcgatgcccgcttctctgcctccctggacgaagacctcctgtcctatgtggatacctacgccggcgccgaattcaccgtcattttctctgcgccttccctagaatactggcagtcacatgccaatggagatctggacacttactgcaatgtgttccgggtgctggcttcccctctgtccgccagagagaacgtgacactctgcttccccggccaggaagaatggctgatctcaaatccggatgcctatgacactcccacggaattaactgccgaagccgcccgttcagtaatgctgctggtgctgagcggctccctgcaataccggagcacagaaagcgataacagcttagatcatttttacacactggtacaggatgctgtaaattctccggctgactatcccgacctgtccgactacgagcttatatttttcggcgacagtgtcatgggaaattatcatgattttgcttccatccccggagtcgtccacgctctgaccggtgccaccgtgcataatctggcaatcggcggttcctccgctacccggagtagcgatgacgataattccttcccgaatgtcgtacaggactttttagaccataatacggaagaactttccggtgataaaaaactctgtttcctcatcaattacggcttaaacgattattttgagggatattccatcgccgattaccaagacgggctccgcaccggcatccgggctatgcgggaatcctatccggatgcacggatcatggtcatatcctccaattatattctgtcttttgaaaagggaatggcacgcatcggtgacgaagaaaatgtattagaagactatattgccgcggcagaagaaaccgccgcggctgagaatgttgattttctgaatatcaatgatgctctgcagtggaatgaacataatgccgcagaatatctggcagattccattcatcccaacgaggaaggacgctttctgttcggtgtggaggtgatccgttctgggaaataatccctgtccttctcagaaccttgctgttaccagtgaatattctcccacagtatcgatcacttcataagggaattgcaggtactgcaggtctccctcatagagtaccatcagtccatccccgacggcttccgccagttccgctccggatttttccggatagatgtagtgataacgctgtgtgtaatcctcgctctgataataccgggcatctattctgcaggcatactggatcaggatctccgtggctgactggttgaactgccaccccagattgcctgtgatgtacaaactgtcatatccttccatgccgtcagcttcggctacggcatccaggaaatccctgttgtaatactgtctgctctcttccgcatactctgtaaaatacgttgtaaaaaacaatacactgctgactacatacacagccatgataaccggtaagagtttcctgcatttgtccactgccagtgaaataccataagcgcacaacacaatcaccgggtagaagataatattcacacggttaatgttcacttcataggtgatcaggccaacccagatccccgtgatcaggaatccccacaatgccagcatctgcatctgtttttcaatctgtttttccttaaaaaggcgaattgtaaatacaatgattcctataaatacaaacggtatcgacacatgatataagggtccgaatgccggaatcgaattaaagaaaatgtccgggagctgcaggaacaccctgctgaataatgcccacgcattcctgcccagctgtgcaaaggaaaaatttaaaagcagtatatccgcgcttctgagactatccggaaaatattgcatggtaaaaaagggcgtttcgatggtcctgccaaagtgtatcgcattgattcccaggacgatcacctccggcagggcaaccacagttaatagcactgcgcacagcaacccctcccggaatttcagttgttttttccacaggcaccatataaaaaatacaaacaaaaatgccgtgacggagtacgccgctattccataacaataaaatgtcaggccgaaaaagagcatggataaatacaaataccgccttttctccagtcccaacaacagcagataaaatgccaataaaaatacatgtgggaacagattacagtccaacgaccagcggctctgcatgaactgccagggattcaccgccgtcaaaagcatcgctataaaagcaatcctctcattaaacagcttttccgacactaaatataccagtgcaaccgccccacaggataccagcagcatcggcagtctcactgtcacagtgctaaagccaaacaccttgataaacggcaccatacaataggatagcagaacactcatctgactgtatttccaggcctcaaaatgaaccggcagaaacgtgccataacggtcagtaccgtattttgatagtgcccatgcatccatggctcccatggcttcatcctggttaatcccatccggcactgccgcaaaacggatgcagcgcaagataaacgccagtgccagaatggaccagaacagaacttgcttttttctcattttaaaaaaggcaacaaatttttcctgtgtaataaaactcatgatagtagtatcctcttcaacctgattattcgttgtcttatgcagctgttgtaaaaatgcataagtaaactactatcttatcataccacatttgaaaaaaattgtcgcctattgttctttgtgcctagcattgcccagcattgaaaggtaaatctactttttccttatcctgcacactgatctctttcccgatctgtatttcaatcagtttcagctccgtttgggcgatcacggtgtggttgcatccggcaggcatcgttaccacatccccggctttcacctgcttctccgtgccgtcgatcacggtcattccctctccggagatgacgacccagacctcatcacggtgcttgtgattatgatagttcatggaatgtccttcattcagcgtcactttgatggtcatcgagccgctctcgacgtccagcacgcggaagcttccccagctcttctctgcgaacatgatctgctgttcgaatttatccacgaacggcttgatgtaggagctttgctctttgtcagatacgagaatgccttccggcgatgccgagatcacgacatcatgcaatcccatcgccagcaccggcacatccatctcattcacgatatgcacattggagcagttgtcattcagcactccttttcccacgacagcatcctgcatggcttccgtcagagtattccaggtaccaaggtccttccactgaccggagaaacgctgcacctggattttatcttctttttctactaccgcataatcaaaagaaatcttcggaagagtctcatactttgcaaacaaatcatgataatccgtaaaatcgattaatttatgggcaatctccatgacatacttcagcttataagcaaagacgccgccgttccacagtgctccctgtgcgatatactcttttgccacatccgcagtcggtttttctttaaaagtcgctaccattgcggtctcatccgatgacttcggaatgatgtaaccgtatttttcactgggataggtgggttcgatccccatcagcaccagattcgcctcgcctttgtccgcctgggcagaaagccgcttcagggcttcaaaataatccgcttccacataaggatctaccggacaaacgaccacagattcctccggggagatcttctgtacgtccaccagataagcagtagccagcgcgatggcaggaaatgtatctcttctacagggttccacggagattccgacatcctgccccagctgattatggatcgcggatacctgcgtcttgctcgtagcaatcgtcaccgtcgcttcggtatccaccttcttgatctggtgatagacacgctgcaccatggactcgtaggagccgtcctcctgtttgaatattttgataaactgtttgcttctgacatcgttggataggggccataggcgtttgccggagccacccgacagtaatacaatgttcatatttatctctccgctctcattggattgttcaggaaatcttcatacgccaaccggataccgtcctccagttccgtcatgtaatgccagccaagtttctctgccttgctaacatccagaagctttctgggggtgccgttcggtttcgtcgtatcccacttgatttctccggtgtatccgactacctttgccacaagttcggtcagttccttgatcgtcagttccttgccggtaccggcgttcacagtctcattgccgctgtaattgttcatcaggaatacgcacaggttggcgagatcatccacatacagaaactcacgtagcggagagccgtctccccagcaggtcacctctgtcttaccctctacttttgcctcgtggaaacgacggatcagtgccggcaatacgtgggaatgggtcggatgatagttatcattgggtccgtacagattcgtcggcatgacagagatgtaatctgtaccgtactgcttattcaggaattcacaatacttaaggcccgagatcttcgccagggcatatgcttcgttcgtcttctccagttcggaggtcaggagacagtcttccttcatcggttgcggtgccatccggggatagatacaggagcttcctaagaattccagcttcttacatccgttcttccatgcggaattgatcacattcatctccagagtcatgttaaaccacatgaagtctgccagagcgttctggtttgctacaatacctccgaccttggctgctgcgaggaacacatactccggcttctctgccgcaaaaaattcctctacctctgcctgacgggtcagatccagctcctgatgcgtccgtgtgataatgtttgtatagccctgcctgttcaattcacggacaatggcagagccaaccattcctttgtgtcctgcgacatatattttagcgtctttttccatcattttcttttaccttcttatcctatttatcttccagccactaccgttaccatgtgctatcctcatagcatcaatgttgcgtgtcttgatagttctcactttttgcaatttacttttcagcgttcattcttatttttactatcttagcataggccatttgataatcattacgcttttaaattcttggtagtcttatttcacaacacctttttccaggtactctgccagattggtacggatatgttcttccgctctttccacagcgaccttctccatgtcgtgtttcgtcatcagttctaccagctgttcgaagcttgtcttggtcgggttccagcccagctctgtcttcgccttggtgggatctccccagagattgaccacatctgtcgggcgatagaaatcaggacttacttccacgatgacctgaccgttcgccttgttgattcccttttcctccaggccttctccctgccattccacttcgatgccggcataatggaatgccagtgttgcgaactcacgtacagaatgctgtacgcctgtcgcaatgacaaaatcttccggcttcttgttctgcaggatcagccacatgcactccacgtaatccttcgcatagccccagtcacgcagggaatccagattgcccagatacagcttgtcctgcttgccctgtgcgattctggctgctgccagggtgatctttctcgtcacgaaggtctcgccgcgtctctcgctctcgtggttgaataaaataccggagcagcagaacatgccataagcttctctgtattctttcgcgatccagtagccgtactgctttgccactgcatacgggctgtaagggtgaaaaggtgtcgtctccttctgcggtacttcctctacctttccgtacaattcagaagtagatgcctgatagatccggcaagtcttctccagtccacacactctgacagcttccaatactctcaatacaccggttgcatcgatgtctgccgtgaactccggcacatcaaagcttacctgcacatgagactgcgctgccagattatagatttcatccggtttcacctcgccgatcaattttaccaggctgatcgaatctcccagatcgccgaatttcagatgaaaatgaggagttccctccagatgcgcgatgcgttctctataatctacggaagaacgacggatcatgccgtagacttcatatcctttctccaataacagttctgccagataagaaccgtcctgtcctgttactcctgtgatcagtgctctcttcacttcgttacctcctgcgttttcctatggggtatcattttgcccatatattacatatctcttgcctatcttcctcatttagacctgcatacgctttgcgccgcgtaatgtacgtctcaactatagcctcattatagtataacaaaaaaagaaaccaaagacactttcttcggtttctcttgtactttcttcggatttattgtatctcattaccacattcctcgatattccgtaggcgtaacaccttccacacgtttgaacattctgctgaaatatgctgcaccatttatcccgaccattgttgcaatttcttctgttgtcttgtccgtgaaacgcaacagccgttttgcctctgtgattctcacggacaccagataatctttcagtgctatgccatattgttccttgaacatttccgataaatacgttttattgataaaaaactgtgccgccagtccttccagggtgatctccgaggcatagttgctgtcaatatactctcgtaccctgaccacctgcacccgttttcccttcacggcattgctttccggattccagctatcctccatcaaaagcaccagcaattgtgataagagcgcattgatctccatgtcgcggacataagaatccgaagctgcaaccgttttcattttttcgagaattccccggtattccgaagtcttttgtgaccggaagactgtttttccaccacgaaccttgtatttttcataaatatgtgacatctgtgggccatcgaaatgacaccatacaagcgtccaaagctcttcttccgtcgtatgtgcatacggcagcgtacagtcgaggaatacggaatctccggcacgcagctcataggtctccccaccgtaagtcagtctgccgctacctgacagcaccgtaaaatacaa

SEQ ID NO: 44 - DNA, 18578 bp, unidentified
  source 1..18578: mol_type = unassigned DNA
  misc_difference 12877: note = a, c, g, or t
  misc_difference 12878: note = a, c, g, or t
  misc_difference 12879: note = a, c, g, or t
  misc_difference 12880: note = a, c, g, or t
  misc_difference 12881: note = a, c, g, or t
  misc_difference 12882: note = a, c, g, or t
  misc_difference 12883: note = a, c, g, or t
  misc_difference 12884: note = a, c, g, or t
  misc_difference 12885: note = a, c, g, or t
  misc_difference 12886: note = a, c, g, or t
  misc_difference 12887: note = a, c, g, or t
  misc_difference 12888: note = a, c, g, or t
  misc_difference 12889: note = a, c, g, or t
  misc_difference 12890: note = a, c, g, or t
  misc_difference 12891: note = a, c, g, or t
  misc_difference 12892: note = a, c, g, or t
  misc_difference 12893: note = a, c, g, or t
  misc_difference 12894: note = a, c, g, or t
  misc_difference 12895: note = a, c, g, or t
  misc_difference 12896: note = a, c, g, or t
  misc_difference 12897: note = a, c, g, or t
  misc_difference 12898: note = a, c, g, or t
  misc_difference 12899: note = a, c, g, or t
  misc_difference 12900: note = a, c, g, or t
  misc_difference 12901: note = a, c, g, or t
  misc_difference 12902: note = a, c, g, or t
  misc_difference 12903: note = a, c, g, or t
  misc_difference 12904: note = a, c, g, or t
  misc_difference 12905: note = a, c, g, or t
  misc_difference 12906: note = a, c, g, or t
  misc_difference 12907: note = a, c, g, or t
  misc_difference 12908: note = a, c, g, or t
  misc_difference 12909: note = a, c, g, or t
  misc_difference 12910: note = a, c, g, or t
  misc_difference 12911: note = a, c, g, or t
  misc_difference 12912: note = a, c, g, or t
  misc_difference 12913: note = a, c, g, or t
  misc_difference 12914: note = a, c, g, or t
  misc_difference 12915: note = a, c, g, or t
  misc_difference 12916: note = a, c, g, or t
  misc_difference 12917: note = a, c, g, or t
  misc_difference 12918: note = a, c, g, or t
  misc_difference 12919: note = a, c, g, or t
  misc_difference 12920: note = a, c, g, or t
  misc_difference 12921: note = a, c, g, or t
  misc_difference 12922: note = a, c, g, or t
  misc_difference 12923: note = a, c, g, or t
  misc_difference 12924: note = a, c, g, or t
  misc_difference 12925: note = a, c, g, or t
  misc_difference 12926: note = a, c, g, or t
  misc_difference 12927: note = a, c, g, or t
  misc_difference 12928: note = a, c, g, or t
  misc_difference 12929: note = a, c, g, or t
  misc_difference 12930: note = a, c, g, or t
  misc_difference 12931: note = a, c, g, or t
  misc_difference 12932: note = a, c, g, or t
  misc_difference 12933: note = a, c, g, or t
  misc_difference 12934: note = a, c, g, or t
  misc_difference 12935: note = a, c, g, or t
  misc_difference 12936: note = a, c, g, or t
  misc_difference 12937: note = a, c, g, or t
  misc_difference 12938: note = a, c, g, or t
  misc_difference 12939: note = a, c, g, or t
  misc_difference 12940: note = a, c, g, or t
  misc_difference 12941: note = a, c, g, or t
  misc_difference 12942: note = a, c, g, or t
  misc_difference 12943: note = a, c, g, or t
  misc_difference 12944: note = a, c, g, or t
  misc_difference 12945: note = a, c, g, or t
  misc_difference 12946: note = a, c, g, or t
  misc_difference 12947: note = a, c, g, or t
  misc_difference 12948: note = a, c, g, or t
  misc_difference 12949: note = a, c, g, or t
  misc_difference 12950: note = a, c, g, or t
  misc_difference 12951: note = a, c, g, or t
  misc_difference 12952: note = a, c, g, or t
  misc_difference 12953: note = a, c, g, or t
  misc_difference 12954: note = a, c, g, or t
  misc_difference 12955: note = a, c, g, or t
  misc_difference 12956: note = a, c, g, or t
  misc_difference 12957: note = a, c, g, or t
  misc_difference 12958: note = a, c, g, or t
  misc_difference 12959: note = a, c, g, or t
  misc_difference 12960: note = a, c, g, or t
  misc_difference 12961: note = a, c, g, or t
  misc_difference 12962: note = a, c, g, or t
  misc_difference 12963: note = a, c, g, or t
  misc_difference 12964: note = a, c, g, or t
  misc_difference 12965: note = a, c, g, or t
  misc_difference 12966: note = a, c, g, or t
  misc_difference 12967: note = a, c, g, or t
  misc_difference 12968: note = a, c, g, or t
  misc_difference 12969: note = a, c, g, or t
  misc_difference 12970: note = a, c, g, or t
  misc_difference 12971: note = a, c, g, or t
  misc_difference 12972: note = a, c, g, or t
  misc_difference 12973: note = a, c, g, or t
  misc_difference 12974: note = a, c, g, or t
  misc_difference 12975: note = a, c, g, or t
  misc_difference 12976: note = a, c, g, or t
ctaaaaaatccattcaaagacgattccgtaaagctccctcagataataagttggcagtaaccaccacgctgttttcccgcacaccgccgatggtgttatacctgtatgttctgcgataacagatgcccggtattcatgaaattcatttgttacaataatgacccggaaatccagatgttcctcttccatgatcttctttgagtacagaagattctctctggtcgaagttgaccgttcttccttatataaacgttcttttgcaattcccttttctgtcagataccggtacatgcactccgcttcactgatattctcaccttttccctgtcctccggacagaatacccacaacctcttcatgtgtattcagataatcatacgctgcatctaagcgttccgtcaacatcaggcttggtcggtcgccatttacaccacagccaagcacgatcatgacagtttcatccttcggtgctgtcttcgatgctcgtaccatgcatatcgtacctgctgccgcaaagccgactgcaatcactacgatcagtaaaacgattccgcatattacttttccggtagtccgggtcagccattttttcacccggcaattcaccctgtggaaccatgccgcatataagatcaggcagataccaagaacaactcccgtaagatttcctatgtttttaatccccttcgtaacaaatggatacagaaatataaatactcctgcaaatcctgctatgaataatactattctaagccacaatttcttcaattttccctacatacctcccgtctttttacataattctcctttttccggagtttactccatgtttatagcatccaaatgcatcaaaatgccatcatctctattgcagaggcgttaagatttgtttaaaggctatccctccgactggcaattggtatggttatcatgacttgttccgttttctgttcgatgcacatggctgattcgctcatgctcctgcgcaaactcgtcctacggactcagacatgcgcccgcattcgctgccaatgtgcatctcacgacgaaatactcacaatatcatggataaccataccaattgccagtcagaggggataccagataataatttgcctcacaacatcatgaatatccataccgctaggaaccagaggggaatataaaaataaccgctatggtaagacagcgtctagggattgaccctagggattgtctcgccacagcggttgtttgtgcgattcatatgtataaggattgttgttttgtttatgttaagatttctttagtggttcagacattctttgatggatgcttcaaaaatatcaagaccggctgcaagctgctcatctgtcattacaagcggtgcaaggaaacggattacattgttgtaagttcctgcgccttctactaacagacctttcttcgcacaagtctggatcaggtcagatgtaaatgctgcatccggttcttttgtttcctgatcttttacgaattcgataccgatcataccgccaagtcctctgacatcaccgataaccggatatttcttctgcatttccagataacgctctgtcacttttttaccgatctcacaggaacgctctgccagatgatctctctccataatctcgatcgtctttaaggatgcggcacatgccagtggatttccacaataggttccaccgatcgttcctgccggaactgcatccataacctcagttcttgcaataattgccgacaatggaacacctgctgcaatggattttgctgttgcgatgatatcaggctctacacctgcctcctgccagtaaacagaagcaaacatacgaccggttctgcagaaaccgctctgtacctcatctgcgatcagcaggataccattttcatcacagatcttacgaactgcttttacccattcgatcggagcaggaatgaaaccaccttcgccctgaagcggctcaacaacgatcgctgcgatcgtgtctgctgctgcacactgttcaaatacatcgtagatagatttgatatagtaatcaactgccttatcctcaggcattccttccggatttctataataatatgggaactgtgcacggaacacgccggctgctaacggtcccatatcctttgcatatgctttcttggatgtcattgccattgtaaaatgtgttcttccatggaatgcaccggagaatacgatgatattcggacgttttgtatatgcctttgctaccttaacggcattctcatctgcttctgctccactatttgcaaagaaggctttcttgctgtcgccctttacaggtgcaatgccggataacttctctgcgagcgctacatagccttcatgtgttacgacattgaacatgccgtgaaaatatttatctgcctgtgcttttactgcttcaacgacttccggctgggaaaatccgatattcaataccccgacaccaccgatccagtccaagaacttgttgccatcgacatcctcgatcatggcaccttcaccacgttctataacgaccggatatccgcaacggatcgcatttggaactgcctgcgctcttctgtctataattgcctgtgccttaggaccgggtaaagtctctgttattatttccggtaaatctgttcttaacatatgtatcatcctccatcttcttatacggacgacctttatatctgtgccgcccatttatttgctcttttgaatttactacagtatgtcattcataaaaactgatcaccatatcccatcagcacaaaaacttccgccctgttttgtgctgatagcacaagtatatgtttgacagacacatattttctatgatattgttgggttattgtaataagtagcacaaatcaatggtttaatatattaagtagcagtcggcaaacgccttatataattaagcatatttcgggcagacatacacaaactgcttcaaagcaacaagctgcaaccgactcaatacacacatatcacatttggatcaaactgacttcttatccatagacgagtaataattatcaaacgctgccaagaaaggaatcttaaacatggcaatattattaagagatttatataaagagacaaaaagcacctatggtctggatctgatcgcaggagaagaagggctggataacctcatgaactgggtctatatatcagaagatccaggcacactggaattcctgcacggcggtgaactgatcattacgaccggcgtcctgtgtggaaatgaatactggttatataacttcatcaaagggctgatcgagcataaaacctgcggccttattatcaatattgggggacatctgaaccgttccgatatctccgaccgtatccgtatgctgtgcgaccggaagcattacccgctctttcttatgccatgggagacacggatcttcgatattacacacgattattacaatcggatatttgacgatacacagaccagtcaggctatctcaactgccctttcgcgcgtgatccttcacccaaatgacaaagccctgatggagatcagcctgcctgtcttatatgaacatggttttcagggagatgcacaataccatctcgtatatatatcagatctgagagctacagcatccgtggaaccatccattgcactgacaaatacctctatcccacactccgatcgtttctccaccccacccgcttatgccaacaccgccggaagttttcttcagaatctgttgacacgtctggtcagaatctataatctgccatatacatttgtaggcggcaccaactatactctgctgatctgccccgcgcggtcaaatgaacggctcgaacaggagcttagccggcttctgtatcatatgggagaatctgccggaacaacttccatgtatatcggaatcagtgcgccaaccaaagacctgaccggattaagtcaggcatttttacagggactgtgcgccgccctgatggcacaaaaaaagaacagtagcctgttcttcttcgatgatatgggattctataagcttcttttatctgtaagtgatatggatgttcttagagaatatgtaaacgatactctgggatccatcattacatacgatgagcagcaccatacgaattatctggaaacgctctatcagtatctgctctgtgatggcagtatacaaaaaatcgccggtgccctgttctgtcacaggaacaccgtcaattatcgtgttcgtatattaagagaggacttacatcttgccttagatgatccgtccactcgttttgaactgatgaccgcatttcaggtacgcagttatctggatttgttttcctgaacctgctgcagcacattttaatatcatgtacatcatatatccgatcattaattggcctgttattttctgcgtctgaccgccagtaattctttccatgccggcggatagaacaacaagagcaatgggaacagctccagtcttccggcaagcatatcgaacatcaacacatatttggaaaatgtaccatatacattaaaattcttcgttggtcctaccagctccagtcccggtccgatgttattgatcgttgccgcaaccgcagtaaagtttgatgtcatatcttttccctcaaaggagatcaacagtacggatgttgtaaacaggatgataaatgttataaaatatacatttaccgcacgtaccacttcatgctctaccggcttgccgtccattttgatcttcttgatactctttggatgcagataggaattcaactcttttatcacactttttaccacgatgataaatcgggataccttgataccaccaccggtactgcctgcacatgcaccaatgaacatcagaataaccagtatcgtcctacatgtctggttccacaggtcaaaatccacactggagaatccggttgttgttatgatcgaagcgacctggaacgatgcatgacggagtactgtccagaatccatccattgtatgaatcagattcaatacaagaactacgatcgctgccacaataatgaggaaataggttcgcacctcctccatcttcaatgcctttttgatattgccaaataaaatcagatagtatgcattaaaattcacgccgaataagatcataaagatcgttaccacccactgcagatatggcgaaaagctggcaaagctatcattctttgttccgaatccacctgtacccgctgttccgaatccggtacagaatgcatggaataccggcattttcccggctattaacaagatgatctctatagccgttaatacaatgtaaataacatataatattcgcgccgtatacttgatcttcggtacaagcttaccaacagaaggtcccgggctctctgctttcatcagattgatatttgatccgccactaagcggcaataccgcaagcagaaacaccagcacacccatgccaccgatccagtgtgtaaagcttcgccagaacaacgtcgtccgtgatagtacttccacatcgtttaagatactggctcctgtggttgtaaaaccggagatcgtctcaaataacgcatctgtgaaagatgggatatctcctgatatgcacattggaagtgcaccaaatatactcagtgctatccaactcagtgctgtagcgatacagccctctttcagatagaatacatttactttaggtttatgttttacaatgatggctccaatcagcatacagataactgccatcaccagataatcaattccttcactttcctgataaatcaacgaaaccagacatggcagaagaagcataaccccctccagcatgaccacatgtccgactacgtataaaatcattgaccgattcatagcttcctattttcccttttacaaaaatactcattacttataccagaatatccctgatatcattaaatcctgtatgggtcgttactaccatagcggtatccccgacttcgatcgtatcatgaccggatggtgtaatgatcgtaccgtttcgattgataaacgcgatcagcacatccttctttaacttcagatccatcagtggcttacccgttacctcggatgcttcatccacacggaactcgatcgcctctacccggaaatcaaacatatgatataacgtctgcacacagctgttcatggaacgtgtatttgatttcgcacgaacataagcagtaatagtctccgctgtaataaaactcggataaaatacacttccaaggttcagattattaattatttccttgaaattactacggttgatcttcgtgatggtctttgcatccgaaacatgtctggcatgcagtgtcaggaggatattttcctcgtcaatcccggttaaagcaacaaaggattctgcattgcttaagccttcttcctttaatacatcctgatcggttccgtctgcattgataataactgctttcggaagcagaatactgagtcgctcacaacgatccttctctttctcaatgatctttacattgattcccatattgatcaactgacttgcaagataatatgcaacgtcaccaccgccgacgatcatcgcatcactgacacgatttgtcttgaatccgataaaatcaagaaatgcacggctcatcggacgggatcctacaaacgaaagaacatctcctgcatgcagtttaaaatgaccggatggaatatagacttctccatctctttcaaccgcacaaatcagaatattgatattcttcgctcgatccataagctgctgaccaagatgtgccacagacagtccatctaacatattatgctccggaatcttgatcttcgtcatctctgcctgaccatgtgcaaaggaattgatttccaaagctgtcggcatataaagtacacgcgcaacctccgttgctgtttcaagctccggattgatgaccatggtaagtcccagactctttttcagatattttatctccttgctgtagtccggatttctgacacgcgctaccgttgcgcagtcacgtccctgttttgcgatcgtacagcaaagcaggttcagctcgtcagaattcgttaccgcaatcacaagatcggcattttccacaccggcttccatcagcacgctgtagcttgcaccatttccgcagattcccataacgtcatactgattgacattcatctcaaccttatccgcatttttatcaatgactgttatatcatgcccttccttacataactgtctggtcagtgccgttccgaccttaccgcatcctatgatcaatatattaagacccgttttcttcgtgcctcgttgcttaaacatcacttacctccaccgacttcggctatatattatacataccttttgtgcataaaacgctcactttattatagcgtcaatcttgattgtaacatcttttttctatatgtacagtgatattggaaaattttatttaaagtttagtttgattctgtgttatactactgtctggaggatttgatatgttattttctttatttattaattttttcaaaatcggattatttacatttggcggcggttatgcaatgatcgcacagatccgggaagaagtagttgcaaaacggaactggctcacggaagacgaactgatcgaagtgattgcgatcgctgaatcaacgcccgggccgttggcgatcaacctcgctacttttgtcggttataaacaaagaggcttccgcggaagtctggcagccaccctcggtgtctgtatcccatccgttattattatatttgtcatttctctgttttttgatgctttcattgcaaataaatatgtagcatatgcctttgttggcattaaatgtgctgttgcttttctgatccttacaaccggaatcagcatgatgaaaacactcgaccgaaaaaaaataccggttcttgtatttgtagttacttttataatcatggtgatcggagaactgctttccaaatccgtgaatgcaattcttctgatcctcgcaggcggcatcatcggaattttctgtacctcttttaaaaagatccgaaaggaggatgcagacaaatgatatatctgacattgtttattgaattctttaaagtaggactgttcagcttcggaggcggcttcggcatgataccgctgatccaggatgctgtcatccgccataactggatgagtgaagatgccttttacaatttcatcggtgtctgcgaatctacaccgggtccgatcgcagtcaacatggcgacctatgtcggatcgacacaggcaggacttccgggcggtatcgtcgctactctcggtgtcatcacgccgtcctttttcattatattattaattgccgcagttataaaaaatctgacaaaaaatacctacgtgcagggctttctgtatggcatcaaaccggttatcctggccctgatccttgcaaccggaatcaacatgctgttaaagtctaccgggtatgtcagcttatccgaatatgatgtgaatatccctgctatcattattctgtgcctgcttgcaggaatctatttcttcatccgacgcaaatggaagcagaagctgtcagcgatctctctgatcctgctttccgcggttctgggaatcgtggtatccgtgattgccgaacacatcagataaaaagtcacctgatacaatgcaaagtatcaggtgacttcatatttttcattggcagtcataattatccttttatatcagattgctctgccttttattttcgataggatggagcaagtgcgtatgccggaacatactcctctgctgccacactgttcatggcaaatgcccgtaccagaaacgtaccgatggtttttgatgcattccgaatatagcgtgcatccgtttcattatctccggcctccgtcatatacagtgcatggtttttcttcagatactcgaccgcttcctccacggaatgaaccatttcaccgatccggctcgtttcttcctgttctacatgtccatgtccaaataaaaacttctgaaatccactttcatatgcaacatgttcagaaaatccgccttcaaaaatggagttatgcgcatatgtgaagaaatcctccacataatgaagtacatatccgagtttcaggaaagaatatctgctgttcttccccttttcttccagcttctgtatccggttcactgtattatcaaatgaactcttccaggtatgcttcttaatataggtatgaaccaatatatccggcagaatactgcctaacaataaccacttccttttgttctgtggaacctgttctataatttctctggttacaaataaatgacttctttttttcatatcagtctccttcccacttttaactcggcacaactttttccgttgttcctatctatattttaccgcaggaagtatgaaatacaagccatttcacagaattttcttgaaattagaaaaattttccaacaatttttacacggggcaattctgccctcctgcctgtctcccctgccgcctcccacgccccctgctgtaagtacttgctgcgttttctgttcgcttcacatgccttattcgtaaatactcctgtgcgaactcgccttcggctcagacacgcacccgtatttactggcaatgtgcagctcacgacgaaatacttgcaatgtacttacagcagggggcgtgggaggcggcaggggagacaggcaggagggcagaattgcaagtatatttttgatagaatctgcgtcaccttttgtcattttttacatattatatagtgtacaaaagtttatgaggtgtttatatgaatcgttgtcattgtgatcatcggacggacttcggtcccgatgtatttataacaaatattcaggaaatggcagagcagaataagtgctatcgtacggcactctggaccggctgtcatttgcagatgaccttaatgagcattcctccttgctgtgatatcggtgcagaacttcatccggatatggatcagctcatccgtgttgaaaagggaaatgccatggtcatgacaggaaactgcccacacaatctgaactgtgagcagcatatgtgtgaaggtgatgccgtattcgttcctgccggaacatggcacaacatcaagaacacaggcagatgtccgctcaaattgtctaccatttacgccccaccacatcatccgtttggaactgtggaatacacaaaagaggatgcttaaagcagccttcacttagggattgtatgaaaaacagtttttgagtgacatcttcaagcggtgacaaaaaattaacgaccatacaagagtaagaatgctcctgtgtggtcgttttttatgctcaagtaccgaaatggtagatgagacattaataccctctaattgcactaactatagagtcggtattccacttcacaattacatttgcggcactttttacaacagttgatgttttttcggttccccaagactcgatagcaattatctttttattcatacttttggcaatatcagcttaatggaaaacgagccgatgctacaaacccacaacactattcatcttttgatgaaactgttgaggcatttggtaatggtggttatgcagagttgatatcccggcaggcaaagaaaaaacggcataacctacattgtcgtaagttatgccgtttatttcagagattaaaaatccctaattgaagtcacctaaggaagcttttcttactttacaagataaacctgcctataacataaaaagcaatgctgtctgtatgaatttgccttttggcataaaaaatcatcacttcaaaatgaggtgacgatttttctattattcggttttaattcatgagccaactgtagtccttacggcaatcgaggatatagtccacatatactgtgttatctttgatttgataaagaataagataccacttttccacaaacatcttatgatatttatttggcggtatataagattcttcaaaaaaaggaaaccgttgcggcatactctccaaagaacgcattgcagttattaattctttctttttagctatagctgcttccttattgacctgtgccatgaaacgaatatgcgttccaagcatttgctttgccctatcagaaacaatcaccttatatttcttatctgtcatatactatgcctctccaatcacatcatcaaggtatgaatccagttcatcaagcgtatagccttttcttccagccatcctgtcttcctcaacagcaagcagttcctcccttaatttcaacatcttttcccaacgattgtaagtttcaatatccataacaaccaaatctccctcaccattcttggtcagaaatatcggttctgctgttttacgacacatatcagcaatctcattataattttgacgaattgctgctgacggacgaatattcatattaacacctcctcagaattgttgtaatagtaatattctggctatattatagtcttttaatgctaccaagtcaatatttcagaatagaagttgtctctgaaaaatcttccaaataattcaggcttagaaggatacagtcaataacatcttaaactgttcttcgccatatacagcatgtggaacatcctttggcataatgagtgtctcaccctctgttaagatgaatacttcgccgcctactgtaaaacgtcctgtaccatcaagaacagttaccattgcatctccgccggatgcatgcgtggagatttcttcgcctttgtcaaatgagaaaactgtcacgcttacatagtcattctgaacaagtgtcttgctgactacctgtccctcctgatattctacctgatcctttaataataattttgtctttttttcaatattcttgtacatatttctttgtcctttcgctttcaaaattattttttatttcttttccattatcaaaccgctgtcttacatatgggttgatctgtctgtattcattataccttattgtatgtatttcatacagtttactttttatccgattgtctttaattaatacatatcattataaaagtcttccataccttccggcatctcggtctcataaaagccccgtccatttctggttcccattcggatcgtcatgccgagatcctcatagacactggcgcactcatagtcaatcggctctgtcgttctgacaagcttctctaattcttttgcagccgccatatattcatcaccgtcaaagccgccgatcgccggtcctgacgcgccataatataaagtcagatagatcaccttaccatccttatcttctgccgcgatcgtgtagtccagtaactcctcattattctcggttgtctccttatcgccaaataatgtaacgatctgaccaatgaacagaccatgatattctgcaagtgcttcgtcctcatatacgtttaacaacaaataactgcctgccaggtccacatcatcatttactctgtaaaatgtataattctcgcacgaatatctcgcttcctctgttccatctgtcttttctgttgtgctgtctttttcctgtgcctccatccgatctgaacttccctccgtttctttttctgatgctgcttctgtcttctccgctgtcgcatctgcttctattgtccggtaattctcagttgttccatccatactgtattcggatgtagctacccattctccataatctgtcgtgataccttcatcggcacaccctgtcatcataagcactccaactgcccctaataataaaatcgtctttttcatatccggtgtctccccatgtattttttacccctgtaaacctgtcagatctaatttatatatcgttcgctctaacttcatccgatacagaaatattttttgcaacttttctacccatattatgccccatttttgcaacttttccaaccttattatgccccatttttgcaacnnnnnnnnnnnnnnnnnnnnnnnnnnnnnnnnnnnnnnnnnnnnnnnnnnnnnnnnnnnnnnnnnnnnnnnnnnnnnnnnnnnnnnnnnnnnnnnnnnnnccatttttgcaacttttccaaccttattatgccccatttttgcaacttttccaacttttaccatacgacaaaaggatggccgttttcacgaccgtcctcttatgtctgtcaattttatttataatcattctccagcccgtctgcatcaaagtaattgatcttcatagcagaacgtacatcatgaagagttgctgctgctttcttctgggcagcctcgcttcctgcctttaagatgtcaagaacatccggaatacggctctcccacatcttacgacgttcacggatcggtgtaagctctgactgtaatacattgttcaggaacttcttcaccttaacatcaccaagaccaccacggctgtaatgatccttcagttcatccagattcttataatccggcaggaactgttcaaaatgctccggacgacagaacgcatccagatatgtaaatacggaattgccctcgatctgtcccggatcctctacacggatatgatttggatctgtatacatggacataaccttcttcttaacttcatctgcttcatcggaaagataaatgcagttgccaagagatttgctcatctttgcttttccatcgatacccggaagtctgagacacgctttgttagacggtaatacgatctcaggatctgtcagagtttcgccatatacggaattgaatttgtgaacgatctccttgcactgttccagcataggaagctgatcttcaccaaccggcacttctgttgcacggaaagccgtgatatctgctgcctgactgatcggatagcagaagaatccaaccgggatacttgcttcaaaattacgcatcttgatctcggattttacagtaggatttctctgtacacgagatactgtaacgagattcatataatagaaagataattctgtcagttccggaaccatggactgaatgaagatcgttgatttctcaggatcgatcccacatgccagataatcaagtgcaacctggataatgttctgtcttaccttctccggatgctcggcattatctgtaagtgcctgtgcatctgcgatcattatatatatctcgtcatagtttcctgaattctgaagctttacacgctcagatagggaaccaacataatgtccaacgtgaagtcgtcctgtaggacggtcaccggttaaaataattctactcatcttaaaaagtctccttcatttcttcgttcgataatcctgcccccaattataccgcgagatattgtcatcgtcaaggaaaccctactgttcactgatgatctttctgccactgaaataggtgatcaggaaatatccgccatagatcacaaccagaacaacaacggtcataagcatggctgctcccatgtcatctgttcccatcagcgaaaggatctgtctgctgaatttcaatccaaatattgaatgaatgactgcaagtgcaagcggaaacaggaagaacagacccatctgtgcaaataacgcatgattgatcatcttctgatccacacccaactttcgaagcatcttatatcgttccacattatcggtgctttctgacaattcctttaatgcaaggatcgctgcaccggagatcaggaagatcattccaatatataagccgataaaggatgcaatcgcgccaagtccgatactggcagcttttacattttctttcgtattcagactcagcctgacatccgggtcatcgtccagattgatatgttcatttcttgccatgatcttatccgtatcggtcgtattatagattgcaagcaagatttcagagattggagttactcctgtaagcaccccatccggcacaataatgataccggtattaatggcctgcgttgagatctggacatcaccggcctgacatttgctcattcccggcttcagttcataaccatttacctgaatcgtcgtaccggcctgcaatgacatatctctgtatttcaccatctgcttgtaatttgccacaactccgtattcatcatctttgatcgacacagtttcaaaaccacacagctttgccacacgattataatcggacactgtcatgacattttccataacatccatcataccatacaccggctggtcaccaaggaactcaccctttgcctgctcactgaacgtatccccgtatgtgaaatccggcaatgagtatatatacacatcttcataggctgaaaacatagacggcaaatcaattccatattccttatatatatcgcaaatatcgcgtttatcccatgtcggatcataataagcatcctcatccgcacccttaccggcttcaacatcataatcggagcttcttacctgtctggtaatatttacatcaacggtagcataccttcttaaaccctcattcaaaccatttcggatcgtaagcgccgaagtcagcacgcagatcgtaacaaatagcataatacaaatgatcgagattgacagtacatttgtatttacacggctgctcatctgacggatgacaaatgaattcagccctttataataaacacgtttcatggaagaaactaaccggaacaacataccggaaatcgaccagaaaaacaaaaatgtgcagacacatccaagcccgatacagaaatagatatctttcatatagagctctgttgtatttgaattgatctggtaatatgcatatccaagtcctgctacggaaaggagaaatacgaataccgatatccacggatttttcatcttaacagtctctgatcttctgcctctctggaacaggtcgatcaatttgcagcgtccgatcgcgatcgtattaaacaggatcacaaccacatagatgatagcaaaatagaaacaggtctttacaaatgcagaacttgaaaatacaaaattataagaagacatatccgcttcaaacatatttgcaactaacagactggtaagctgggaaattccgacaccggaaagaagcccaacaccaagtgaaaccagaccgatgatcagtgtctcgataaacagcatctttgataccttccatttgcccattccaagcagcagatacaatccaaattctttgttacgccgtttcatcaagaatcggctggcatatatgatcaggaaaccaagcacaaatgcaatgaatacgctgacaccggaaatgatatttgccatcagctctacaatttctctggtatctttggagatcctcatcatcgccgtctgtgtctcgatcgcattaaaaatatagaagattgctacgccaagaactaaagtgaagaaatagattgcatagtccttcaggcttttcttcatattactaagggataacttaaagagcgtcatttaagtcacctccaagcaaagttacgacatctatgatcttgttgaagaattcttttcggctgtctgctccacggcgaagctcatggaatattttaccgtccttgatgaacaggatgcgaccggcataacttgcggtaaaggaatcatgtgttaccatcaggatcgtagctgacagttcttcattcagatgtttcagactttcaagcaacagctttgcggatttggaatccagtgctccggtcggttcatcggcaaggatcagcttcgggttcgtaatgattgctctcgcagatgccactctctgtttctgtcccccggacatctgatatggatatttattcagaacttcttcgatcgcaagctcctttgcgatcttctttatcttttcgtcaatcttcttcgcaggcgtgttctgtatcgataacgccagtgcaatgttctcatatgctgtcagtgtatctaacaggttgaaatcctgaaagataaatcccagttcttcccggcggaagcggttcaactggttgccgcgaagctttgtgatatcatctcttcctacatagatatgaccgctgctgacacggtctatggtggaaatgcagttaagcagtgtcgtctttccacttccggatgctcccatgatcgcaacgtactcacctttttctacactaaatgaaatgttatcaatggcttttgtaatgttggatttgttaccgtaatacttttcgatattctcaatctttaaaattgtttccacttttatctcctatctgtggctgaacaaattctctgttccatcctgtacattgcttcatttgtataggttgtttcggtattgatcatcccgtaaaatcacgtttgcctttccttatgttctgtcatcctatctgcacatgtctctgtcgcgataaaaccattgctccgacgacatggcacaggatggcagaacataaggtcggctgctctatggattttagggataaccaatactcaaaacagcctacacaaatatttttccatcttaatgatggaacagagaattttctaccacacaatcattattttttggataaagtgttggttgttggtttcattgtcaacacctcatctcctgtttacaagtgtgagtatatcgttttcaagggagagtgtcgtttttcttatgttacagaaggttacagttttgtaaggttaagacatttggcattctttatctgtctgtcagataaggggcacatggtaaagtatagttttattcatccaccagataatagtcgtttcctccaaaggttactgcgacttctgttccgatattttctttggaagtgatggtaagatggtgtcctagctggtcgcacagaccttttacgatatataagcccatacctgttgacttggcaaaacgacgtccgttctcgccggtgaacgatttttcgcaaacgcgaggaaggtctgcttcggaaattccgattccattatctctgatatggagtgtgatatcgtcacctgcttttgtcgtccagatccggatctgccgatcctcatccggcttcatatatttgatgctgttgctcatgatctggtttatcatgaattccagccatttggcatctgtcgtaacgctgacatcaacgtcatgcacatccagacaaatgtcactctccagcaacatatctttattcttcaacgccactttattcacaaccgacttgattcgcactgaatcaaaccgataatctttgctcgcatgttctgcccggacataatacagcacttgatcggcatatgcatccagacggttcacctgatcttcgtatttcttcggtatcttatcctgattattgtggcacatcaataccagacttgcgatcggcagtttgatctcatgcacccatatttcgataaaatccttgaaatcatctacactctgccggtactccttcacatgctctgtcatggatttattaatctcatataacgcctcatagaccagctttccttcatagaagcccggctcctctaacgtatccatgaccagatatttctgatccaactgctccatatgtgcataaagggaattatagaaatgtctgcgttttatatagtctgttaatatgacagttaccagaagcaaaactgtcagcacaagaaagatcaccgtcagctcccctggtgtccgcatcgcacgaaaagcaattaacatgatcgctataaataacagataaccgatcagaatacccgctttatcttttatatattcacaaattctcat

SEQ ID NO: 45 - DNA, 7920 bp, unidentified
  source 1..7920: mol_type = unassigned DNA
ttatttaccctcgtatgctgcctgaatctcttttttgaactcttcctcgcccactctctgaagagtaagtctgaaacgctcaccaccgtttgcatgcttctcgaagaaactaattgctgcatctgtcactctgaaaagagtttccttgtcgcggataatcggaacaagctgctctcctttatagatgtggtttccgaaaagtcctccaaacgatacgatatatcccggagttcccttccatgcatctgtcggacagctctttacacagcgcgcacagttgttacatttgtctctgtcgatgacaatcctgccatcctccatgctaagtgcaccctcgcggcatgccttcacacatacaccacactggatacaatcgtcatggctgcactctactgtcattccgcccttgattccgacatcgttttcctcagcctttaagcagttgttctgacagcctgtgacaccaaacttgaacttgtgaggaagctctcttccgaagtatctttcatcaagttccttagccagagtgtatgtatcgatacatccgctaggacagatttctgagccctgacacgctgtgacagtacgtactctcggtccgcagacacctgttcctacaccgccctttgccagttcctcttttaccacattgatatcctcaaccttgataaaaggaatctcaataccctgacgcgatgtcatatgaacatatccgtgtccgtatttctcagcaacctctgctactgttttgatattttctgctgtaagatttcctcctacaaccgcaattctaagcgagaaacagcccttttgcttctgtctcatgaaaccgcccttttttagggccgcgtaatcaactttctccgccatttttaatctccttactgtgtaaatatgttaatgttttgttttatatgtaaatgcatatgcacgctctcatttgcatacacattgataccttattatgatggcttaatcagctatatttgcaaaagcctgtgcaaaatcctccttcaggtcatctatatcctcgatacccacactgactcttataagatcctcaaatactcctgcatcctccttctgcttatctgtgctgtgaagactgattgtggagcccggatgaatgacaagtgtctttgtatctccgatattgctgagtgtgtatggaatcgtcagactgtctataaatttaaatgccttttccttgctgccaaccctgattgtaaggattgctccatagccgtttgtgagctgtttttttgctatttcatgccatttactgctctcaagccccggataattaacctttatgtcaggataattgttttctatccacgacgcaagctcgagtgcattagagcattctctttccattctaagaccgagtgtctcaagtcctataatatttaagtatgcattcaccggagctaaacaggcacccatatttctgaaaagactgtttctcagctttgcgacaaatgccataggtccatacttcacataatctgcaaaacccggatatctgttcttgtcccatttgaacttacctgagtctgtcagaataccactgattgcattgctgcttccattgatatatttggaagatgaattgaccacgatatcagctccatgctttaaaacctgtatcaggtaagctgtcgatgtggtattgtcaactacaagcggtatatcatgtgcgtgtgctatctctgcaagcttctcaatatctgtgacatccagacagggattaccgatagtctctgcaaaaatcagtctggtatgctcattgatactgtcctctatctgctgccagttgttgttctcgacatatctggttgtgatgccgaaggcctcaagatcatggaacaaatctattgtgccaccgtagaggctggcgcttgagatgagctcatctccactgcttagtatatttaagaaggtattcatcagtgccgccatgcctgatgcgcatgccaccgatgctattcctccctcgagctttgttattctgttctcaaaagctgtaatcgtaggattggcaactcttgtgtaacagtagcccggagctttgttttcaaatattttttccagatcagccgcgctctcctgctcgaaggcgcttgtctgatataccggtggcagtgtagagccatttgtctcttttgtcacgccggcatgaagtaagcttgtattaaatctcattgttttcttcttctcgttaattcttacatagtctattgtgttactaggaattgatgagattattatacaaacgtgtgtgttgaaagtcaatgctatcagttatacaaattatttgtgcgtggttatatattttgtttataaccattaatgtcccttaaatactctgcggctgtcgttgcggcatttgcgccgtcagatactgcggttaccacctgacgcagtgtcttggtacggacatctcccgccacatacagtcccggctggacgcttctatcatggtcaccattttttgttgcagcatatgtgatgccgtcctcacctgccactacatatcctctctcatcaagctgcaccagattctttataagctctgactgcggtactgagccatatgccacgaatactccgtctacagccagtgtcctgccacttttaagctttatacctgttggctttttttctccatatatttctgtcactgcttcgtttaggacaagctctacattttctttctgctttaagagctcaactgtgctctgcgcaccgcggaagctgtctcttctgtgaaccagatagaccttctcacatatatcggacagatataatgcatcatccaaagcggtatctccgccgcccagcactgcggctgtctttcctttataaaatgctccgtcacagattgcgcagtaagatactccctttccggtatactcatcctctcccggcactcctgcctttctcggatatgctcctgcggtatagatgagcgctcttgcctctgctatcgtgtcatcatcgaatttcactctgtatatcgctggttcttctttctcaccattttgcactgcttctatctgcactgcttctttttcgataaattctacatcaagagatactgcatgctccctgaatttttctcccaggtcatatccgtttatgtttggaagccccagatagttgttcacatttccgctctcggctatctggcctgtcccctcgtattctttttctgctactgccacattcagattggctctctttgcatatattgctgcagacagtcctgccggaccactgcctattattattatatcaaacatggaattggttcctttcatcgtccattgaattttttcggtaacttattatatacattatccttaaaaaatacaataataccgcctgcttttataaaacacctttataaaaacaagcggtatcaattttatctatcgtatatacatcctggcctcataaggtctgagcactgacatatcagaggtatccttataatttgaaatcagcacctccatgccctcacactcctttgcaagcggcattggtatctccttgtcaaagaaattgcacacaacaatcatggttttttcttcattctttctgctgtatgcaaaaatattctcatcatcctcaagtaaaagtgtgaatttaccatcaacaaataccggataatcctttctcagctgaacaagcttcttgtagcagctaaagattgaatcagggtcatccacctgtgatttggcatttattttgtcgtaattgtcatttacctttatccaaggtgttcctgtggtgaagccggcatttgccgagtcatcccactgcataggtgtccttgcattgtcacggccctttgcgtaaatggacttcatgatttcatcctttgagtatcctttttcaaggcgctcatggtacatgtttatgatttcacagtccttataatcctcgatatcatactgtacatttgtcatgcccagctcctcgccctgatagatgtatggtgtaccctgcatgccgtgcagcaatatagcaagcatctttgcagattccactctgtactccctgtcattgccccatcttgacacgatacgcggcaggtcatgattgtcccagaacagactgttccagccacagttgtagagctcattctgccagtgagccattatctttttgagctttttaaacggaagcggtgcaaggtcccatttctcgccgccctccttctggtcaagccctatgtgctcaaactggaacaccatagaaaactcgctgccatccggattgctgtagagctttgcgcgctctgtgtctgcgccccatgcctcacctacagtaatcaggtcgcccttctggaaggtctccctgctcagttccttaaaatattcctgaagccttggtccgtttatggtgattctcttgtccggctcttttgctatctggtcgattacatcaagtctgaagccgccgactcccttgtccatccaccagagaatcatatcgtagattgctcttctgacctttggattctcccagtttaaatccggctgctccggtaaaaactgatggaaataatactgtccgatttccggcacatattcccatgcgcttccaccgaaacaagccttcatatcacttggcggcacgccttcatctccgtctctccaaatatagtagtcatggtatggattgtccttgctctttttagcctccttgaaccacctgtgctcgtttgaagaatgatttaagacaagatccatcataatccttatattgtgcttctttgcctcgtttatgagctcctccatatcatcgagactgccaaacgtcggatcaatatccctgtaatccgaaatgtcataaccgttgtccgcctgcggtgatttgaataccggcgaaagccatattgcattgattccaagcgtctcaagataatccagtcttttgatgataccctgtaaatcaccaaagccgtctccgttagaatcctgaaagctctttggataaatctggtaaactaccgcctttttccaccatttttcgttattgtttttgctcattatgccctccttgtctcttcattatctctttttgttatctcttttagctgtctctttttgtaaaaattcagcctggtttctttaatgctgtatcaaattatgctattttacaagcaccaccaaaacctcacagctttcaagcttaagctcagatgctcccactgaaacagtgctcttttcagcatcatttgtgttggacaaaagcacctttttcacactgccatccagcctgatttgtgcctctttactgccaaaatttgccacaaccagcacgcgcttattttcatcctctctgtaataagccatgatgccatctgtatcctcatatgccggaacacatctgccgtaggtgaacagctccttaaattcatctgactttcgcagtgccacaagccttctgtaatagttcaaaacagatgaagggtccttttcctgcgccgcaacattgatagccttatagttttcattgaccttaagccatggctttgctgtggtaaaaccggcatttgcctcatcactccactgcataggtgtccttgcattatccctgctcatccttccacaggctgcaagtgcctgctcctctgataagcctgctgcaagtgctgccttgtactgatcctttgtgctgatatcgtcatactcatctatactgttccatttagcattttgcataccgatttcctgtccctggtatataaacggaatgcctcgaagcagtacgctgacagttccaagcatcttgattccggcaggattttgagcatgctttggtaaaaatcttgaggcacctctcggctcatcatgattttctatgatattggccttaaagccgtacttttctgtctcaagctgtgaaccaagaatggtctttctccatttgtcaaaatctattttcggtgcatcataccatccatgctctccatcacttaagcactgtgcacaaaaatcaaatatcgttgaaaaatgcccattctcaccgataaactccggcagctcctcaggcttcatattgaatacctcgccaaccgtaaatgcatcatacttcttaaatgtattgttctttaattcctctaagagctctccgacaccttctgcactttcaaccatcttgtagcaggcagccagtccgtcctctgcatccggctcaaaatcagggaaatcgagatttttctttatattgattatcgcatctattctaaatcctgacaagcccttatcaagccaccagttaatcatctcataaagcttttgtcttagcttttcattctcccagtttaaatccggctgctccttcgcaaacatgtgcagataatacttgtccgtgcccggcaccttctcccagcagcttcctccaaaataagagcggtaattgctcggcggattgccgtttttaccttttctgaaataaaagtaatcagcatactctccatccggatccttaagtgccttttgaaaccattcgtgcttatccgagcagtgatttataaccagatccatgatgatgtgcatatcacgcttctttgcctcggcaaggagctcatcaaactcctccatagtgccgaattcttcagctatcgcatagtaatcagatatgtcatatccctgatccacaaatggcgatttatatatcggagacagccatatgatgtcaattccaagcgattttaaataatccagctttgaaatgatacctcttaaatctcctattccgtcaccgtttgtatccagaaagctctttggataaatctgatatgctaccttgtcatgccaccattttctctccataatgtgtacctcttatctaatcataaattttgcactcatttacagcttgagcacttcgccttgatgtattatactgctattatagaaagtgtttagtataaattcttgcaatattttttcattttataacacaatactgctcttataattttaaagggtatatttttaaaagctatggagaaacaacaatatgaaaaacaataatccgcctgccctcgggcagaaagaaaacgcaaagcacggagaagtattttttcctgttcagaaatatataacaagacttgcagcagattaccctgtcatcactacacactggcacgatgaggcagagctcacactgattacaaagggctcatgcacctatcagattgatttgctcgaatatgaagcaaaggaaggcgatatcatctttatcccgccactgctgctgcattccatttcaataagggactgcgacgaattttactcggaaacgtatgtattccatatcaattttttaggtggaaacaataccgatatatgctcttcaagatatctgactccgctgatcaaccatgagtttgccatgccttacctgattgcaccgaagcatccggcatattcatccctttgcaaatgcttcatgcgcataacaaagctatactccggtcaggaattcggctatgagctggctctaaaggcatttctgcttcaggcaatatttctattgctgcaatatagtgaaaaaaatgctgatttcggtgtcaacacatcctccgataagctcaaaaatgtgctcgattacatcgaggtgcactatgccgaaagcatccaggtttcagagcttgccgggctttgctatttcagtgaataccacttcatgcgtttcttcaaaaaacacatgaacatgacctgtgtgcagtatatcaacaatgtgcgtcttgaaaaatccgtggaacagttcgagcgcggcaacacctccattttagatgtctcactgtctgtcggatttcacaatctgagctattttcacagggcatttaaaaagagatatcatatgacacctctttcctttatcaaaagccttgaataa

SEQ ID NO: 46 - DNA, 8057 bp, unidentified
  source 1..8057: mol_type = unassigned DNA
ttactggttctcagcagattgcggtgcagtgggctgtgcggctgcatcgtctgcggggtcgccgaactggtcgtgatagctgttcagcagggtcagctcctgatggcgctgcaagccgtggatgaccagctttttgatgacatcgtagataacggcaaacagcggcacacccacgatcatgcccacgaagccccacaggccgccaaacagcagaatggcgaacagtacccagaagctggaaaggccggtggtgttgcccagaattttaggtccgatgatgttgccgtccagctgctgcaaaaccagcacgaacagcacgaaccacagcgccttgatggggctctggatgaggatgagcagcgtggcgggaatggcaccgatgaaggggccgaagaagggaatcacgttggtcacaccaatgatcaccgataccagcagcgcactggggaacttgaaaatcaggcagccgatatagcacagcacgccgatgatggcagagtccatgatcttgccgttgatgaagccgccgaacattttgtctgcgtacttcacttcctcagtgatcagctgcgcccagcgggggcggacgatgctgtgcagcaccagcttgccttgctgcacgaaccgcttgcggctggccagcatatacaccgccacgatgatgccgatgatcaggtttttggccaccgtcaccacgttcagcacaccaatggctgcaccacttacgatattctgcatggagggcagcagggtgttcttgagccatgtgttccatgtgtccagattggtattcagggcagcgtaagccgaattgagcagctccgtgatctgttcgttcttttcaataaactccagatggtttgcccagttcatgaactttgtaatgttggcctgcgcggtgtagtacagggtagtcacgctggtgatcagctgcggcacgatcatcatgacaagcgcatacaccagcaaaagcccgaacaggatggtaagcgccacggacagcgcgttgatcagaccgttcatcttttccgggatgaaccggcgcagaaagttttcgatgctgttgcacaccggcttgagcagataggcaatgacggcaccgtagataaagggcatcaagatgccggtcagggtagagatggccgagccgaagccgtcaaagcggtaaataaggaaaaagaagatgatgctcagtgcaatggcaccaaaccctgcgagcatcccatagagatacggtttgatgtgcggctttttgtccatcatgacaaactccattcctgctgcgggcagcgggaatgcccgcagcgcttattaaattttgttgcttctgcgccagatgtgcaacttttcagcctcgcggatcagctcctcacggaagtccgggtgtgccacgctgatcagagcctcggccttttcccaagaggtcaagcccttcaggttcacgcagccatactcggtgcacagatagtgcacgttggcgcgggtgtcggtaacgatgctgccattctccagcgtgggacggatgcggctttccagctgaccggtctttttattaaagaaggtggaggacaggcagataaagctcttgccacccttggaaaggtatgcgcccagcacgaagtccagctgaccgcctgcgccggaaatgtgcttcacaccggcgctctcggcgttcacctgaccaaacaggtcgatatccacggcattgttgatggaaataaagttgtctagtgcggaaatgctacggatgtcgttggtgtagtccaccggggcagacatacactccgggttatcgttcaggtaatcgtacatcttctgggtgccggcaccaaaggcgtagacctgacggcccttgtccagctgcttgcggctgccgttgatcttgccggccttggcaatatccacaaaggcatccacatacatttcggtgtgcacgcccagatccttcagatcgctctgcgcgatcagcccgccgatggcgttgggcataccgccgatgcccagctgcaggcaggcaccgttaggaatctgcggcacgatgaggttggctaccttcaggtcaacctcggtagcggcaccggcagcggccatctggccgatggggggatttgcgccctccacaatgccgcttacctgagaaacgtgtacgcagttctccatgccgccaaggcagcgcggcatattggtgttgacctccacgatgatcttcttggccttttcgcacacagcacccagatgcgaagcgctgggaccgaagttgaagtagccatgctcgtccatgggggtcacctgaaatactgccacatccacggggtcgctgctctcgcggtagtagcggggcagctcagagtagcggatgggggagtagaaggaaaagccctgcgcaatagccttgcgctcaatgccgcccatgtgccagctgttccaggtcatgtgggcagcagggtcgttgatctggaagatctccggcacccacatcagaatgccgccccggaagttgactccttccaactccggcaggcgttttgccagctcggcgtccacggccacaggggtgttcacagcccagccgtaatccacccagtcgccgcttttgaccagagcggcagcctgcgcagcagtcataagcttctgtgcgtacagttccttgcaatccattataaaccatcctctcttaaaatacataaaagaattgtaaacaattctgtgcggacaaattacgcagctgctttacgcctgttttgcggaatgcacaccgttttgccacatctgtatggtaaccttataaacaaggaggcagtgtgtgctccgctccgcgcagaacagctcaacttagttataacattaacaaagtgtagaatcaatagttttggctaaaaaacagtcagtatagcataatgaacagttttcttggctttatgtggggattgtttggtacgcaaaaaacaaaaaagttgagaaaaagacttgataaaattttgacgatgtgctttactaatagcgtgggaagcaactgcggagcagtgcgggatgattcgtttaaaatttaacgataaaacgcaccgcagcagtttcaggttgcacccaaggctggaaagtgctatcatggcagaaccacatcgcgcttagtaattacagcgcacaaggaggacactgaccgatggcaacagcagtttatcccgggtcgttcgatccggtcaccaagggacaccttgatatcatcaagcgcgcagcaaagatcaacgaccacctcattgtggcggtgctgatcaacagcgccaagcatccgctgttcacagtggaagagcgggtggctatgctacaggaatgctgcaagaacatccccaacgtgaccgtggaaggcttcgacggcctgaccgtggagttcgcaaaaaagcgtcacgcatccgtaatggtgcgggggctgcgggcggtaacggactttgaaaacgagatccagcttgcgcagaccaaccacgcactgatgcccggcatcgagaccatgttccttgccaccagcatcaaatggagttatctttcctccaccatcgtaaaggaagcagcgtactacggcagtgacatcagcaagttcgtcacacccaatgtggaaaaggccgttaacgaaaaatacgcacagcttcgggagagggaagaaatctgataccgcaaaaatgccgcagggcgttttgataaatgggtaaccgataagtaacacacatacacaattcaggaggctattcacatgaaaaagatcgttatcgcatctgcatgccgcaccgctatcggcaagttcggtggcactctggccaacgttcccgctactgagctgggctccatcgtcatcaaggaggctctgaaccgtgcaaacgtcaagcccgagcaggtcgatcatgtttacatgggctgcgtcattcaggctggtctgggccagaacgtcgctcgtcaggctgccctgaaggctggcctgcccatcgagacccccgctgtcaccgtcaacgtggtctgcggctctggtctgaactgcgtgaacatggctgctcagatgatcgaggcaggcgatgctgatatcgttgttgcaggcggcatggagaacatggatatggctcccttcgcactgcagaaggctcgctatggctaccgcatgggcgctcccatgggcaagagcgagatcgtggataccatggtcaacgatgctctgtgggatgcctgcggcttcaacaagcacatgggcatgaccgctgagaacgtctgcaccaacgagacctatcagaagaagtacggctacagccccatcacccgcgagatgctggacgagttctcatacaacagccagctgaaggctgacaaggccatcaaggacggcgccttcaaggacgagatcgttcctgttgtcatcaagggcaagaagggcgacaccgtgttcgataccgatgagggcccccgtctgagcgctcccgaggttctggcaaagctgaagcccgccttcaccaaagacggcatcgtcaccgctggtaactcttccgccatcaacgacggcgctgctgctctggtcgtcatgagcgaggagaaggctaaggagctgggcgtgaagcctctggcaacctgggtcgccggtgctctggcaggcgttgagcccgaggtcatgggtctgggccccatcgctgctaccaagaaggtcatggccaagaccggcatgaccgttgctgatatggatctggtcgaggccaacgaggcattcgcagcacagtccatcgctgtcggcgaggctctgggctttaataaggacaagctgaacgtcaacggcggcgcaatcgctctgggtcacccggtcggcgcttccggcgctcgtattctggtcaccctgctgtacgctatgaagcaccgtggcgctcacaagggtctggctaccctgtgcatcggcggcggcatgggctgcgctaccatcgttgagatggactaagcactctttctctgaatcctgactgaaccacagacccggagcgccggagggaaccggagagctctcccgcgttccgggggctgttttgaaaaaactgaactgtatgaaatggaggttttcacaatggcatttgtaaaaaccgaggtgcagggcgctgttgagatcattaccatcgaccgtcccaaggcactgaacgccctgaaccccgaggttctggctgacctgaaggctgcttttgaggcagtcgatcaggagactgtccgctgcatcgttctgaccggcgaaggcgacaagagcttcgttgcaggcgctgacatcggctccatgagcaccatgaccaaggccgagggcgaggctttcggcaagctgggcaatgatgtgttcctgatgatcgagagcttccccatccccgtcatcgcagccgtcaacggctttgcactgggcggcggcaatgagctggctatgagctgcgacatccgcatctgctccgacaacgctgtgtttggtcagccggaagtcggtctgggcatcaccccgggcttcggcggcacccagcgtctggctcgtctggttggcatgggcatggcaaagcagctggtctactctgctctgaacatcaaggctgacgaggcttaccgcatcggtctggtcaacgccgtgtatccgcaggctgagctgatggagaatgtcctgaagctggccggcaagatcgcaaagaacgctcccattgctgtgcgcaactgcaagaaggcaatgaacgacggcatcagcctgcccatcgagaaggctgttgaggtcgaggagaagctgttcggcgattgcttcgagacccacgaccagcaggagggcatggcctgcttcctgtcccgtgagaaaccgaagcccaaggcagtgttcaccaacaactaatccattacataatttttgatattaaaggagagatttcctatgaagatcggtgttatcggcgctggcactatgggtcagggcatcgcaaaggcatttgcacaggttgagggcaacactgttgctctgtgcgacatcaagcaggagtgggccgagaatggtctggcaaagatcaagaagggctacgagaagctggtcgctaagggaaagatgactcaggagaaggccgacgcaatcgttgccgccatcaccccgggcctgaaggaagatctgtgcgcagactgcgatctggtcgttgaggctgctttcgaggatatgaaggtcaagcagaccaccttcggcgagctggataagatctgcaagcccgagtgcgtcttcgcttccaacacttcttctctgtccattaccgagatcggcaagggtctgtctcgtcccctgatcggtatgcacttcttcaaccccgcagaccgtatgaagctgatcgaggtcatcgccggctgcaacactcccgccgagaccgttgagaagatcaaggagatctccgttgccatcggcaagagccccgttcaggtcaacgaggctgccggctttgtggtcaaccgcatcctgatccccatgatcaacgaggctgccttcatcaagatggagggcgtttccgatatcgctggcatcgacaccgctatgaagctgggcgctaaccaccccatgggtcccctggagctgggcgacttcatcggtctggatatctgcctggccattatggacgtgctgtacaacgagaccggcgacagcaagtaccgtgcctgcccgctgatccgcaagatggtgcgcggcggcaatctgggctgcaagaccggtaagggcttctacgtttacaacgcagaccgcaccaagacccctgttgaccagctgtaaattctgataaacatttctcccggctgcggggaaagcggtcgggaggaatttgtttgcaccgggctattccggtaaatgaaaaaagacctgttaggaggatatagcgatggattttactctgtccaagcagcagcagatggtgcagaaaatgtaccgcgagtttgctgagaacgaagtcaagcctctggcaaagaaggttgacgcagaggaatacttccccaaggagaccgtcgaaaagatgggcaagctgggcatgatgggcatctatttcccgactgaggtcggcggtgcaggcggcgatgtgctgtcctacgtcatggccgtggaggagttgagcaaggtctgcggcaccaccggtgtcatcgtctctgctcacaccagcctgtgcgctgctcccatttacgagaacggcacccccgagcagaaggctaagtacctgccgaagctgtgcagcggcgagtggctgggcgctttcggcctgaccgagccgggcgctggtaccgatgcacagggtcagcagaccattgccaaggaagatggcgattactgggtgctgaacggctccaagatcttcatcaccaacgccggctttgctgatgtgttcatcgtcattgccgttaccgataacgtgctggataagcgcggccgtcccaccaagctctgctccgccttcatcgtggagcgcaccgacccgggcttctctgttggtaaggcagaggacaagatgggtatccgcggttcttctacctgtgagctgatctttgaggattgccgcatcccgaaggatcgtatgctgggcgtgcgcggcaagggcttccagctggctatggctacgctggacggtggccgtatcggaatcgcttctcaggctctgggcattgccgagggcgctctggaggagaccattgcttacgtcaaggagcgcaagcagttcggtcgtgccatcgccgctttccagaacacccagttcgagctggctgagatgaaggctcgtgttgaggctgctaagtatctggtttatgctgccgctctgaagaagcagcaggctatggatggcgcaaaggttcgttacagcgtcgaggctgcacaggctaagctgatcgcggcccgcaccgcaagcgatgtgacccgccgttgcctgcagctgttcggtggttacggctacacccgtgactaccccatcgagcgcatgatgcgtgatgccaagatcaccgagatctacgagggcaccagcgaagtgcagatgatggtcatttccggcgcgctgctgaagtaa

SEQ ID NO: 47 - DNA, 25616 bp, unidentified
  source 1..25616: mol_type = unassigned DNA
gtgaatattctaaaaataacatttaaaagcgtaaaaagaagatacaggcagattataagagctgcacttacaacattatttgcagtattttttgtaacagcagttcttatatttcaggaaaatatgtatcagtggcagatgcagtccaataaagacagatttggcgactggtttattatggatataggaagcaggcagccagatagtaatcttacagaccacatttatattgaacagccggtaaaggtgtcaagaagcgttaatgttcttaacgatgactggcagagtacaggcttttatgtaggaagcttttcatcagagtttcttgcacagtcacatataaagcttgatgaaggaagacagccagaaaatagtggtgagatagcaatggactggaacacccttctgacactcggttataacggtgagattggtgagagcattaatcttaaatattgtgacaataacagcataggcaacaaagagaaaagaaacacaaagacttatacacttgttggtatatacagaaattatactaatatatggaataatggaaagcagataccatcagcagttgtagtgaacagtgaattatcacaatttaattatgatatacgttcggtgttcttatatcctataaagccttcaataaaaactgatgactacaaagcagtatttgactctataaaggagaagacatcaaaaagttatacatataattcaggtgtatatgattataagccttggggttcaacaagcatatacctttatatgtatttaatagttatggcaataggaataacagcactttcttaccagcttattgagtataagaatacaagaaagtcatcttataagaaatatgcttccttaggtgcagacagttcacagcttagaagaatgtatattattgaaaatgctttgataatagttccagcagcattgataggaataattgcagcatttttggctggaggaattgcaggaggcatacttgaaggcaaggcaggattttcattttatacaattaatgtttctattgtgttaaaaagtattgcttctgttgtaatagcagttgtagttgaggagatagtaggactgttatctaatgttatggatacagttaaagagaagcatcttaaggcaggaagcaaaaagcagatagttaatattgaggttcgtaataagaatacatcaggcagaaaatccaagattaaggtatctaatgtaagccgtgtaattacaagcaggcttatgaagcgtgatggtgtaggaatgataataggtgtaagattattttcactgtttatctgtgttgtacttgtattcagtgttttgaagataactacatcatttgataaatataagaaaaataattcacttcctgatatatatggatatctggacataccatcatctaattatagaactgatatgatatatatatcttaccttaaagattttgataactatccagctaagtcgttaaatatggacgaatttacacaggttgatcttatcaataaagaatacaacagcaggaatagatataatattccgtatgatgaattacgccagttgatattagataatggtatgacagcattatttacatctataccatataattcaccagatagaattataaagtctaattgtgcaataatgaattcgcctttggctaaagatggtaataatagcattatagaaggtgtgtcatctgatgttatagatggtttaaatgaaataccgggtatagtttcaattgattattctatatttgagtcagaaagaacgtggtactgggataaccaggactatcataagatgggaattgacaagattatagctgcacagaaggcttcatctatagctaaaactatgaaagatccgacttatggaagccggtatttatttgcaacagaatatgtaaatccaacaaaggaaatatatgatatagcaagcaaatatattgataaatccaatattaattatgatgactttgcaagtggaaagcaggttatagtatttatacaggataactgtgagggtgattatgatgatacattaaaagctggtgatacattatattataattattataacgttccatttggacagtgtaataaagcagggtatattacatcaagcaatgcagtgtatccatatgatattccatttttcaataaatataataatagtggaaaaatagatttacaggtagaactgaaagatgacgataatcctaatacagcaagtacaacatatagtttcacacagactgatttagaggtagaaacgatgtttggtgcctgtgtagcacctcaggtggcagcagttattaaagttacagatgaagttaaggaagattttaatggtataatgccagattatggttattatacaacacttgcaagtacgcaacttgctaagcaggcggttgataaccagaaagattttatgctaagaattacgggagaaggactgacagacggaatagattttgaattacagtataatcagataaagatagattacgacctgtcatcaacattttctgctactaacaacaaagttgcactttatcttaagagtaataatataacttataagtcaaatgttgacagcaagaatgtatacagaacgcagcttgtcaataatatactgcaatatggaataactataatggcggtaataattatccagcttcttataatggcaataattataagaaacaggatagaaagcagacacggcaagttcattctctttagaaaaatggggatgacaagagggaaattacttggaatatgtatgcgtgaagcacttagggaatcactgtggtgcatagtaacacttccgcttatgcttatattggaagtgctgatatattcaagtaatataaggaaattatagttatataggcacaggcagcttataaatatatatttgattaggtaatattaaaaataattatatatggaattacatatatgcaattagagatatagaaatggaggataagtatggaggctatattacaggctaaagagatatccaagacatatcatacaggaagtgtagatgttcctgcattaaagcagtgttcccttgaattcgggaaaggcgaatttacagctattataggaaagagtggttcgggaaaatctacattattaagaatacttggaagtatggatacaccagatacaggcagtatattaataaaaggcgaggacataacacatatgaaggacaagaagctgtctggtttcagaagaagaaatataggctttatatatcaggattacagcctgtttccagaatttacatcatatgaaaatatagttatgccaattctacttgatggaaaaaagccagatgatgcaaaggttgatgagatattatcagaattagagataagccattgcaagaataaatatccatcagaaatgtcaggtggagaacagcagagagtggcaattgccagagcacttattacaagtccggcggttatatttgctgatgaacctacaggaaatcttgatgcgggaagtgcagaaacagttgcaaagatgttatcaaaagcaagtcagaaatacgagcagacaataataatggtaacacacgacagacagatggctgattacgcagacaggataattactatttcagatggacagatacagtaatattacatagcaataataaattgtggcagtacataagtgcttagtgttaatctattcgggggatagtagataatgctaagcactttattttaagtattagagattaatatattaagcattaacaatccattaaagcattatatattcaatcattaaagtaccatatatccagtcatcaaagtatcatatatcaatcatcaaagtaacatatatccaattaataaagttataataaagtataatatacttaaatattttcgtatcgtggaagttcaactattatggcttcgtggtggacagccgggagaaacttatccataacttcgcttgtctttaacttaaggcttgaagtattgatacaagggtgacagccaagagaagcttcttcaagtacttccttgtcaataagtaactggacgtggttgtcagtatcattcataagccccataatagatactgaaccaggtgttatatcaagatattctttcatatattcctcatcggcgaatgaaagtcgtgcagagttaatctgctggcttaaatctttagtcttaaatactttatctcccggcatcataagaagatagaattgtgttttctgtcggttgcataagaaaaggttcttgcatataagtgtgccaagaattttatcaatatcgttgcatacttccattgttgttgctggttcgtggtcggttctgtaatattccattcctaactggtcaagtaaatcatatactctgatttctttatcaagtctgtcagcttcattggctggtctgccttttattagttccatagtgttcttgtagtcctttcttatgattatagtgtatacaattgattataatatataaaatataataaaaccagccatatgatgtcatttcccataaaagaggcaggggatatcatatggctggttttataaagttaaacaatgaagaatattaatacatttgattaacagatgtatcgtaagttaatatctgattactggaaatcacatatgtcaatcatagcctcaagcatttccttttcttctggctttttcttagtaagtcttgcggcggctacgataggcatccacttatcaacgtaacgcttatcagtagaagtcttttcacagaacattgatatgtacttatcggcaagggcttcatcgctaagcttaagtgtaaggtaagtattagccgcatcggcagaagcattacctttagtagcgtgtacccagtcaacagcagtaattgcaattatctggttgttgtcatcagtctgtactataatattttctggacaataatcaccgtggcataatttagtatgataaggaagccctgaaagtcttgagtccagctcatatttcgtgtcagcaggaatattaagctcattaatctgtcgctcaagcttacttttcatatcgactaaaagagggttgctgtgcttattaatagctatctggtagtcaaccatagcctctatgtaagcatctgcattttcagggtgtttagctaacagctcttttaaagtttctcctttggcatattcgcttgtgatagtccatttgccatctactacagatacattaagaagtcgtggtatatcaagtcctgtatcttcaactcttgcagtgttaagtgcttcatataatacatcggatttgctgtaagatagtgcaaatactttctcagccttatccttatcaacgtatacagattttagagttcctttatatatacattttttcataataacctccattcctgcctattactatgtaggcattcaagttcatacgcagatgtcaattctgcgagagggcaatctttataaagattgccacatatccattcatatctttatataacgggacaagtggtattgtacatatcacaagcccgttgtgtctgtcagtgagaataatgttatctgacattgacaatatattatcataataatatatatataatttatattgattatttatattacttagtctttatatcctctggattaacctcttttccatagtaagccttaagatacatagcctttatctcactcataagaggatatcttgggttagcacctgtgcactggtcatcaaatgcattttcaaccatctcatcaagtgtagcaaggaagtctttctcatcaatgccgtagtctttgatagtcttcttaattccaaccttatccttaagctcctcgatagcctttaagaagttctcaaacttctcatcatcgttcttgccggcaataccaaggaagttagcacattcaacatatcgttccttgcagtgaggataagcatactgtgagaatgttcccatcttagctgggacttctgcggcattaaagcgcattacatctgtaataagaagtgcgttagcaatgccgtgaggtatatggtggtaagcaccaagcttgtgagccatagagtggcatacaccaaggaatgcgttggcaaatgccataccagccatagtagaagcggtagccatctgttctcttgccttggcatcgtgaggtccattctcatatgccgctggaagatattcaaatatattcttcatagccttaagtgcaagaccatcagtataatctgtagccataatagaagcatatgcttcaagagcatgtgttaatgcatctataccagaagcggctgtaagtcccttaggctgatccatacacatatcagcatcaataatagccatcttagggagcagttcgtaatcggcaagaggatactttatgccagtcttttcatcagtgataactgcaaaaggtgtaacctctgaaccagtaccagaagaagtaggaatagctataaagtaagccttttcgcccatcttagggaatgtgtagatacgttttcttatatccataaatctcatagccatatccataaagtcaacttcaggatgttcatacataacccacataatcttggcagcatccatagcagaaccaccaccgatagcgatgatacagtcaggctcaaagctgttaatagctttagttccttcgatagcacattgtaatgtagggtctggtgcaacattgaagaaggttgtgtgtgttatgccaagttcatcaagcttgtcggtaacgcacttagtgtagccattcttatataagaactggtctgtaacaataaatgctttcttcttgcctaatacagtctttacctcgttaagtgcaacaggaaggcagcctttcttaaagtataccttttcaggtgctctgaaccacagcatattttctctcctctcagcaacagtcttaatattaataaggtgctttacgcctacattttcagatacagagttaccgccccacgaaccacagccaagtgtaagagaaggtgctaacttaaagttataaaggtcaccgataccgccttgtgaagaaggtgtattaataagaatacggcaggtcttcatagcttcctcgaacttagcaagcttgtagttttcagttgcagaattaatatatatagaagaagtatgaccaaatccgccatcagctattagacgctcagctttacttatggcatcatcaaaatcctttgctttatacatagcaagaactggagataacttctcgtgtgcgaattcttctgaaaggtcaacagaagtaacttcaccaatgagaatctttgtgctttcaggtacttctatgccggaaagctttccgatattataagcactctgaccgacaatcttggcatttaacgagccattgataatgatagtctttcttactttatcaagttcagtcttattaaggaagtgacagccacgcttagtgaattcctctttaacctgcttatatatagatgagtcaacaattactgactgctcagaagcacatatcataccattatcaaatgtcttagaatggataatagagttgacggcaagtataacatcggcagtgctgtcgataatagctggagtgttaccagcacctacgccaagtgcaggctttccagatgaataagctgccttaaccataccaggaccaccagttgcaagtataatgtcggcttctttcataagagtgttggtaagttcaaggcttggaacatcaacccagccgattatgccttctggtgcaccagcggcaacagcagcctcaagtacaaccttagcagcagctatggtgctttccttagcacggggatgtgggcttatgataatgccgttacgtgtctttaatgaaataagagtcttgaatatagcagtagaagttggattagttgtaggaataacagcggcaacaacaccgataggctctgcgatcttcttaatgccataggctttatcttcctcaataacaccgcaggtctttgtatcgcggtatgcgttgtaaatgtattcagcggcatagtgatttttgattaccttgtcttcaacaattcccataccagtttctttaacagccatcttggcaagaggtattcttgctttattagcggcaagggcggcagcagtaaatatcttgtcaacctgttcctgtgaatatgttgagaagatacgctgtgcttcttttacagagcttataagctcttcaagagactggatgttgtcaactactaaagatttttctttgctcataattagttccccttttcttagataatcatacatatactttgttagtgatgtatagtgttacacgaagtaactatcttaataaaaataagattgataattaattaacaatcattatggtcacactttaacacttatatatgcagatgtcaataaattattgccgttttatagaaagtttagaagttaataatttatcagttcccaatttagatatggataatcaggtatttgaagtctgaaggctgaaaatataagttgacagtgcaaaaattgatgttacaatagttgcagatacaacaattggaggtgcattttaatgcttaaaagaatattttcttatatgaaacagtataagaaatatgcctgtctggcacttttatgtattgctgttgaggcagtgcttgaacttatggtgcctatgattatggctgatttaattgataatggtgttgctaatggcgacacagcttatatttatactaagggcttgcagatggcaggatgtgcggttctggcacttatccttggcattggaagtgcaagattttcagcacttgcaggacagggacttggcgctaatataaggcaggcagaatatgagaaattacaatcatattcatttgccaatatagaccatttcagggtttcttcgctggttactcgtctgacaagtgatgttacgaatatacagaattcggtatcaacaggtatgagaccatttggcagaagcccggttatgcttatatttgcatcgtcagtagcatttacaattaacagaacacttgcattcgtgtttttcgtggcactgcctatacttgccgtgcttctcataattattattatgaatgtccgtccactttatggacgtatgcagaatgcaatagatttagtcaacagaagcattcaggaaaatcttactgcgataagagtagttaaagcatatgtaagaggtgattacgaggttgcgaagtttgaggaagttaatgctaatcttaagaaagagtcagagaaagcattcggtatagcagttcttaatatgccagctatgcagtttgttatgtatggaacgattatatcaattctctttatcggcggacatcttattaatgcaggacagttaaagattggtgagcttacaagctttttaagttatgttcttcttatacttaattcacttatgatgatgtcaaatgtatttcttatgatgacacgttctttagcctcagcttcaagaattgtcgaagttcttgatgaaaaaatagacataacagatgaacaggcagaggatataagtgttaaaaagggttcaattgagtttgaccacgtatggtttaaatacaagaaagaggcaaaagaatatgttctttctgatgtttcatttaatatagaagcaggacagactattggaataataggacagacgggttcagccaagacaacgcttgtatcacttattccaagattatacgatgcaaccaaaggaacggtgagaatagacggaatagatgtaaaaaaatatcctatgagacatttaagggatgctattgcagttgtattgcagaagaacactttattctcaggctcactgctttctaacctctactggggtaatgagaatgcttctatggaggagataaatgaagcctgccatattgcctgtgtagatgaattcttagacagacttccacaggggtatgatactgatatgggacagggcggtgtcaatgtatcaggtggacagaagcagagaatatgtattgcgagagctatattaaaaaagccaaaggtgcttattcttgatgactcaacaagtgcggtagatacagcgacagaagctaagataagagaggggcttgctaagaagcttcctgatatgaccaagattgtaatagcacagagaatatcttcggtaaagcacgctgaccagattatcatactggacaggggaaaggtagctgcgataggcacacacgaaacacttcttgccaataacaggatttatcaggaaatatatgaatcacagaaggaaggggtggatttataatggctaaatatgttggatataaaagacctaaagataccaagaagacattgaaacagttattcgtatatcttggacattataaatggatgcttatattagtagcatttcttgtattcataagtgcaggagctaatgttacaggaacatatcttattaagcctgttgtcaatagatttattgttccgggcaatatgacaggacttttaaaggctgttatagctatgggcgtaatgtatgcgtgtggagcattatcaacacttggatataaccgcattatggtgaaaatgtcacagaaggttatacaggatataagaaatgatttatttaagcatacacagaagcttccattaaaatatttcgatgcacatacacacggcgaacttatgagccgttttactaatgatgttgatacagttcaggaagctatgaataacagttttgctatgataatacagagttttattatgctgtttggtacacttacgatgatgatggtattaagcatacgtctttctatgatagttgtcgtatttcttattataatgttcttctttatcaaatttaacagtaagcacagtaagaaatattttaacagacagcaggaagagcttggtaaaatcaatggattcgttcaggagatgatggctggacagaaggttgagaaggtatttaaccacgaggaaaaggattacgggaaattctgtgaaatgaatgaaaatttcagaaaagagtcaactaatgcactggcatttgctggaatgatgattcctacaattgtaagtctttcttatcttaactatgcgatatcagcctgtgttggcggtatatttacattaaagggacttatggatttaggtacgctttcagcatatcttgtatatgtaaggcagagtgcgatgcctcttaaccagttcacacaacaggttaatttcctgctttcagccttatcaggtgcagagcgtatatttgatatgatgaacgaagaacctgaggttgatgaaggcagggttacattatgtaatgttacgaaaaatgaagctggtgaacttatggaagcttcaggtaatacaggcatatacgcctggaaggttccagcgacgaaagataaagcaggctatcttgttgagttaaagggagatgtgcgatttaaagatgttgtgtttggatatgtaaaagaaaagactattcttaatgatgtaactttatatgcaaagccgggacagaagatagcatttgtaggctcaaccggtgcaggaaagacaacaatagttaatcttattaacagattttatgatatccagtcaggaacaataacttatgacggaatagacattaaggatataagtaaagatgatttaagaaggtcaatggcaatggttatacaggaaacacatctgtttacaggaactattgcggacaatatacgatatggaaagcttgatgcaacagatgaggaagtaagggaggcagctgtaatagctaatgcagattcatttataagaaggcttccagatggttatgatacaatgctttattccgatggaagcaatctttcacagggacagcgccagcttcttgccattgcgagggcagcagtagccaagccacctgtacttattcttgatgaggcgacaagctcagtagatacaagaacagaaagacttatcgagaatggtatggatgcaataatggaaggcagaacagtattcgttattgcacacagattgtcaactgtaagaaattccaaggcaattatggtacttgagaaaggacagattactgagcgtggaagccacgatgagctgatagagcagaaaggaagatattatcagctctatacgggacagttcgagcttgaataaatcggacattaatatagcttgaattattgtaatttgaaataaataaataaaaagaatataatcaaaatataaaaaaatagttaaagaggtgttggtattgaataatctgattgagtttttgaagcaggaaggtgtttctgcacagcttgtagaagaagtccggcattattcagaagaacatactgtagatgaagcattaaaaaaacgtattcctgtaccacattttcattattatggcaataaggtatgggaagaggctcttgcagtgcttctgtgtggcagaaatcttttgctggcaggagagaaggcaacgggaaaaaatgtgcttgcacagaatcttgcagcagtttttgaacgtccggcatgggatatttccttccatgttaatatggatgcggctgcgctgataggttctgatacatttcacgatggcagggttacattcagacccggaccggtgtattgctgtgcacaaagtggcggctttgggattctcgatgaaatcaatatggcaaggaatgaagcacttgcagtcttacattctgtacttgatttcagacgtgtaattgatgttccaggatatgacaggatagaggttgcagatgatacacgttttattgctacgatgaattataattatgcaggtacaagggaattaaatgaggcacttgcctcaagatttgtagttatacagatgccgccactggcaaaggaagatcttgagagactgttaaaggatcagttcccttcactggttactaagtataacaaacagtttgcacttttatttaatgaacttcagaaaaaatgtgaaaatggtgaacttacagagaaagctttggatctgcgtggattaattgatgctgtaagtcttataaaaaagggtattccaatcagggatgcattggatcttggaattaccaataagatatttgacagctatgaaaaagagcttatacgtgatgtcatagcttcaaggtttcccttaaagctgcataatacggaggtgtttgaataatgcgtaccatttcttatactgctaaggaaagacgggctgctaatcaggtatggaatgcggcggaacgctataattttgatccattgtttctggctgttgaaacaggggatttagattcagatttatatatgaatcttataattggactggcatataagtattatggtgaaaagacaatcagcactttatttggttattggaacggagatatcagtcaggctatgctggatgatctgacatggctttatctggaacatgtactgtatacagaggaagcattaaaacgtccgtctatgactgatctacgggtttattatggaaaggctttttttgcaggtgaatataagctgtctaggcaggagtggatgagcaaaaaccggcttgtatataatatgcagtcagccagatggagcagtgtgtcagggaaaaagaaggttctgctgacaccaaatgaacaaaagctgtatgcagaactgacaccacagataatgcctgaaacagaccggttgatagatactgtgctggcaatttatcgcaaatttaatctttttgatggcgtaaaacatgaaaaaaaagcattacgactgcattttacaggggcatttgcccggataatgacaagaataatgcctgtcagctctgtaagaaataatcatgtaatggttatgcgttcttctgaggcggacaatatgactggtggagcagcttacagtaaaaagaaagataatataacatataagaaagaaaatgatgactgctcttatattgagaattgttttggaagatctgttatatcagagcagactcttactaaaatagaaaaagaactgtgtacaggcagtcatacaggatgccatttatggtttactgatggaaaatatataacaaagaaaaatataccgaaggaatttcttcatttaagagaacagtcacagctgcaggttgaaagaaatcattcatattataataaaaatgtacggctttatgatagtcttattgcacatatggtcgaacaaatccgtaatagcgaatatataagtcagaagacagatgtaatatcagggcagagcggaaggcttgatacaaccaaagtatggcgtgcagaatatatagaagataacaggatttttcacacatatgaggatgataatcaaccgtcctttacagtggatctgcttcttgatgcatctgcttcaaggcttcagtatcaggaaatgcttgctgcgcagggagtaattatttccaaaagcctcgtggcatgtaatataccggtcagggtaacaagattttgcagtgtcagaggatatacagtttttcatatattgaagtcttttagggataagaaatgcgacaatattttcaattattatgctgccggttggaatcgtgatggccttgcttttcggggaattggcaaaatccttgatatgaacccgggggtggctgacaggcaccttgtgattattttaacagatgctgcgcctaatgacagccagcgtattctgccatcacaggacagcccgtttggacatgattatagcgacgatatttctgttaatgatgcagccgaagaggtacgtgcactgcgtgataaaggaatacatgtatcagccgtttttatgggaaatgatgcggcggccaatagcgcagaaaagatatatggaaaagaatttacaagaatacgtcgtattgatgagcttgcaaaggcggcaggaagacttatacaaaaagagattcagtcgttgacaagataattgcaaatgtgtatgtgattaggaatggagataatagggtgttggtattttatatttttaatataattgtgaaaaatgtatatatacataaaatgacaactaatataaaataaaaaaacaaaagaaatggagaatgtaatgtactgtaaaaattgcggaatgaaactggagaatgggactaagttctgcggcggatgtggaatgccagtcgataatgagatttttgaatgaaaaaatacttgattatatggagaggacaataattaagaaaagagggtcattatgaaaagtaagcagaatgtaagacattacctgtttgacgtggaaatgctaagacgaagattattaagaccgtattttatagaacttggactgacagttggacaggggcagccacgcatattatatgagttaagaaaatgtgatggaatgagccagaaagaattgtcagatgcctgccttatagaggtgactacgatgtcaagaacgcttgacagattagagagtatgggacttattaaaagacagaataatccagagtgtaggcgttcgtggattatatctttaacagaagaaggaaaggaaaaagctgacagggtatctgatatatttgatatggctgaggaagtgttccgcaaaggtataggcgaagaagagctcaacagtatgtgtgcaacgcttgaaaagatagagaataatcttaatgaagctatagaggagcaaagcacggaggggaataattaacaggtaatagtatctgataatagtattcaattatattattttcaaattatattgcaaagtagtattatttgtattacaataactaatacaaataatactacttttttatttgccttattaataagattgtgaaaaggttatatttgtttaatgtaaggttcataagatatcggttaggtcaattctatgttgtgaatattgtgtcaggaaaggagttaatacaatgattattgaattagatatgaatagcagtacacctatatatgtccagcttcgtaatcagattgtaatgggaattggacgtggtgaattaaagcttggcgagagcctgccaacggtaagacagcttgcacaggatattggagttaatacaatgacagtgaataaagcgtaccagatattaaagacagaaggatatattaaaatagaccgcaggcacggagcaatagtatcagataatattgatatggatattgtattcagggaaaagcttgaaaatgaacttgaattattattagcagaagcagctattaatggaatggataagagagattttctaagtatgtgtaatgaaatatattcaaaaatcaaagtgtcaggtgacagtgaaccaaagacaacataaatacaaaagtaaaagcattttggtgactggacggggaggataatattatgggaatagcattgtttgtgatagcattggtaagcaatatatttacaattttaattgtgagatttggatttataggcaattatgaatataagcagggaatgattcttggtgttcatataccacaggagaatattggtgatgaagaggttgcaggtcttattgaaaagacaaagcataattataaaatattccagaatgttaatgcttttttgggtatagcaatatgttttgtgaattttcttaatatgataatatttgtgcttatctggtgtgtgtggcttattggttatgctgtaggtatagaattattgatgattataccacatagaaaaatgtatgatataaaggttaagaataaatgggttatagagagccagaaaaggatatatgcagatacttccctgtcagcggtcagaggagaagttaagttgtattatcatttaataccaataggtgctgagattgttacaggtattattctgtgggtagtaagtggcagaacaaaggattttaatcaggcacttatattattacttaatacgttgctggtatcgctgatatcatttgtatttaatgtggcatttaataaaagagaaagaaatgtatacagtaaagatacggctgttaatcaggcagtcaataagatggttaaaaaatatatatttaaaggagtgttaataactaacataatcaatgctttctcgtggctatatatatttattgaatatataggacatagcagaataacagatgccaactattatgtatatataggaattcaatttatgtatacacttgctattttatggatgattattgttattggaaagaagaaagaggagatacttaacagagatgacgagccgttatatgtagatgatgatgagtattggaaaactggattctataataaccctgctgatcctaaagtattagtcaagaacagactgagtgatatgaattattccttcaatcttggtaataaagctggaaaagcaattatgtggtcacttgaggctgtcgttgctggatttattatatggtttgtggctattatgataccatatattaatgtccatatagatacagaaattaaagataattacttcacggtaaaagctgtgggatatgagttctcaatcaatattgatgatattgaggaagtacagcttatggataaaatgcctaaagacagctttacaagaactaatggcggggcaacagaagagtataatataggtaattataaaggcaatacatatggaaaatgtatgctttttatatggaatggctatggacctgtggttatgataaagggagataacaagatagtatttgttaattataaggaagatggagcggcattaaagctttatgagcagttgtctggtgcaggcacaatatgactacttggtagtcacttagaagtttctacgaaacttcatatgtgctgaaaaacgcgcagaatataatgagcatatcaaaataacattttacatttaatgataaaagatgtataatctgtgttaatgaaaacctaattaataaatatcgcgatagattagatttcactatttatatttataagggaggaatctgatatgttatttaagaaggatattaacaaaaaaatcgaacatcttgtaaagaagaatgatttctatgcagttgcagattatgtgtatggaactaaggaagagaagcttgacctggctaaagccttaggaactaacgataataacagcagtgttgatttattgttaagacttgttgatgataaagatgatgatgttgtatatgcggcttgtgaggcattaagaaatgtcggatcagaacataatactgcggatttacttgagaagcttaataatcttccaaaagaaaaagagcatttaagggaagaaatcagcaggactgtacaggaattacatcatagaaattaatatatatgatatataagacttattgaaatatatcagaaagataaaatatatgtaaactgtataaaagtgtatggtggttgtataatgaagtttatagatagctgataacgttataataaaaagaaagggtactggaattatgttttcagtacccttttttgagttttgtaattgataccctttattagttattgttggttatggacgctgtccaagcccaccctcaagtgtgagagtttcacctgtcatatacttaaagtctggagatgcaagctgtacgcatacacgtccgatttcaagctcagcatcaccgaaatgtcctgccggtggagtatgaacatttttatcaaatgcatctggataagcgttcttgaactgctcaagctgtgatgtccacgcaagagggcatataatattaacattaattccgtctttagcccattcagttgcagtaactcttgtaagacctcttataccttccttagcggcggcataggcacactgtccaaagttaccaaaaagtccagcaccagaagcaaagttaattacagaacccttactttccttaagataaggatagcagactttcatataataaaatgcggcataaagacctgaatacatagcaagattgaactgctctgtagtatgttcagcaagtggaacgccggaagcagaagcctgtgcgttattgataagcacatcaatatgtccaaatgtatcaattgtctgcttaacgacattagctacaacagcttcattatcagcagaggcattaacatctgcctgaattgtaagaaccttgatattgtaaagcttttctaattcttctttagcggcggcaagcttgctttcattacgtcctgtaatgacaatattagcaccctctttagcataagctgtagcaattccatatccgatagaaccacatcttccgtcatttaatacggcacggccagcccctgttataatggcggttttacctgttaaaaatcccataaatctaatctccctgtctgtgatatttacgataatcaggaataagttaaagcacacaatgtactttcgataaattccagtcgtggttttataataacatagtcagactaaacaaacaatataattatgcgaaaattattatcaaaaagaagaaaaatactaaaaactatttaaaataacagtaatgttaaaaaaatatcaaaattatatcataaaatactgttaattgataatttgttaacaaaaagtagttcagcataagattaaagagctggatacggcaattagctgtgctgataaagcagtttcttcacattaatatagtgtatacataaaaataatgttgaatttaataaaggtttgcaataaaataataaatagattattaggtgaaaaagaatatgcgttaagatgaaacatataaggatatatgattattaatatgtttggatgcgagaagtatgcagagtttggtaaattgacgggcaacagctttaagggaatggttcaccctgatgatataaagcgtgttgaaagtggaattgacagacagataaagacttctgataataatatggattatataaagtacagaattataagaaaagatggctctataagatggatttaagatttcggacatcttgagaatgctggtcttatggctgaaagttgatattattatgtatttatagcagatataacagatacaataacagaagcccagaagaaccacatatatatgagaaacaaatattacaacaatactaatgagaattaatatcattaatatataattgtattgacaggaaaatatataaagtaatataaatataacagtgttatataacactgttatatgacggcttaggttatatgccagccggaataaggagaggtatgaacacattagataatatacataaagctgctaagaaagaatttcttgataaagggtttcagatggcttcgcttcgtaatattgtaaagaatgcaggtgtgacgacaggtgcattttatgggtattacaagagcaaagaggagttgtttgatgcacttgttggaaagcagtatgagcatataatgaagatgtatattgatgtacagaatggctttaaaaagcttgatgccaatacccagcagacgtcaatgggtgaggttgcaaaagactgtatggacaatatgcttgattatatgtatgagaatgaagatgagttcaggcttatactcttaagttcccaaggcacaagatatgagaatatggtgcacgagatgtcagagattgaagttacggcaacgcacgattttgtagacactatgaagcgtaatggaaagcctatcaaatcggtcgacccaatgcttgaacacgtacttgcaagtggaatgttctttgcattttttgaattacttattcataaagatgatatcaaggaagccaagacttatcttaagcagttgagagcattttatacggcaggctgggcaaaggtattcgagatgtcgctggaaggttaataatattgccttccattattttaacacaatagtttgaccaaactaactctccttagtttaacctaagcataatgacaattaatagatttgatgaacaggataatataattaaatgtcagaataacatagtagaataattaattagtttactaaatggaagataatattatttaattcattagatttatggaaaagaggttaatgatgaaaaaggaaaaacaggactcagctttttcgcagcttatgaactatgctggcagttataaaatgtttacttacacagcattagttctttcagcagtcagtgcggttcttgcactgtttccctttgtgtatttatggagaattattaaagctgttataaatgctgcatcagattacggtaatgcagacggaatagtgcataatggctggatggcagttattatggcacttgtaagtatgcttatatattttgcggcacttctttgctcacacagggcggcgtttcgtgtggcaactaatataaaaacaacagcacttacacacataagaaagcttcctattggtccgcttgaaagccttggaagcggcaaagtaagaaagatgatattagagtcagcggcggcgacagaaacttatcttgcacaccagcttcctgacacagccaatgcaatggttacaccattggcaatgatagttattttatttgtatttgactggaagttaggactgcttagtcttataccagttgttatagcatttcttaatatgtttggaatgttgggaaaagctatggcagaggatatgaaaaagtatcaggattcattggaagatatgaacaatgaggctgttgaatatgtaagaggaatgccggtagtaaagacatttggacagtcggtatttacatttaagagattcagggattcaataagcagatatagcaaattctgtatttcttatacgaaaaggtgccgaaggcctatgattggatttgaaattgcaattaacagcgtatttgcgtttatgacctgtgcggcggtactggttacaagaaatggagttgtagacgaaaagtttgtagtcaatttcatcttttatgtaatatttactccaattatatctacaacatttacaaagataatgtttatgagtgaaaatgatatgcttgttaaagactcactccagagaattaacgagcttcttaatattgaaccattgaagaaatctgacattaataatgccggggttaaagattattctgtagagttaaaaaatgtaacttacagatatgcaggtgcttctaaagatgcactttctaatctttcactcactgttccgtcaggaaagatggcggcactgataggaccatcaggtggcggcaagagtacaacagccgcacttatagacagattttttgatgtcacagaaggaagtatccttataggcggtgttgatataatggatatacctaaagaagaacttaataagatgattgcgtatgtatttcaggataataagctccttaaaatgtcaataaaggataatcttaaattagcgaagagcaatgctacagatgatgagattaacaatgcacttcatcttgcacagtgtgatgatattattgcaaagcttcctgacggcgttaatacaatgcttggaactaagggcgtatatctttcaggtggtgaaagacaaaggatagcgatagcgagggcaattcttaaagattcaccaatagttattcttgatgaggcaacagcatttgcagaccctgaaaatgaagcacttgtccagaaagcatttacacagataggaaagaacaagaccgttataatgattgcccatagactatctacagtaaaggatgcagatataatctatgtattgcagaatggcagagtatctgagagtggtacacataacgagcttgttgccaaggaagaaacacaggacaactacagacatatgtggaatgaatatcagaagtctatagcgtggaaagttgtgtagttaatacagtgcacaggaatggagttcagtatggaaaagttaatgaaaagatatgcgcttaccagacagggggcgaaagattttattatatgcacaatcgtaacgacaatacagaatattatgcttatggcaccggttgctattctttattatattacaagtgatttaatatcagacagtatatcaaagagcaataatgtggcatatgtaatagcgtgcgtaattatgcttgttgttatgggtgttgtattttattttcagtataatacgtcatttttctcaacatatattgagagcgaacatagaagaattaatcttgccgagaaattaagggagcttccgctttcattttttgaaaagaaggatttatcagatctgacatcgacaatacttggcgactgtacagtgcttgagcataatttctcacacgttatgccacagttctttggctcgataatatcaacaattattatagcagtaagcttattcttctttaactgtaagcttgcagtagcagctttgtgggtacttccaatagcacttattatagtgggctgttcaggaaaggtacaaagaggcatatcaagaaaaaagagaaaagttgtgcttgcacaggaagaaggctttcaggagtatcttgaaactgtgaaggatttaaagtcgtataacgcagaggatacttatgttgaaagtcttaaagagaaaatggataatcttgaaaaggaaagcttcagggctgaattaggaacgtctgtatttgtaataagtgcttcctgcattttaagattaggaattggtacagttgcacttgttggagcttcacttcttgttaaagggcagattgatataatgatattttttatgttcatacttgtagtgtcaagaatatatgaacctatgcagggaacacttatgaatcttgcggctatcatatctcaggacgttaatgtcgagagaatgaatgagattactaattatcctgttcagagtggtgatggaagtcttgatgttaattcgtatgatttagagtttgataaagtggcgttttcttatgttaagggagaaaatgttcttacagatgtatcatttactgccaagcagggtgaagtaacagcacttataggaccatcaggtggtggtaaatcaactgtatcaaagttagcggcaagattttatgatgctgataagggtacaataaaattaggcggcagggatatttctacaataaatccggaaaatctcttgtcagcatattcaattgtatttcaggacgtaacattatttaataatacaataatggagaatatccgtattggaagaaaaggtgctacagatgaagaggttataaatgcggcgaaggaagcacagtgtgatgagttcataagaaagctgccacagggttaccagatggttataggcgagaatggctgtgctctttcaggcggtgaaagacagagaatatcaatagcaagggcattgcttaaggactctccaataattctgttagacgaggcaacagcatctcttgatgcagacaatgaaacacttattcagcaggcaatatcacgtcttataaaagacaagacggtaataataattgcacaccgtatgcgtacagtatctggagctgataagatagttgtactggaagacggtattgtaaaagaacagggcagaccggaagatttaataaagaataacggaacttatgcaaagatggtaaagcttcaggcagtggattaatatgctggggaaagtcagcaggctgggcataattggtctgtatcgtggatataggcattagatgtaattaatctgctgggtgaattctttttgtttttgacacttatatcatattaatgtagaataaaatggtttattatgataatatcttgtatacactattgttgtataatattccacggaagcttcatactggtgcgcatagggtatgaatgattatggacagaggatatgcgcagaaatgaggattattatgtcagatataaaaggaagaattcattcagtagaaagttttggttcagttgatggacctggtgtaagatatatagtatttcttcagggatgtcatatgagatgtaaatattgccataatccagagacctggaagttagaggatggcgaactccagacaccgcaggaagtatttgataaggcttacagataccataattactggaaagataatggaggcataactgtgagtggtggagaagcacttcttcagattgaatttgttacagagctttttaagatagccaagaaagaaggagttcatacaactcttgatacatcaggcaatccatttacatttgaagaaccatttataagcaagtttaatgagcttatggcagttacagatctttttatgctcgatattaagcatattgacgatgaaaagcataagaaacttacaggctggactaataagaatatattagatatggcaaaatatctttcggataataacaaggatatgtggatacgtcacgtacttgtgccaaaggttacagatgataaggaagatttacaggcactttcagatttcgttaagtcattaaagacagttaagagatttgaaattcttccatatcatacacttggtgtatttaagtggcacgatcttggtgtgaaatatgagcttgaagatattatgcctccaactaaggaagaaatacagagagctgatgatatacttcatacaggtgattacaagggatatcttgaaaaatga

SEQ ID NO: 48 - DNA, 14768 bp, unidentified
  source 1..14768: mol_type = unassigned DNA
ctacttaattgtcacaactcccaactcaacctgattattgattctggggatgaatacggggttgctcagacctgcgcagacaatcatttttgtgccgtcaaggtcaaattcgcctttgtcatatttcggaaaaagtccctgattcggagcgattactccgccgatgaacggcaattgaatctgtcctccgtgggtgtgaccgcagacgattaagtctatgtcggttttctttgcgtcctcggcaatgtattcgggctggtggtgcagaagaattgtgaaattgttctttgctttttcggcaaattcttcccacagcgttcttgacggaacatcgtcatcgggagtgtagaactcataataagggtagtcgctcattccgccgataagcacactcttgccgtttttggtgaattttatgtattcattatcgagcaatacagcgcctgttgaatttgtttcgcttttaaaatccgttccgaatttggcggcattgtcacgctcatggttgccgagacagcagtatgtgggtgcaatttttgaaagcttttcaagcacatctttcatcttcgttgtgtcgggatcgccacggttgaccatatctccgcaaactgcaataaaatcgggattttgttcctttacaagctctgcaaggtctgcgttcttttctccgtattccttgttgtgcaaatccgtgatgacaacaaatttcagctttgcgtcgttcttagcattgtttacacagtaattcgtgattgcaattgtgttgtcacagtaaacaccccatattacgagagtcacaaacagcgcaagtattattgctccgagaattatcgaaaaatttttcattcaattcaccgctcatattaagtatggtattattttaggctcgttttgtgcggttgtcaacaaatgtgtgtcgaacaagtctgattattactgttccttgtgctttgattgtcggattttaagttgatttaggaattgctttgtttgacattccttttgcactgttgtataataaatcataattgtatttatatgttactcgggaaatttacacaaagttaaacagaagaggtatgggttatgaagaagattaatttgcgtaagatgtttctggctctcgcagatgtgtttattatcgttgtcagcggtattcttgcaaattatattctctcacttgtcggttacataggtactgcttcaagcaaaggcttgttgagctatattgttattgatcttgtcatgtgtctgtttacgctttatataagcggaacatattcaaaattgtggcgatactttaacgcaaaggactatattgtgtgtggaactgccgtcttttcggggtttacgctcggctttgtaatctcgttgtttttgcagattccgcagagaaagattttttgtatagtacatttcgcaatagcccttgtcggaattcttgcattccgttttgttttcagaagggcttttcttgaccttaccgaggcaggaagggcagagggcggagagcgtacccttattgtgggcgcaggcaatgccggcagaatgattgttcgtgaaattcacaatgcgaaagagcagggtgatgttaataatccttcaaaaagcatcattccggtatgctttgtcgatgatgatttgaaaaagctgaatcagaagatcgaaggaatccccattgtcggaacctgtcccgaaattgttaaaatatgtgatgaataccgcatagacaatattattgttgcagttccgtcatgtgaggaagatgagaagaggaagattcttgattactgttccgcaacagagtgcaaaatcaagattatcccttatctcggcgagcttttgtttgatgacgggcatacacagcttatttcacaggcaaaggaaatcaagattgaggatcttctcggcagaaaacccattgagtttgaccgaaaggagattcatgaccttatcaacggaaagatttgtcttgttacaggcggcggcggttcaatcggcagtgagcttgtaagacagattgcaaagaatgatccgaaacaaatcatcattgttgatatctacgaaaacaacgcatatgatattcagcaggagcttgtgcttgaatacggcacaaagcttaaccttgtaacgcttatttcatcggttcgtgattacgacaaaatggagcttatcttcaagacatatcgccccgaactcgtattccacgctgccgctcacaagcatgttccgcttatggaaaccgttcccgaggaggctgtaaagaacaacatcttcggcacattcaatgttgcaacccttgcagaaaagtacaaggcaaagaagtttgttatgatttcaaccgacaaggctgttaatccgacaaatgttatgggcgcaacaaagcgtgcgtgcgagatgattattcagtacaaggcgcagcacagcacagataccgaatttgtaacaacaagattcggtaatgttctcggctcaaacggctcggttattccgctgtttcgccgtcagattgaaaacggtgctcccgttaccgtaacacatcccgatattatcagatattttatgactattcccgaggctgtttcgcttgttcttgaggcaggtgcaatggcaaagggcggtgagatttttgttcttgatatgggtgctcccgtcaagattacaacccttgccgagaaccttatcagaatgtacggtaaggttccgtacaaagatgttccgattattttcacgggacttcgtccgggtgaaaagctttttgaggagcttcttatggacgaagaaggtcttaagtcaacacagaacaagaaaattttcataggaaatcaaattaaaatagacgaaacagatatgctgtcaaagcttgaggttctcaaaaagaccgcagaaaacaatgacagtgaaaagacagttgaacttttggcagaacttgtacctactttttgccacaaggtcaatgattaaccgaaaaggagaaattttatgtgcggtattgtaggttatgtaggacctaaggattgcagtgaggtgcttgttaatgctctcacaaagcttgaatacagaggctatgactcggcaggtattgcggtttttgataacggagaaataaagaccgtaaagaccaagggtaagcttcaggacttaaaggataagcttgcagaggtcggcactccgaaaggtcatgtcggcataggtcacacccgttgggcaacccacggcgagccttcggatgtaaactcacatccacacagcggtgcaagggttacaatcgttcacaacggtattattgaaaactatatggagcttaaagacttcctcatctcaaagggaagaacttttttaagcgacacagatacagaggttgttgctcagctcctcgactataaatacaacggaaatcctcttgaaacaattgacagcgtaatggctgagcttaagggttcgttcgcactcggaattatgttcaaggatttccccgacagagtttttgcggttcgccgtgaaagtcctcttatcgtaggcgttgcagaaggcgagtgctttattgcgtccgatgttcccgcaattcttcagtacacaagggattattatcttcttgcccatgatgaaatcgtaacactttcacctgacggtgtttcgttcgttgacgaacaccttgatccgattgaaaaggaacttcagacagccgactgggatatggaggctgccgaaaagggcggttatccgcactttatgattaaggaaatcaacgaacagcccgaggctatcagaacaacgattatgccgagaatcaaagagggacttccgttccttgaggaatgcggcatcacaacggaaacaatcaagaatttcaaaaatatcacaatcgttgcctgcggtactgccatgcacgcaggtatggtcggcaagtatgttattgaggatctcgcaagagttcccgtaaatgttgacattgcgtccgagttccgttacagaaatccgattgtaggcgagggcgaccttgtaatcatcatttcacagtcgggcgaaacagccgacagccttgccgcaatgcgtcttgcaaagcagaagggtgcaaaaactcttgcaatcgtaaacgcaaagggcagttcaattgcccgtgaggcggatatgctcatctacacactcgcaggtcccgaaatttccgttccgtcaacaaaggcatacatcacacagctttccgttatgtatctctttgcctttgagcttgctcttgcaaaggaaacaatcagcacagccgagtgcaagcgacttgtttcggctcttacaaaaatgcctgaggcagttcagtatgtaattgacaactgcgaggatacctgcaagttcgttgccacaaagcttgttgcaaccgacagcttgctttacataggcagaggtcttgactatgccctttcaatggagggttcgctcaagctcaaagaggtttcgtacattcactcagaaagctatgccgcaggcgagttaaagcacggcacaatttcgcttattgacgaggatgttcccgttatcgccgttgcaactcagacaggtattatccccaagacaatcagcaatgttgttgaggttaagtcaagaggtgcaaaggttattcttgtttgtacagacgcctgtgcaagagaactcaaggacggtgttgcggattatgttatcgaaattccgcatacagacgagcttcttatgccgattacagcggttgttccgctccagattcttgcttattacacatcaatcaacagaggtattgatcccgataagccaaagaaccttgctaagtcggttactgtagaataaacggcggtcttgtatttaattgaaaatggaaaattgaaaatgtaaaattatggtcgggaaggcaatttgcaagatgcaaatcattgtcacccgaccattttttatttatatgaaagtatatgcttaattgtgggagcgtccaatgaacgctcctacataacttactcttgttttcaaatttaaacggtaaaaaccttgtatttttttgacagattatgtataattaattagatatacattctaaaaagcagtattgatgaatctaatttagtttcgggggaatatacggacatgatgaaaactgtttttaaaagagctgtaacgcttgcaatttgtgccgtaacggtattttgcggtatttttgcctgttcaggcgcaacaaaagattacgagattccgcagattgacgatatgacgctttcaatgcctgacggtatgagcgctgttacaagggacagtaaaagcacagataaatatttttccgttttcggtcttgattatgacacaacaatgaaaacctttcagaacggaaatatctatcttcagggtatggataatatgtcatcggttattctgaccgtgacaatgacaaaaaatgagagcagcgagaatgtcggcaactatgctcagctttcttcaagcgagctttcaaatatacgcaacaattttcttaattccgacgagtatctgagctgtactcccgaccaaaaagaaaaagctgtgtggcttgtgtttgacgcaactgctcagagcagtaagggcgatgtgaaaacctttattgccaacacggtttatgacggtatgaacattaatatcacaatgcagagaacagagggtgatgttacaaccgttgactacgatactttttccaaaattgtatcttcggtaaaattcagcgacctgccgttttcaaagggatttattccgtacataatcatcggcggcggtgttgttatccttattttgattgtactcatcataatttttgccgtgagaatcagaaagcataaaaaggctaagaagaataacgctattcttgaggagcttgcagtcaagtataaactcggtgaaaagggtacggactacgacattgacaattttgacgattctcccgaaaagcccgataaacgctcaaagaaaaagcagaaatatgcggaagaggttgaagaagaaccggctttgccgggcagaagatatgctcccgagccgataatcgaaaatatggaagaaccggaagaaattacaagtgagtattcaaactttggttatgacacggatgatgccaaggaaaaagaaattgacgagataatcaactccgcaaaggcttacaagagtgagcttgagcgtgaggcatataaaaacaactacggttacgaggaaaacagcacggaggacgaaaaaaaaaaggagcctaccgcagcagatacctcagagactgaacccgaaaaaattgacgaaaacgaaaaagataacgcagaaacacctgaaaaacacgaggacataagctcttcgtcaggtcctacactcgttattcccgaacccgaacacgatctttttgaaacaagcgagcctgacgatatcgaccgtgaggacgatgccgatgttgaagaaaccgaggaggtttccgaacaaaagcatccgcttgaaaaaaaggttgacaagtacgcaaacatcattttcggcagtgacgatcccgaggagaaaaccggggaagaggttgatgatgaggagcttgtaagggcaaaggctaagaaaaacaagtttgacagcggttatgacttttttgacgaagctcccaaaaagtcaatgggggttatcaaaagctcagacctcagagatgccgaggacgttgatgttatcggcgaggttgaaagaaaagcagaaaccgtaaagcagaacgctcttgaaaaagagaataataaagaaaccgagggcgaaccgaatgataaacggtcaacggaagaggttcttgccaatgtaggcaaaaacatcggtaacgctctcaggggctttgcaggcggagttaagaattttggcattcactgcggatatttctgcaagaatgtttcaataatgataaagcataagcgtgcaattgccaaacgcaaaaaggcagaggaagagagaagagagagagaaagacaaaaggcagagcgtgcaagaatgcgtgccgaaagaggcgaaagtgacggacttgttcaggttcacagcagaaccgaccgccgcccccagcagaatcgccgccctgcaaacagaaacaagagaagataatttcttttcttaacggaggaaaaacatggaaatgctaattaaaaacgcagtggttgtttcccctgccgacaagcttaacgaaaaaacagatattctcataaaggacggtgtgattgccaaaatcggcagcggcattacatcagacggagagattattgacgcagacggtctttgtgccgttccgggatttgttgatatgcatgtgcatcttcgtgatcccggtcagactcacaaagaggatattatcacgggatgcaaggcggctgccgcaggcggtgttacaagcctgcttgcaatgcctaacaccaacccgacaaccgacagccccgaaattgtaaagtatattcttgacaaagctaaagacgccgacagccgtgtttatgttgcggcaagcgttaccaaggggcttaaaagcgaagaatccacagacattgacgctgtgaaaagtgcaggtgcaatagcacttaccgatgacggcagacctgttgaaaacacaaagtatctgagtgacgcaatgaaaaaagctccaaagctcggcatgacaattgtcgcacattgcgaggacttgtttcttgccgacggcggtaaaattaacgagggcgaggtttcggaaaagctcggtgtcaagggaatccctgccggtgccgaggactgcggaactgcaagagaaattgcacttgccgccgctcttaacgagcctattcatatctgccatgtcagcaccaaaacaagcgttgcacttatccgtgatgccaaaaggagaggtgttaaggtgaccgccgaaaccgctccgcattatgtttcgctcacggacagggagcttttaagaggtgacgctgattacagaatgaatccgcctctcagaactcaggctgatgttgacgagattatcaatgggctttgtgacggtacgcttgatgccatagcaaccgaccacgccccgcacacacccgaggaaaaggctgattttgtaaaagcccccaacggttcaatcggcatggaaacctcgtttgcggtctgcaacacatacctggttaagacaggcagaatgacgctttcacagcttgttgagaagatgagtgttaatcctgcaaggattttgaaaatcaacgcaggcacactttcagtcggtgcaaatgccgatgttgttcttataaatcccgatgaagaatggacagttgatgccggtaaacttcacggcaaaagcaaaaacaccccgtttaaaggcagaaccctcacaggtaaagtcaaaaagacaattctcggcggtaaggtagtttttgaagattgagtttgttttaattgtagatgttgatacgattaaaattgtgcaaacggtagctgtactacgctcgggcataaatgttttttatttgtcaaactgtctgcacgaattggggacggcggctcgccgtgttcgctcaccaaataaatttaatttaatataaactttaacataaaggagtaaaattatggcacagaaaggcgacctcctgtcggtaagacaggatatcagagtagtagacgcaacaatccgtgacggcggtctttgtaacgatttcagatttgacgacaaatttatcaaggctctttacaatgcaaatgttaaagccggtgttgattatatggaattcggctacaaggcatcaaaggaaatctttaacgaagaagatttcggtaagtggaaattctgtaacgatgcagatatcagaaaaattgtaggcgacaacaagacttctcttaaaatcgctgttatggctgatgtcggcagaacagattttaagaaggatattatcgcaaagaaggacagcccgattgacctcatcagagttgcaacatacatcaacgcaattcctgcggctgttgaaatgattgaggacgctgcaaagaagggctacgaaacaacaatcaatattatggctgtttcaaaggcaagaaccgaggatattacagcggctcttgaaactctcggcaaaactcccgtaaacgctttctacattgttgacagctacggcgcactctatcccgaggagtcaagacgacttgcagacctttactgctcaattgccgacaagtacggcaagtcggttggtattcacgctcacaacaaccagcagcttgcttttgccaacacaattgaggctatgactcagggcgtcagctaccttgacgcaaccgttgacggcatgggcagaggcgcaggcaactgtgcgcttgaacttctcctcggttttctcaagaacccgaagtatcaggttgctcctattctcaaaatcattgaggagtacacccacaagtttaaggctgagggcgttaagtggggttacgatattccgtaccttctcacaggtcagtacaacacacatccccgtcctgcaattcagttcgtaaaagaggacagacaggattattacaagttctcaaatgaactttatgatattatcaacagctaattaaatttgtagcggcgttcattgaacgccaatcgaaccgattgccaaatcggttcgaccatacaaacgatttgaattaaagtaattaaccacgatataacaatacatttgttgtttattcgttttggtttcacaaccaaaacgattggcggtcattgaccgccgctacggttaagcaatgacattgtttaaatcaaaatatgaacgaacaaattgtttttacattacaaaaaatgaggagaatcactatggcatttgacagacttatcgaaaatattgtaaaaatgcagaatcctacggttgcaggtcttgaccctaagcttgactatgttcccgaatcaatcaaaacaaaatgctttgaaaagtatggcaagacgcttgagggtgcggctgctgcactttttgaattcaacaaggcgcttattgacgcactttatgatattgttcctgccgtaaagccacaggctgcatattatgaaatgtacggctggcagggtgttaaggctctttgtgacacaatcgcttatgcaaagtcaaagggtatgtttgttatcacagacggcaagcgtaacgatatcggaacaactatggaggcatatgctacggcacacctcggtcatacagatgttgcaggcgaaagtattgacgcattcggtgcagacgcactcacggtaaacggctacctcggaacagacggtatcaagccgcttgcaaaaatttgcgattcggacgacaagggcatttttgttcttgtaaaaacttcaaacccaagctcgggcgaacttcaggatatgaagcttgaaacaaatgagagcgtttatgagcatatgggtaagatgtgcgaaggctggggcgaagaccttatgggtaagcatggctattcggcagtaggtgcagttgtgggtgcaacatatcccgaacagctcggtgaaatgagaacaaaacttccgcacacattcttccttgttcccggttacggtgctcagggcggcggtgccgatgatgttaaaaacgcatttgacgaaaacggtcttggtgcaatcatcaactcaagccgcggcattatgtgtgcatggaaaaagcagggacttacagaagatgactttgccgttgccgctcgtaaagaggctgagcgtatgagagatgaaatcgttggttgcatcggcaaaattaagcttggctgattcatttgcacaacagaatcacgaaatttttcgttttttatgctttagtgctatgaatttattgactttagcgtgctaaaagcgtataatttaaatgtatttatttttacaactatatttttaaattttctttaaaaagggagatatcagaaatggcaagagtatataatttttcggcaggtccttcaatgctgcctgagtctgtgcttaaaaaagcagcggcagaaatgctcgactacgaaggcagtggtcagagcgttatggaaatgtcacaccgctcaaaaatttacggtacaatcatcgagggtgccgaggctcttttgagagaggttatgaacattcctgacaactacaaggttcttttccttcagggcggtgcgtcaacacagtttgcggctatccctatgaaccttatgacaaagagcggtaaggctgattatgttattacaggtcagtgggctaaaaaggctcatgcagaggctgcccgttacggtcaggctaatgttgttgcttcatcggctgacaagaccttcacatacattccaaagcttgatccttcaacattcacaaaggacgccgactatttctacatttgcatgaacaacacaatttacggtactgtttatcacgagcttcccgacacaggtgatgttccgctcgttgcagatatttcttcctgtattctttcaagaccgattgatgtttcaaaattcggcgttctctatgcaggcgcacagaagaacatggctccggcaggtcttacggttgttatcgttcgtgaggatcttatcggtcacgctatggatatcactcctacaatgcttaactggaaaactcacgctgacaacggttcaatgttcaacacaccgccttgctacacaatctacattgcaaagcttgttcttgagtggattaagaacgaggttggcggtcttgataagatgtatgaaatcaacaagaagaaggctgaccttctctacggtttcctcgattcttcagagcttttcaagggtactgttgttcccgaggatcgttcgcttatgaatgttccgttcgttacaggtgacgctgaccttgacgctaaattcgttaaagaggctactgaaaacggtcttgttaatatcaagggtcatcgcacagtcggcggtatgagagcttcaatctacaacgctatgccttatgagggcgttgaaaaactcgttgagtttatgaagaagttcgaggctgaaaacaagtaattattgaatattatgatataacgggcgaacgctgttcgcctgttattgtaaattcttaaaataaaaaattaaaaaggattgattttgatgtataacattcttacattaaacaaaatcgccgctatcggcacaagccgtctcggtgataattataaatacggtgacgatgttcagaaccctgacgcagttcttgtaagaagtgccgcaatgcacgatatggaatttgccgacaaccttcttgcaattgcaagagcaggcgcaggcacaaacaacattccgaaggataagtgcagtgagcagggcattgttgttttcaatacaccgggtgctaacgcaaacgctgttaaggagcttgttatcgcaggacttcttatttcaaatcgtaaggttattgagggttatgaatgggcaaagactctcaagggtaacggtgcagctgtcggtaagatggttgaaaagggcaagagtcagttcgtcggtcccgaaatcaagggtaagactctcggtgttatcggtcttggagcaatcggtattcttgttgcaaatgccgctgttgctctcggtatgaatgtaatcggctttgacccgtttatgtctgttggcaacgctctcaagcttgctcctacagttaagctcatgaagagcgcagaagatgttatggtaaattgcgactacctcacaatccatgttccgcttactgacgacacaagagatatggttgatgccgatatgattgccaagatgaaagacggtgttcgtattctcaatttcagccgtgacggtcttgttaattcaacagcagttcttgaggctgttaagagcggcaaggttgctaagtatgttacagacttcggaacagacgatatcctcggtgaagagaatattatctgcctcccacacctcggtgcatcaactcccgaaagtgaagaaaattgtgctgttatggcttgtgatcaggttaaggagtatctcgagaacggtaacatcatcaactccgtaaactatcctgcaatttcacttgcaagaacaaatgctgacgatacccgtttctgcgttgctcacaagaatgttcccgagcttctcaagaaggttctcacacagatcagcggcaatgttgaaaatatgctttcaaagagccgtggcgactatgcttacacaattattgatgttgcaggcgccggtgcagatgaccttgcaaaaatcgcagcagttgacggcgtaatcagagttcgtgcaatctgattttaattaaaatttaatcgttgaaaatttaatctatgaaaaaagtccgaacacgcaaaatgttcggactttttgtttgtgtgaatctaaatatgtagcggcgttcagtgaacgccaatcgaaacgattgcaaaatcggttcgaccgtatttcaaaatattggtgtatggttgatttggctttgcagccaaatcaaatggcgatcactgatcgccgctacgtatcgctatatattaaacttttaccaaatgatatttctttgcattggtaattataaatgttacggaaattgcaacggcacacaattctgcaacgggcaatgccgaccatacaccgtttatgcctataaacatcggcaaaatcagcattgcggcacactcgaaaacaagcgttcttgcaactgaaattacggctgaaatcttgccgttgttgagtgcggtgaaaagtcccgatgcgaaaatattcattccgcacaacagataatttattgcaaaaattctgaatccgctgagtgcaatctgctgaattttttcgtcgcctgccgagaaaattccgacaagcggttctgcaaaaaattcagatgccgtaatcattgcaaccgaaattatcagcgtgatttttatgcataatttgaacagcttttgcagtttttcgtggttttgtgcgccgtagttaaagctgatgacgggtgaaactcccgaagtgaatccaaacgaaaccgcagtgaaaataaagtgaatgtacaaaatagcacttatagccgcaacgccttttgcgcctgcaaagtgcatcatctgaatgttgaacagcgctgttgtcacggctgttgaaagatttgtcacagcctctgacgagccgtttgccattgcaaagaggatttcactgaccttgaattcaggcttgccaaagtgcagagtctgctttttgttgaaaaagagcaaaagcggaattgcacccacagccattccgataatggtgccgagtcctgcaccgattattccaaaatcccacactgccataaaaagaatgtcaagcacaatgtttgtgcaacccgacagtatcgagaaaacaagcatgatatgtggcttgtccgctgttacaaggtacgattggttgagcatttgccagcacattacaaagccgtacggaatcataacgctgccgtagtcaatgcagtaggggagaattttttcgtttgagccgaacatcatatacataggttcggcaaaaattgtgaacagcacagcaatgataacagaaatgaccgttgccgtgattgcaacaccggacataagtcggtttgcttcctcctgtttgccttctcccattttctttgcgattatagcatttgagcctgttgaaaacattaagcccacagccataaatacgagtgtgaacggatatacaatattgattgcggacaatgcgtcacttccgacacagttcgcaacaacgattccgtcaacaaccgtgtaaagtgacataaaaaccatcataagaacggttggcagagtgaacttcagaatcgtttttgctttgataggttttgcataaattgatgttgccat

SEQ ID NO: 49 - DNA, 11906 bp, unidentified
  source 1..11906: mol_type = unassigned DNA
atgaaaaattcgcggcgcatcttggcgcattcttatctggaaatagtataacgcttccatcagcaaatcgttttccgcgtccgttttcaccgccaggcgcagataattcgcgggcaagccgaacgaatcgcacgtccgcaccaaaatgcgctgcgcccgcaggtgctgcaccgttttcgtcatatcgtgcccgaaatcagccagcaggaacggtacgcgccccgctgtcacacgcacgcccatctcctgcaagcaccgcgcgaaccgctccgcccgcgcctgattcgcctgtgcatccgccgcaatttccgcctgatgacggggcagctccgccgcaaccgccgacgccagcacgttcagcgaccatgtgactgcccgctcctgcaagcgtgcaatctgttccggcgcagcgcagatgtaccccagccgcacgcccggaatgcacagaatcttcgtcaacgacccgaccaccgtcaaaccatcctgcacatggtggcgaaccgtcgcatccgggcaatagtcgatgaacgcctcatccacaatcagctcgccgccgctgttccgcacgtcccgatgcatccgcagcacgtcattcggcgaaagcagcgtgcctgtcggattgttcggattacacacaacgaccgtgtcatccgcctgaatcgcctgattcgccgcaacccgccgcccatgcgccttcgcccgctccgcatattccccgaacgtcggctgctgcacatgcaccgcgccgcgccgaacgccgagcgtcaggtcaatcgccgccgcgccgcccgccgtcggcagcacgcagctttcgtccacgccgagatacaacgccagccccgcacgcgccgcccgcatcgcgcggtcaggataatagcacgcctgcgaaagcgccgcgcgcatggtgtccatcacccacgcgggcgttccctctggtcgcagattcgcggaaaagtccagccaatccgctggctgaccttcccaaacattgccgccatgcctcaatgccgcgtcctcctgaatcagcagaaataccgagaatgattatagcaaaattacgggggaatttcaacagcgggtgggcaggatgatgaatccgcagttatagaatagaaagaaaactgacaggcatacactccataagtacaattgtacttctttcgcttttgccaattgtaaataattgcgccaaagaattgactttttcgtgaaaaggcgtataatcatggaaggaaggggtggaaattcatgagaacgacgaagctaatggcgggtgtgctgacgctgctggtgctggtcggcggcggctgccgagacggtgcaatcctccgaaggcacggtgtataccctgccggcgaatgtctcccgcatcgaggagtacgcgttttacggcgacggggaactgcgggaaatccgcattccggagggcgtgacggaaatcggagattatgcctttgcaaactgctggtatctgacggaaatcacgattccggagagcgtgaccaagattggcgcacatgcctttgacagctgcgtgagcttgaaaacggtgcagctgtccgacaacatcaccgaaatgggggaaagcgctttttatcgctgcctcagcctgacggaaatcaccctgcccgcgtcgctgacgggcatttcggcgcatatgttcgagaactgcgaaaaactggtgacggtcacggtgccggaaggactgctggaaatcggtgattctgcctttgcaggctgcaagaagctggaaaactgccctctgccgccgaacctgacgcgcgtcggcagctacgcgttcgacaagtgtacgctctggaacgccgagctgctgccggatacgttgacggaaatcggcgagtacgccttccgccagtgcaagaaactgacagaagtgacgattggcgaaaagctgctgaatgtcggcgagggtgcgttctgcgactgcgacggcatcaagaaagtggactggcaggcgaaagtgacgcgcattcccgaccgcgtgttccaatcctgctactatattgaaaccgtgaagctgccggaaacagtgacggaaatcggcgagtactcgttctattcctgcggctatttgacggacattggcacgtttgagcggatgaagcgcatcggcgcttgcgcgttttcaaactgcagagcactggtgaatatcggcacgctggacgcgatagaggaaatcggcggcggcgcatttatgctcgaccaaaagttggtactttcgctggatggcttgcagcacctgcgcattatcggcggctacgcgttcggcggctgcccgaaagtgaccggactgcgtgatttgccgatgctggaagaaatcggcgcgagcgcactggacagcgcgaacatcccggaagttgcgaatctgccgcgcttgcggaggattggcgcatccggtctgtccaatcggtcgctggtgacggtgggcgacctgcccagcttggagtatatcggcgactcagcgttccggaatgcaacttcgctgaccacgttcggcgcagcaccgaatgtgacgtacattggcgcgaatgcctttgaagaatgccgcaaactggagacgcttggtttggatggtgttgcggcagaaatcggaagggaagcgttcatcgcctgcacttcgctgaagtcgcttgatttgtcgaatgtcaccagcattggggagaaggcgttcagctactgcggcacgctggaaacggtggtcagcctcgaatccatcaccagccttggcaagaatgcgtttgaggaatgcagatcgctggtgacggtcggcaaaatcggcaatctgacgcggctgccaaacgaagtatttagggaatgcaaagcccttgcaaatgtcaccctgccggatacgatggagacgattggcacagcggcgttcaagcattgctatggtctgcctgaaattgtgattccagacagcgtgacgaccatcgaggaagaagcgtttagcggctgcacctcgctgcaggaaatcattgtgccagattctgtggtaaaaatgggcaatcatgtgtttggcggatgccgaagcgcaacgcggattgtattcccgaaatacctcacgtacctgcccggctatggtgtgagcttctgcaactatatggtggaatttgtattcccagagaacgtgaaatctatcagcgattacttcttctacggctgcatttcactgaaagaaatcgtgattccggatacggtgactaccattgatttccgtgctttctgggattgcacttccttgacgcgcatcacgattccggcttcggtcacgaaaattgattcgacagcgtttgacggctgcaagaaggacaaactggtgtgggtggtcacgcccggttcgtatgcggaaacgtacgccaagaagaattattaccattacacatacgcgaagtaaaccctgttgggagattgccctgcgcagtctcccgtttttttgcgtccagcattccataacattacccaacattcgccaaaataccccttgatttttgcagtgctgcgttgtacaataatttacaggggcgcaaccctgcccccaaagctgctgcaatgcaaaaggagtcgccatgggcaattcgtattcgttgttcctgcgtcagtcgtatctcgacgcgtgggaggactatcgccgctcgctgcacagggctgatttcccggtctgggattatatcatactcaccgcgtccaatgaggcgcaggcgaatgcgtatcgccagcagattgccattcgccgggcgaaaaacctcctgcctgagcggacgcactatgccgttctgcccgacccggacgggctgcgcgtgggcagcggcggcgcgacgctcaatgcgcttcgttatgtctgcacgcaggaaggcacatttgcgggcaagcgcattctgtgcatccattcaggcggggacagcaagcgcgtgccgcagtacagcgcgtgcggcaagctgttttcgcctgtcccgcgtgagctgcccaacggcaggcgctcgacgctgtttgacgagttcatcattggcatgagcggcgtgccatcgcggattcgggacgggatgcttgtgctgtcgggagatgtgctgctgctattcaatccgctgcagattgatgcgcccgcatccggcgcggcggcgatttccttcaaagaggatgtggaaacgggcaagaaccatggcgtgttccagatggatgaacagggtaacgttggcgagttcctgcataaacagacggtggagacgctgacgagccgaggggcggtcaatgcgcagggcaaggtggatattgacaccggcgcggtgctgttcagcgcggatttgctggcggatttgtatacgctggtggatacgcccgcaaagtttgcggcttttgtgaatgaccgcgcgcggctgtccttctatggcgatttcctctatccgctggcaagccgttcgacattggagcagttctaccgcgaaaagccggatggctcgttcactgaggagctgcacgcctgccgcaccgctgtctggcaggtgctgcggaagtatcggatgcgtctgctgcggctggcgcccgcgtcgttcattcactttggcacgacgcacgaactgcgcgcgctgatgacagacggcgtgtcggcgtacagcttcttggactggaagaagtgtgtgtccggctgctgctcatcggcgaattatgcgctgaataacgcgatggtggaggaggactgctgcatccatgacgattgctatctggaggacagccatgtgatgggcggcgcgattatcggcagcggtacggtgctttcgcatgttacagtcagcggaaagaacattccggcgaatgtcgtcctgcacagcctgaagctggcggacgggcactttgtgacgcggatttacggcgtggcggacaatccgaaggaaggtacgttcttgggcggctcaatggcggcgttcgggaacgtgtgggatggggatgaccattcgctgtggcaggcgaaaatctacccagtctgcgattctatggcggaatcggtggatgcggcgctgaatgtctacgcgctggcaatgggcgcggggaattatgatgcgtgggcatcggcggagcgcgtcagcctgtgcagctcgttcaacagcgcggacacggcggcgattctggaatgggagacgcacctgcgcaaagccgtgaaggtcgagcgcttcttgtctgtgattcgccgcggcggcacaatcgaggaagcgaagaaaatttttcaggatgctgccatcagcgcctatcagcgccgcctgattgcggaaaaggcggcatcggcagacgtgttcacacggatgcgaatcttctactgcctcggtaaagtactgggtgattcgcaggaaggggaggcgtacatcaagcgggcttttgaggagattcagcgcatggtgcttgcgggagcggcagcgcacggcacggggctttgcgcacatcatcagccagtggaagaagaagcagcggtgcgtctgccgctgcgggtcaactggggcggcggctggagcgatacgccgccgtactgcaacgaaaagggcggaacggtgctcaatgccgcgattctgctgggcggcgagtatcccgtggaggtgcatgtgcgccgtctgccgaagccgatggtcgtgctggaaagcgcggatatgggcgcgcatggggaattcacggcaatttcggacttgcaggagtgccacaatccctacgacccgtttgtgctgcacaaggcagcgctgattgcctgcggcgtgattccgcgcgagggcggcgaattgacggatattacggcgaaaatcggcggactgtacgtctctacgcagatgcacggcgtgccgaagggtagcggtctgggcacgagcagcattcttgcaggcgcgtgcgtcaaagcgcttttccagtatttcggcgtggcgcacacggaggacgatttgtatgagcacgccatgtgcgtcgagcagattatgtccaccggcggaggctggcaggatcaggttggcggcatgacgccgggactgaagctcatcaccgcgcccgcgggcattcagcagaaattgaacgtccgccatatcgctctgtcggaggacaccaaggcggaactgaacgcgcgtttcaccctgatttataccggccagcgccgccttgcgcggaatctcctgcgcgatgtggtgggccgctacatcagcaatgcgccggacagcctgtacgcgctggaggaaattcagcgaatcgccgtgatgatggcgtttgaactggagcgcgggcatgtggatgacttcgcgaagctgctgaatcgccactgggagctttccaagacgattgacgcgggcagcaccaacacctgcatagaccagatttttcttgcgattgacgacctgattgacgggcgcatgatttgcggcgcgggaggcggcggattcctgcaggtgctgctcaagcacggcgtgacgagggagcagctgaacgcgcgcctgcatgatacatttcaggactgcggcgtggacgtgtgggactgcacattggtttaaggaggtacgatcatgctgaagggtatttccccgctgatttcgccggaactgctgaaagtgctgtgcgagatggggcatggggacgagattgtgctggcggacgcgaatttccccgcagaaagcatggggcagcgcgtcgttcgtgcggatggcatcggcgcgccggaactgctgcgcgcgattctgccgctgttcccgctggatcaatatgatgaaagcaactttgtgctgatgtcggttgtgccgggtgacccgacagtcccggtgatttgggacgaataccgcgcgacgctgacggcttatgagccggacgcgaaaatccagacaatcgaccgctttgcctactacgagcgcgcgaaaaaagcgtactgcattgtcgcgacaggcgaaagcgcacagtacgcaaacatcctgctgaaaaagggtgtcattcggcagcattgcaaatgatatgaaacctaagattatactgacaatagtttctatacccccttactttttgaaagcaaattctttataatagcagtgtatctattttcaagaatagctgatgaaaagaggaaatttcaagacgatggcgaaaaaggcgctgattaccggcatcaccggtcaggatggttcctatttggcggagttcctgctcgaaaaagactatgaggtgcatggtattgtccgccgtgcgtccatttccaacacggcgcgcattgaccacctgattgagaagaaggcaattcacctgcatgacggcgacttgtcggattcttccggcctgattcggctggtgggcgaaatcaagcccgacgaaatctacaatctggcggcgcagagtcatgtgcaagtgtctttcgacgcgccggaatattcgggcgacgtggatgccttaggtgttctgcgcgtgctggaagcggttcgcgtgtgcgggctgacgaaaagctgcaaggtgtatcaggcttctacctccgaactgtacggcaaggtggaggaggttccgcagcgcgaaactacgccgttccatccgtacagcccctacgcggtggcgaagcagtacggcttctggatggtgaaggagtaccgcgacgcgtatggcatgttcgcggtcaacggtattctgttcaatcacgaatccgagcgccgcggtgagaatttcgtgacgcgcaagattaccttggcggcgggccgcattgccgagggaatgcaggatcatctggagctgggcaatatggactctctgcgtgactggggctatgcgaaagactatgtggagtgcatgtggctgattatgcagcaggagaagccggatgatttcgtcattgcgacgggtgtgcagcataccgtccgcgatttcaccgagaaggcgttcgcggcgaatggcatcagcatccgctgggaaggcaagggcatcgacgaaaggggctatgacgcggcgaacggcaagatgctggtgtgcgtgaatccgcagtggttccgcccgacggacgtagacaacctctggggcgatccgacgaaggccaagacaatgctgggctggaatccgcaaaagaccagttacgagcagctggtggagatcatggcgaagcacgaccgcatgttggcgaagcgcgaaaaggcgatgcggacggcgctgtaatttgggcttgaagagcagaaagagggacagccatgatgaaaaaggatgcaaagatttacgtcgcgggtcatcgcggcatggtgggttccgccatcgtgcgagaattggaacgtcagggctatacaaatattatcacccgcacccacaaggaactggatttgacccggcaggaggcggtcgaggcgttctttgcgcaggaaaagccggcgtatgtatttcttgccgcggcaaaggtgggcggcatcgttgcgaaccagaacgcgctggcggatttcatgtatgataacatggtgctggaaatgaatgtcatccatgcggcgtggcagaatggctgcaagaaactggagtttctcggctcatcctgcatctatccgcggatggcgccccagccgatgaaggaaagctgcctgctgacctccgaactggaaaagacgaacgaggcgtatgcgctggcgaaaatcagcggtctgaagtactgcgagttccttaatcggcagtatggcacggattatatctccgtcatgccgacgaacctctatggcccgaacgacaactatcatccgacgcacagccacgttcttccggcgctgattcgccgcttccacgaagcgaaaatcaacggcgcggaaagcgtgacttgctggggtgacggcagcccgctccgcgagttcctgtatgtggacgatttggcaaacctttgcgtgttcctgatgaacaactactccggcagcgagacggtgaacgccggcacgggcaaggaactgaccatcaaggaactgatcgaacttgtggcgaaggttgtgggttacaagggtgaaatcaagtgggatcccaccaagcccaacggtacgccgcgcaagctgcttgatgtttccaaggcgacgaacctcggctggacgtatcggacagagctggaggacggcatccgccttgcgtatgaggactttctgaacaaccccatgcgcgctgaacgttaaggcactaccgcacaattcgtcggcagcgctggcgatgccttttctgccatctgcttcttgcagaaatctcgatttacctccagtaaaccttcgatttctgcaatcgcatctgacaaaaaatgcattcgccatcgcaccaactcatttgtgcggtattgccttaaggcaacaccgcacaactcggcgtcaccttaatccgcgaaggaagcaacgggggctgcatggcaaaaagtgcagccctcattctgttttggaggagaaacaaacgatgaacattatcctgctttccggcggctccggcaagcgcttgtggccgctgtccaacgatattcgctcaaagcagtttatcaagattttcaagaaggaagatggcgcttatgagtcgatgctgcagcgcgtctatcgccagattaagcaggtggatactgacgcaaccgtgaccattgcgaccagcaagacgcaggtgtctgctatccacaaccagcttggtgagcatgtcggtgtgagcatcgagccatgccgccgcgacacgtttcctgccattgcgctggcaacggcgtatctggtggatgtgctgcatattgacccgtcggaatcggtcgtcgtttgcccggttgacccgtatgtggaggacgcttacttcgaggcgctcaaggaattatcggcgcaggcggacaagggcgaggcgaacctcattctcatgggcattgagccgacgtatcccagcgaaaagtacggctacattattccacagaacggcgaacatatatcgtcggtagataccttcaaggaaaagccgacggcggatgtggcggcggagtatattgcccgcggcgcactgtggaacggcggcgtgttcgcttacaaactgtcctacatgataaacaaggcgcacgagctgatagactttatcgactatcaggatttgttcagcaagtacgctgcaatcaaaaagatttcttttgactatgccgttgcagagcatgaaaaacagattcaggttgtgcgttttgcgggcatgtggaaagatctcggcacatggaacaccctgaccgaagccatggaagaaacaatcatcggcaagggtgaactaaacgacaaatgcaggggtgtgcatatcatcaacgagctggatgtgccggtgctggcgatggggctgcatgatgtggtgattagcgcatcagcggagggaattctggtatccgacaaggagcaaagttcctacatcaagccattcgtggacaagtacgagcagcagattatgttcgcggagaagtcgtggggcagcttccgcgtagtggatgtggagatgaactcgctgaccatcaaggtgacgctgaaccccggtcacaacatgaattaccacagtcatcagtaccgcgacgaggtgtgggtggtgatttccggcgcgggcagaacgattgtcgagggggtagaacgtccggtcaagacgggagatgtcataacgatgacagcgggtcagcgccacacggtcattgcagacacggagctgaagatgatagaggtgcagctgggcaaggatatcagcgtccatgacaagaaaaagttcactttgtgattgacaggacgcataaattggtatatgctgtctctcgaaacggaagcaatgccaaaactactggaggcggaggatgccggatgagtaaagtgcttctgattacgaatatccctgcgccgtatcgggtggatttgttctactatatgcagacgcatcagcagacgcatgagtttttcgtcatttacacgaatcgcaatgaggacaaccgccagtggacgattgacgagcgcaaactcctgcaatcgacgattctggaatctaaaatcatcaagcgcaagggcgaaggtgatgtgcactacctgcatattccgcagcacctgacgagggaaatcacgcgcatcaacccggatgtggtgattgcgtgggagtacaacccgtccgcgctgaaagcattgctctggtgcaagcgccacggcaggaagttcatccacctcacggacggcacgctgcgttcggagcggaacatcgggcgcgtgcagaaactcatgcggtatatcatcatccgccacgccgacgcgtgcattgccagcagcaccaaagcgaaggaaaagctgctgcactggggcgcgccggagcggaaaatcttccttagcctgctgacggtggatatttcccgcttccgctatgccgaaaagcacgaaaatcagcatacgctgctgtttgtgggcagaattatccccctgaaagggctggatttgctcctgcgcgcgctgccgaaagtgcatcagccgtttgaactgctgattgtcggcgacggcgaggtggaggagaaggcgaaattgatggcgatggcggaagaaacgcacgttgcgcagcacattcactggctgggattccagtctggcgagccgctggcggatgcctatcgccgggcgagcgtgtttgttctgccgacccgcgaggactgcttcggacttgtgctgctggaagcgctctgctccggtacgccgattgtcgcgtcgaagtatgccgacggcgcgtatgacaccgtgcatccgggcgaaaacgggctgattgttgacccggaggatgccgacgcgctggcggaagccatcgacagcattctgggcagcgaggaaattcagcggcgctattcgcagaactgccgccagtatattccgcaattcgagtttgaggcggtcatgcaggggtatctgcaggcgattgcgtccgtcacatcaggcaacaaataa

SEQ ID NO: 50 - DNA, 10095 bp, unidentified
  source 1..10095: mol_type = unassigned DNA
atggatgacgaggcgttgattcaatataagaacgtagaaatccatcaacaggaactttgtgtattaagcgatgtaaatctggagctgcacaaaggagagttcgtctatttgatcggaaaagtaggctcgggaaaaacgagtttgctcaagactctgtatggcgaactggacgtaattgacggtgaagcggaagtgttgggttataacatgcgttctatcaaacgtaagcatatcccgcaactgcgtcggaaattaggcattgtctttcaggattttcagttgctcacagaccgtactgtatacaataatctggaatttgtacttcgtgccacaggctggaaaaacaaacaggaaatccaagatcgtattgaagaagtgcttcagctggtgggaatgtccaacaaaggttataagctcccgaacgagctttccggtggcgagcaacagcgcattgtgattgcacgtgccgtactcaattctcctgctattattctagcggatgaaccgaccggaaatctggacgtagagaccggtaaggccattgtagaattgttgcacaatatctgtgaatccggttcatccgtagtgatgacgacgcacaatttgcaattgctgaaagagtatccgggcagggtatatcgttgcgccgaccatcagattgtagatgtgacagccgaatacatgcccagacagagaacaatagaaatagatttaaatatagataactaaaacagtaacgaaaatgaaagttttaaagtttggaggaacttccgtaggttctgctcagcgcatgaaggaagtagccaaattgattaccgatggtgaacagaagattgttgttctttctgctatgtcaggaacaacaaacacattggtggaaatttcggactatctgtataagaagaatccggagggtgccaacgagattatcaataagctggaagctaaatataaacagcacattgatgagctttttgcaacccaggaatataaacagaaaggtcttgaagttgtcaaatcccacttcgactacatccgctcctatactaaagaccttttcactttgttcgaagagaaagtggttttggcacagggagagcttatttctacggcgatggtaaacttctacctgcaggaatgtggcgtgaagtccgtgttgcttccggctttggaattcatgcgtactgacaagaacgcagaaccggatcctgtatatattaaggataaattgcgcgcacagctcgatctctatccggatacagaaatctacattacgcaaggtttcatctgccgcaatgcctacggtgagatagacaatctgcaacgtggtggtagtgactacactgcttctctgatcggagccgcagtaaacgcttccgaaatccagatttggacagatatcgacggtatgcacaataacgacccgcgtattgttgacaagaccgctccggttcgtcaacttcacttcgaagaagcagccgagttggcttacttcggtgcaaaaatcctgcaccctacctgtatccagcctgctaaatatgccaatatccctgttcgtctgttgaacacaatggatccggaagctccgggcacactgatttccaacgacacggaaaaaggtaaaatcaaggcagtagccgcaaaagaaaacattactgcgatcaagatcaaatccagccgtatgttattggctcacggtttcctgcgtaaggtattcgaaatcttcgaaagctatcagacgtctatcgacatgatctgtacttcagaggtaggtgtatctgtaacaatcgataacacgaagcatctgaacgagattctggatgacttgaagaaatacggaactgtaaccgttgataaagagatgtgtatcatctgcgttgtaggtgaccttgaatgggaaaatgtcggttttgaagcgaaagctcttgatgcgatgcggaatataccggtgcgaatgatctcgttcggaggaagtaactacaatatttccttcctcattcgggagtgcgataagaaagtagctttacagtcgttgagtgatatgcttttcaacgacaaataaatccacaaataacacgagcgcttttaccgaactgataaaagcgctcttttttaaccaactaaacaagtttttcgaattatgaagggaatatttccaatcgataaattccgcactttgcagacacctttctattattacgataccaaagtgctgcgtgatacattgtcggctattaaccaggaggttgccaaatatcctaattattcagtgcattacgctgttaaagccaatgccaacccgaaagtacttaccattatccgtgagagcggaatgggagccgattgtgtgagcggcggagaaatccgtgccgctatccgtgccggattccctgccgataaagttgttttcgcaggagtcggcaaagcagattgggaaatcaatctcggactggagtatggcatcttctgtttcaatgtcgagtctatccccgaattggaagtaatcaatgaattggctgccgctcaaaataagattgctaatgttgctttccgtatcaatcccgatgtcggcgcacatacacatgccaatataactaccggtttggcagaaaacaaattcggtatcagtatgcaggacatggacaaggtgatagacgtagcacaagagatgaaaaacgtaaagtttatcggtcttcacttccacattggctcgcagattctggatatgggtgattttgtagccctctgcaatcgtgtcaatgagttgcaggacaaactggaagcacgaagaattttggtagaacatatcaatgtaggtggtggtttgggtattgattacggacacccaaaccgtcaggctgttccgaatttcaaggattactttgctacctatgccggacaattgaaattgcgtccttatcagacactgcattttgaactgggacgtgcagtggtaggtcagtgtggttctttgatatccaaagtcctctatgtaaaacaaggaacacggaagaaatttgccatccttgatgcaggtatgaccgacctgatccgtccggctttgtatcaggcattccataaaatggaaaatataacttctgaagaaccattggaagcctacgatgtagtaggaccgatctgtgaatcgtcagacgttttcggaaaagcgattgacttgaacaaagtgaagcgtggtgacttgatcgcccttcgttctgccggtgcgtacggtgaaataatggcttccggatataactgtcgtgaactgccgaaaggatatacttccgacgaattggtgtaagtaaaaaatgaactgctataatcaaaatgtgaatgtagtttaaaaatatagggtgcatggaacaattttaactgaaagcgtgttatttttgtaatgagttcaaaaagaaactacattaacaacttaataaaaaaatacgattatgatttcagaaaaattacagaatgcaattaacgaacagattactgctgaaatgtggtctgctaacctgtatttagcaatgtctttctattttgagaaagaaggtttcagtggttttgctcattggatgaaaaaacaatcccaggaagaaatgggacatgcttatgcaatggcagattatatcatcaaacgtggaggaactgctaaagtggataaaatagatgttgttcctaacggatggggtacacctctcgaagtattcgaacacgtttacaaacatgaatgtcatgtttctcaattggtagacaagctggtagacgtagcagctgctgaaaaggataaagcaacacaggatttcttgtggggatttgttcgtgaacaggtagaagaagaagctacagcgcaaggcattgttgataaaatcaagaaagccggtgatactggaattttctttgtagattcacaattgggacagcgttaatgatgctactctgaaaaaatagttctttatatagaaagaagctactcgaaatttcttcaagtagcttcttttttttcacttatttggctcgtatctggaaataaactacctttgtattaagagtcagagagaaattaatcccgattattataaatgaatggtgtgaatagaggaatttttagattgctccctatatttttattgctctttttgggggtgagcagttgttctcaaaaagaggaacggcgtattttagttatccactcttatgaggagacttacgcggcttatccggaatttaaccggatgatagcggagcaatttgagaaagagaaaatagatgctgatatccgtaccgtttatttagattgtgagtcctattgggaagaaccggagttggaacgaatgcgttttctggttgattccgtttcgaaagactggcggccggaagtgattctggtgaatgaagaccaggctacctattcattgatgaaatgtggggtgcagttgggcaaagaagtacctgtggtttttggtggtgtcaattacccgaattggggattgctgaaacgccatcctaatgtgacgggtttccatgataagatcgcctttaatgaaaatgtcagtgtggcaaaagaacttttcggtgaacacgtccggttgtttaccatgctcgataccacttatatcgataaacaaatcagaagagatgcaaaggaacagtttaaaggtcataaagtgaccggattcattgataaccccgaactttctcctgaagaacagatacgtttgacgcaggaagaaggttatactcgtttcatggctattcctttgcgtaatgccagaaatcattcggatgccacctttatgtgggtgttgaacagaagctatcgcgatcaatgttatattcagctgaaacgtgattatactaccattaatattggaagcatttgtggtagtcccagcttgacagctatcaatgaagccttcgggtttggtgagaagttgctgggtggatacatcacttcgttgcctattcaggtggaagaagaggtgaaagcagccgttcgtatattacacggtgcgagtccggcggacatgcctattgttgaaagccggaaagagtatgttgttgattggaatacaatgacgcaaataggtttgagtaaggaaagtattcctgctaaatatcgtattatcaatattccgtttagtgataaataccctttgttgtggggaatttcagtcgcatcgttcattcttgtattaattattcttttcgcttctctttggtggctataccttcgggaacagatgaggaaaaagcaggctcttatagcattggctgatgaaaaagaaacattgtcattagccattgagggtggaatgacgtatgcctggagattggataacggttgttttgtttttgaagatgcattctgggcgtcgcaagggttaaatcccagacaactttcgtttaaggaattcatgagctttatccatcccgaccattgggaaggagtgaagttcaactggcgaaatctgaaaagtgctcataaaaagattgtgcaggagctttgtaacttcgacggcaaaggctatcagtggtgggagttccgttataccaccaaacagctacccggaggcgaatataaaactgcaggtttgttgcttaatatacaggatataaaagatcgtgaagaagaattggaagcagcacgcttattggctgaaaaggcggaattgaaacaatcattcctcgcaaatatgagccatgagatacgtactccgcttaattcaatcgttggctttgccaatatactggcattggaagatggattgagttccgcagaacgcgaagagtacatcagtactattaacaagaacagtgagttgttactcaaactgattaatgatatcttggaactttcccgtatcgaatcaggatatatgtctttctcattcaagagatgcaaggtgagagagttgattgacgatatctatatgacacatcaggttctgattgctccacatttggaattcctgaaagaagtggataatacacctttggaaatcaatgtggacagagagcgcttgatacaagtcctgacaaactttctgaataatgctggtaagtttacggaaaccggatatatcaaattaggatatagttatctgccggatgaaggcaaagtgcagatttatgtagaagataccggaagagggattccacgagaagaacaacggatgattttcagccgtttctacaaacaaaacgaattttcgcagggagcaggattggggctttctatttgtcaggtgattatagagaagctgggtggaaagatcgaactcaagtccgaagtaggcaagggaagccgttttacggttattcttccttgtcgggtggtatcttgataatgatagactttaacgggaatacgaacaatcttatttcttgtgtttccctttctccatcgttcccaggtaaatctccagtgaacgggtggaaatctgtatttcgcggaaagatacgcctaaagaagctatcagcagaatcaatgccaatccgaatacataagcagagaataattgaagcccgatataaataaggaacatgctgactacacagaaaaaaaggcttgcaatacctagtccttgcatcctacgggtcaggttcaaccgtttccgtagattctcgatttgcgcttcagtgatatccgaagggttttccatgtagcggtcacgcagttgacgcacaagttgggcatacgataagaaacggttggtataagccagcaatatcaatgaaactgccgagaaaagtagggcaggagtagtgagagtcaattcttccataatcttttttttatagtcaagtagcggttcaaaattcattttataaaagagaattttttggcacgggttacacggatttcacggttttcacggttttagaaatatgcttgcataaagcagcagcgtaatctgtgtaatccgtgcctaaaaatggatgctgcaagtaaaccttgccccggagttattccgctttcagcacattaagctctttgcctaccttgataaaggcagcgatgcacttgtcaagatgtgctttctcgtgtcctgcagagatttgcacacggatgcgtgcctgatctttcggcactaccggataatagaaacctgtcacatagatgccttcctcctgcatacgtgcagcgtaaatctgggacaacttcgcgtcatacaacataacggcacagatagcgctttgtgtcggtttgatatcaaatccggcagccgtcatcttatcacggaagtagtttacattctcaacgagtttatcatgtaatgcattgctctctttcagcattttgaaaacttcaaggctggcaccaatgatgcccggagccaaagaattcgagaacagatacgggcggctgcgttgacgaagcaaatcgataatctctttacgaccggtggtgaaacctcccagtgcaccgccaaaagccttacctaatgttccggtataaatatctacccgtccatgagtcttatacaactcgcttactccatgccctgtggcacctaccacaccggcagagtgtgactcgtccaccattaccagtgcatcgtatttctcggcaagatcgcaaatctgatccatcggagctacattgccgtccatagagaacacaccgtccgtcacaacaatacggaaacgttgtgcctgcgcttcttgcagacatctttccaagtccttcatgtcagcgttggcataacggtagcgctttgccttgcaaagacgtactccgtcaatgatagaagcatggttcagagaatccgagatgatggcatcctcttcagagaaaagcggttcgaatacaccgccgttagcatcgaagcaagcggcgtacaagatcgtgtcttccgtctggaaatattccgagatggcagcttccagttctttgtgtatatcttgcgttccacaaatgaagcggacggacgacattccgtagccacggttattcatcatttcctgcgaagccttaatcaatcgcgggtgattggataatcctaagtaattatttgcgcagaagttcagcacttccttaccttttacagtgatggcagcttgctgcgcactttcaatcagtcgttcttctttataaagtccggcttccttgatttcagccaatgtttggcagagatattcttgcattttaccgtacatagtgtttgggtgattaagttatattgcaaaggacacaatttttcttggaataacaatgtctttttgattaaaatctgaaaaaaaagtgcttactttgcgcactatttaagcttgatattctaagtcagaagaaaaaatggaacacattttgattattggagctaccggacagatagggtcggagctaacgatggagctacgtaaacgttacggaaatgcaaatgtagtagcaggttatattccgggtgcagaacctaaaggggaattaaaggagtccggaccgtcggcaattgctgatgtaacggatggagaagcgatcgcatctgtggtaaaagagtatcacatcgatacaatctataatttggctgctctgctgtccgtagttgccgagtcgaaacccaagctggcctggaaaataggtatcgatggattatggaatgtattggaagtggcacgcgaacaaggatgtgcagtgtttactccgagttctatcggttcgtttggcgctagtacgcctcatacgaaaacaccgcaggacactattcagcgtccgcgcaccatgtatggagtcaccaaggtaacgaccgagttgctaagtgactactattttaataaatatggtgttgatacccgtgctgtccgttttccgggcattatttcgaatgtgacccctccgggaggaggtacgaccgattatgctgtcgatatttattactcggcggtgaaaggagaaaaatttgtgtgccccattaagcaaggcactttgatggatatgatgtacatgccggatgcgctgaacgcagcaattatgctgatggaagctgatccgacaaaattgatacaccgaaatgctttcaatatcgcctcgatgagtttcgacccggagacgatttatcaggctatcaggaagcatgtgccgcagtttgagatgatctatgatatagatcctttgaaacagcgcattgccgatagctggcccgatagtctggatgacacctgcgctcgtgaagagtggggctggaagccggcctacgatttggaaagcatgacggtagatatgcttgaaaagttaagagagaaactaaaataatgaaaaaactaattgtaggggtcatgttgctcggtatactgggtgcttgtggaaacaagaaaacaaacattgaccccttcgcatctatcacaaaagaagtggattctatccggcgggtagccgattctattcactgtgatgaatcgccggaagatccgcaacctatacaggcagatgaatctttcgatgattttatctacaattttgcttccgatgacgtgttgcagcgtcagcgtgtgaaatttccgttgccttactacaatggagataaaaaaacgaatatcgaggagcataactggaagcatgatgacttgtttaccaaacagcattattatacgcttctgtttgatagagaagaagatatggatttagtaggagatacctccctcacttccgtacaggtagaatgggtgtttgtgaaaacacgaatggtaaagaaatactattttgagcgtatcaaaggtgcatggatgctggaggcaattaatctgcgtcccattaagcaaaatgataatgaaaatttcgtggagtttttcggacactttgccgcagatagtctttttcagagtaagcgtgtgtgtgagcctctggcttttgtaaccaccgatccggacgatgatttctctattctggagaccaccctcgatcttaatcagtggttcgcttttaaaccgggacttcctgccgatcgtctttctaatatcaattacgggcagcggaatgacgatgattcgccaacgaaaattctggcgttgaaaggtatcggtaatggtttttctaatatcctctatttccgtcgcaaagccggagaatgggaattgtataagtttgaagatacaagcatttga

SEQ ID NO: 51 - DNA, 9991 bp, unidentified
  source 1..9991: mol_type = unassigned DNA
  misc_difference 5944: note = a, c, g, or t
  misc_difference 5945: note = a, c, g, or t
  misc_difference 5946: note = a, c, g, or t
  misc_difference 5947: note = a, c, g, or t
  misc_difference 5948: note = a, c, g, or t
  misc_difference 5949: note = a, c, g, or t
  misc_difference 5950: note = a, c, g, or t
  misc_difference 5951: note = a, c, g, or t
  misc_difference 5952: note = a, c, g, or t
  misc_difference 5953: note = a, c, g, or t
  misc_difference 5954: note = a, c, g, or t
  misc_difference 5955: note = a, c, g, or t
  misc_difference 5956: note = a, c, g, or t
  misc_difference 5957: note = a, c, g, or t
  misc_difference 5958: note = a, c, g, or t
  misc_difference 5959: note = a, c, g, or t
  misc_difference 5960: note = a, c, g, or t
  misc_difference 5961: note = a, c, g, or t
  misc_difference 5962: note = a, c, g, or t
  misc_difference 5963: note = a, c, g, or t
  misc_difference 5964: note = a, c, g, or t
  misc_difference 5965: note = a, c, g, or t
  misc_difference 5966: note = a, c, g, or t
  misc_difference 5967: note = a, c, g, or t
  misc_difference 5968: note = a, c, g, or t
  misc_difference 5969: note = a, c, g, or t
  misc_difference 5970: note = a, c, g, or t
  misc_difference 5971: note = a, c, g, or t
  misc_difference 5972: note = a, c, g, or t
  misc_difference 5973: note = a, c, g, or t
  misc_difference 5974: note = a, c, g, or t
  misc_difference 5975: note = a, c, g, or t
  misc_difference 5976: note = a, c, g, or t
  misc_difference 5977: note = a, c, g, or t
  misc_difference 5978: note = a, c, g, or t
  misc_difference 5979: note = a, c, g, or t
  misc_difference 5980: note = a, c, g, or t
  misc_difference 5981: note = a, c, g, or t
  misc_difference 5982: note = a, c, g, or t
  misc_difference 5983: note = a, c, g, or t
  misc_difference 5984: note = a, c, g, or t
  misc_difference 5985: note = a, c, g, or t
  misc_difference 5986: note = a, c, g, or t
  misc_difference 5987: note = a, c, g, or t
  misc_difference 5988: note = a, c, g, or t
  misc_difference 5989: note = a, c, g, or t
  misc_difference 5990: note = a, c, g, or t
  misc_difference 5991: note = a, c, g, or t
  misc_difference 5992: note = a, c, g, or t
  misc_difference 5993: note = a, c, g, or t
  misc_difference 5994: note = a, c, g, or t
  misc_difference 5995: note = a, c, g, or t
  misc_difference 5996: note = a, c, g, or t
  misc_difference 5997: note = a, c, g, or t
  misc_difference 5998: note = a, c, g, or t
  misc_difference 5999: note = a, c, g, or t
  misc_difference 6000: note = a, c, g, or t
  misc_difference 6001: note = a, c, g, or t
  misc_difference 6002: note = a, c, g, or t
  misc_difference 6003: note = a, c, g, or t
  misc_difference 6004: note = a, c, g, or t
  misc_difference 6005: note = a, c, g, or t
  misc_difference 6006: note = a, c, g, or t
  misc_difference 6007: note = a, c, g, or t
  misc_difference 6008: note = a, c, g, or t
  misc_difference 6009: note = a, c, g, or t
  misc_difference 6010: note = a, c, g, or t
  misc_difference 6011: note = a, c, g, or t
  misc_difference 6012: note = a, c, g, or t
  misc_difference 6013: note = a, c, g, or t
  misc_difference 6014: note = a, c, g, or t
  misc_difference 6015: note = a, c, g, or t
  misc_difference 6016: note = a, c, g, or t
  misc_difference 6017: note = a, c, g, or t
  misc_difference 6018: note = a, c, g, or t
  misc_difference 6019: note = a, c, g, or t
  misc_difference 6020: note = a, c, g, or t
  misc_difference 6021: note = a, c, g, or t
  misc_difference 6022: note = a, c, g, or t
  misc_difference 6023: note = a, c, g, or t
  misc_difference 6024: note = a, c, g, or t
  misc_difference 6025: note = a, c, g, or t
  misc_difference 6026: note = a, c, g, or t
  misc_difference 6027: note = a, c, g, or t
  misc_difference 6028: note = a, c, g, or t
  misc_difference 6029: note = a, c, g, or t
  misc_difference 6030: note = a, c, g, or t
  misc_difference 6031: note = a, c, g, or t
  misc_difference 6032: note = a, c, g, or t
  misc_difference 6033: note = a, c, g, or t
  misc_difference 6034: note = a, c, g, or t
  misc_difference 6035: note = a, c, g, or t
  misc_difference 6036: note = a, c, g, or t
  misc_difference 6037: note = a, c, g, or t
  misc_difference 6038: note = a, c, g, or t
  misc_difference 6039: note = a, c, g, or t
  misc_difference 6040: note = a, c, g, or t
  misc_difference 6041: note = a, c, g, or t
  misc_difference 6042: note = a, c, g, or t
  misc_difference 6043: note = a, c, g, or t
ttagctgttagttttgtttagccagtcgtagaaggtgtattgggctcggacggcaggggtgccgggtgttctttttttgaatatgttttgcagcttatcatctacccagcaggctttttggttgtcggcaagctggatattaagcatttcgatgaggctgtcacgcaggtcgggggcgagaatgggggtgatggcttcgatgcggcggtagaggttacggcgcatccagtcgggagagcccatgaatactttgggggtgccgtcgttgccgaagtaccagatgcgggcgtgttcgaggaaactgtctacaatacgggtgacacggatgttacgactgtatgactgtccggggatgaggcagcagataccacggacgataagatcgatttgtacaccgtgttcggaggcttcgtagagacggtctatcatggtagggtcttggagggcgttcatttttaggatgatgcgtccttgcttgccttcgtctgcgagggatatttcgcggtcgatcaggcggttcaattcggggatgaggttgaaacgggctaccaaaagggtggtgaacttcgggtcttcttttccttgcagggtacggaagaggttatagaggtcggccactatttctttgcgacaggtgaaaaggccgcaatcggcgtaaagggtggcggttttttcgttaaagttgccggtgctgatgtaggcgtagctggggattttctcaccgtttaatccgcgacgacggatcagggctactttggcgtgcactttcaaaccagggatgctgtagattatcttaataccggcggcttgcatcatttcggcggtggcaaggttgttttcttcatcaaagcgggctttcagttccacaaatacggtgactttcttgccgttttgggcggcggctatcagggtgttgatgacggcggagttttccgctacgcggtattgagttaccatgatttcacgggtttccgggttgtgcacggcttcatataggaagtggataaagtgctcgaaagagtgataaggataatataataacaggtcctttttggcgacgtaattgaaaatggattctttctcatcgaggacggtcagcttcatcggcttcggtttttcgaggctatgaagggatttgttcgggttgggaagatgacgcaggtcttcgaggttcaaatgcttatcaccggggacaagttcgtcacgctgaatacggaaggcatccacaaggaagtccaagaattcagaaggcatagcacggtcgtagacaaaacggcagacgtcaccgatcttgcgtttcttcactttcttcttgagttgggcgacgaggtcggcactgctggcggtgtcgtcaatcagtatatcagcatcacgggaaattttgatgcagtagctggaatcaacgtcgtagccggggaaaatcaggttgaggtttgccttgatgatgtcttcggtaaacatcaaataatgatttttctcgcgagacggaagttcgatgaagcggggcactttggcgtagggttgtttcatcacaaagtaaagggggtgtcggaggtctgttacatttggccttgctgcttccatacctacttttataccttctccgtcatttctttcatttatgcactctccggtatatttttctatattttctttaggttcttctcctttgtttttttcttctttcttcggatagactcgtattgccaggtaaaggcggttatcccgcaggaaggagacaattttatctttggatacaggcacaggttgcaggtagggaaagatttcctcccggaaaaagtctttgataaactgttggtggaacggttctacatgattgtcctgataaaagatgatatgatttttgcgcagggcaggcagtattttttgctcatagatgcgtacacggtcatccagctggcgggtgacttctttatttatttcctctaccagttcgcgggctgactgtacggtttcttcatcgctttccgtagcgccggaagcaacagctttatggtcggctacacggattttgtaaaactcttcgaggttggaagagtagatagagatgaagttgatacgttcgtaaagcggcagacgctcgtccagagcctccaacaatacgcgataattgaatgagagccaacttatatctcgcttgaaataattatatttgctttccatgtgctttaagatttttccaaatatagtatctttgtgggattaaacaaagaattttatgacaagaattggattattatctgatactcacgcttactgggatgagaaatacctggaatatttcgaaccgtgcgacgaaatctggcacgccggagacatcggttcactggaagtagcggaaaagttagccgcattccgtccattccgggcggtgtacggaaacattgacggacaggaaatcagaaaactgtatcctcaaataaatcgtttcacggtggatggtgcagaagtactgataaaacatatcggcggttatccgggaaagtacgatccttccatcatcggtagtctgatgacgcgaccgcccaagctttttatcagcggacattcgcatatattaaaggtgaagtatgataaaacgctggatatgttacatatcaatccgggagctgcaggtatgtctggtttccataaggtgcggactttggtgcgttttgttatcaatcaaggggcgtttcaggacttggaagttatcgaactggcggacaaataaaataaatgtccccgcctgactgaaaaattattttaaaattttgccacgtcggaattctttccgacctttgcacactgttaatgaataactcagacgaacatgaaaggaattattctggccggtggtagtgccacccgactttatccgctttccaaagcgatttccaaacaaatcatgcctgtgtatgacaagccgatgatttactatccattgtcgacactgatgttggcaggaatacgcgaagtgttgattatttcgactccacgtgacttgcctatgttccgggatttgctgggaacgggtgaggagctgggtatgtctttctcctataaaatacaggaacaacctaacggactggcacaggctttcgtattgggagccgatttcctgaacggtgaaccgggctgtctgattcttggggataatatgttttacggacaaggcttttctgccatgctccgccgggctgccaatatagaaaaaggcgcctgcatcttcggctactatgtaaaagacccgcgcgcatacggtgtagtggaatttaacgaacaagggaaagttatttcactggaagaaaaaccggaagtgccgaaaagtaattatgccgttcccggactctatttctatgatgccagtgtgacggaaaaagcggcagctcttcgtccttcagcacgtggagaatatgagattacagacctgaatcgcctgtatctggaagaaggcacattgaaagtggaactcttcggacgcggattcgcatggctggatacgggtaactgcgacagtctgctggaagcatccaacttcgtggctactattcagaaccggcaaggtttctacgtcagctgtattgaagaaatcgcctggcgtcagggatggattccgacggagcagttgcttctgttaggtcaacaactcgaaaagaccgagtatggaaagtatcttatcgaattggcaaaacaatcctaaaatcaacataatagaataaaatatgaaaacttatctagtgaccggtgccgcaggatttatcggggcaaattacatcaaatacatcttggccaaacataacgacatcaaagtcgtgatattggatgctttgacgtatgcaggtaacttaggaacgattgccaaagacatcgacaacgaacgctgtgtctttatcaaaggagacatttgcagccgtgatgtggtagacggtctttttgctgagtatcgttttgattatgtggtgaatttcgctgccgaaagtcacgttgaccgcagcattgaaaatccgcaactgtttctgattaccaacattctcggaacacagaacttattggattgtgcacgccgcgcatgggtaatgggaaaagatgaacaaggataccctacctggagaaaaggtgtacgctatcatcaggtatccaccgacgaagtgtatggttcactgggagccgaagggtatttcacagaaacaaccccgctttgtcctcacagcccgtacagtgcctctaagactagcgcagacatggtagtgatggcttaccatgatacttataaaatgccggtaacaattacccgctgctcaaacaactatggtccgtaccatttcccggagaaattgattccgttgattatcaagaatatcctcgaaggaaaacatctccccgtctacggtgacggcagtaatgtacgcgactggctttatgtagaagatcactgcaaagcgattgatctcgttgtacgtgaaggtaaagacggagaagtgtacaacgttggcggacataacgagaagacaaacctcgaaatcgtaaaactgactatttcaactatccaccgtctgatggcagagaatcccgaatatcgccaggttctcaaaaagaaggtgaaagacgaaaacggaaatatttcgatcgactggatcaatgaagatctgattacgttcgttaaagaccgtctgggacatgaccaacgttacgccatcgatcctacaaagattacaaatgctttaggatggtatcccgaaacaaaattcgaagtcggtatcgtaaagacaatcgaatggtacttggccaaccaagcttgggtggaagaagttaccagcggagattatcagggttactacgaaaagatgtatgggaaatgattctcaacttaccaacattcctattgcaataagaacacccataaacagcatattacgagaagtctcgcctaatatgctgtttaattttttaccactatatattttcaccatccgtttccaggtgaggaaatgaggaatcaaatagagttgcggaagaagagcggctaaaaaatgaccttcacgaaggaaacacagacagagaagagaagctgtaacacccagcatcaaataaaaatagcgaccgaacttctcaccgaaacgaacaattaccgttctttttccactgcgcgcatccgcttcccggtcacgatagttattgactaccagtagcgtatcaatcaatagtccacaaatcagagaggcgatagtgacatccggcgtccatgttaacgcttgcacgtaatatgttccgccaacaggcacaaatccaaagaaaacaatcaccagtacatctccccagccgttgtaagagagaggataaggaccagtggtataaagaaaggcgaataatacacaaagcactcctacgacaatcaattcccatccggcaaagaaaagtaatgtgcaaccgataagacaggcaagagcaaccgtaataataatcccggttttcatcgcttgcggagaaatccatccctgtgcacaagcacgttcgggtcccaggcgatcttcccgatctgtccctttgaggaagtcgaaaaggtcattgatgaaattagcggcaatttgcatcagacttgcgaacagacagcagatcagtgccggcaaccagtgaaaatgcccgtccatcgcagcgagagctgtacctatcagaacaggggtaacggctcctgtaagagttttgggacgtgcagctaatatccatgcttgtagcgagttacgctttacttcttccatactttaatatattataaagagttttgacggacaaagatacatgatttttcgtatctttgcaccccagaaaacttcaaactaagagaagatgaagaaaataaatgctcctgtgatggagaaaataaataccccattgatgaagaaaacgatttatccactgacgaagaaaacaatctaccctgttnnnnnnnnnnnnnnnnnnnnnnnnnnnnnnnnnnnnnnnnnnnnnnnnnnnnnnnnnnnnnnnnnnnnnnnnnnnnnnnnnnnnnnnnnnnnnnnnnnnncccattgatgaagaaaacgatttatccactgacgaagaaaacaatctaccctgttatcctgttggcattgcttttgcttgtttcctgcaaatcgaaaaagaatatggtggctagcttgccgcaccctgtcttacatactgattccatttatccggatacgactaacgccattgccggactcttcgctcccgaccactcgaaactcaaagcactggctgtttctaaaaacaaaaagcaacatacaaagaaaaaggagactgataccgacgcggacaaatccgaccggatgctccgtggaaccccaataacctcttccagcgtagatgtgtcatctgtttatacaggagtggatcgtgtagtaaaatacgacttcacccaccgcgatgtccctgaagcttttgaaggtttccgcatcgcttttatttccgatttacattacaaaagcctgctgaaagagaaaggattgaacgatcttgtccgtctattgattgcccaaaaagcagatgttcttttgatgggtggtgattatcaggaaggttgcgaatatgtagaacctttgttttccgcactggcacgtgtaaagacaccaatgggaacctatggagtgatgggtaataatgattacgaacgttgccacgacgatattgtgaacacaatgaaacattacggtatgcgtccgttagaacacgaagtggacacgctgcgtaaagatggccagcagattattatcgccggagtgcgcaatcctttcgatctggggcgcaacggagtatcacccactttagcactctctcccaaagattttgtcatcttactagttcatacgccggattacatagaagatgtttcagtagccaatacagacctcgctctcgcaggacatacacacggcggacaagtccgtgtattcggagtcgccccggcactgaactcacactacggcaatcgttttatcaccggactggcatataatacagcaaaaattcctttaattataacaaacggaataggaacttcaaagttaccgatccgtgtcggtgctccggcagaaatcatcgtcattactcttcatcgattgacggagtaaggtatcgtaacttggtacaataacaaacagaaatagcagcatcatacacttttctgatacgactttctgtaacatactacacttttaggatacgactttctgttaaatactacacttttagggtacgactttttgttattatcctttttagtgcttacatttgtacctataagtagctgacaataaaagaaagaagtatgagaagaaatgcaatgcaacaattgtacgattggaaagaaaagtctacacgaaagcctttgattattcgcggagcccgtcaggtaggaaagacatggcttatgaaagagtttgcggctactgcttacaaacagtttgcctacatcaacttcgaagacaatgaagtgatgaaagaggtttttcaaaaagattttgatatcgaacgtattttgatggctatccagttagtaaccggaaaagtagtagatacagataccttaattctttttgacgaacttcaggaagccccacgcggcttgacagccatgaaatatttcctggagaaagcgccacagtatcatgttattgcagctggttctttactgggcatcgctatgcatcaaaatgactctttcccggtgggaaaagtcgattttatagacctatatccactttctttttccgagtttttagaagctatcggacaagagtcttttgtcagcttgcttgcaaagcaagattggaacctcatttctaccttccgttctaaattcaccgacttccttaaacagtattatttcgtaggaggaatgcccgaagtagtcaatgcatttattgagcataaagactataccgaagtccgccagttgcaacaaaacatactggattcttatgaccgtgatttttccaaacacgctcctattgccgaagtccctaggattcgtatggtgtggcgttcggttcctgcacaactggctaaagaaaatcgcaaattcatttatggagttataaaagaaggagcaagagccaaggattttgaactggccatagaatggctgatagatgccggtcttatttataaagtaaaccgggtaaagaaaggtggaatacctttatcggcctacgaagatttttccgcattcaaactgtttatgctagacaccggattaatgggagcaatgagcggactccccccacaagcattattggaaggcaatgttttatttaccgattataaaggagcaattaccgaacaatatgtgttacaacaactgaaatcagtgaaaggcttgaatatctattactggtcttcagatacttccaaaggagaattggatttccttttgcaaaaagaaatctgtattattccggtcgaagtgaaagctgaagaaaatttacagtcgaaaagtctgcgctcttttgttgaaaagaatccagaactacatggcatccgtttttccatgtcagattatcgggaacaagagtggctgacaaattatccgttatattctgccggacacatattataatatattcaaaggcgtatattatctttcttaatagcctcccaagctctcggatgcaggaagtaacgaatatctttccctgcactcaaggcttcccgaataaaagtggaactgatttcaaaaacaggggaatgaacgagacgcacggtttccggcaattcctcttcttttaccggaaagccgggacgaggataaatgaggagttgattctctttaatgatgcgttcggactgataccagcgtccaaaacgttcccaattatcggaaccgataatgaaataaaattcccggttaggatacgtttcacgaagtttttccagtgtatatacgctatacgaaggacggggcaaatgaaattcaaagtctgaagctcgaaaacgaggataatcactgatggataactccactaattgaagacgaagctcgtcgctccataactctaccttcgttttcaaaggattctgcggacttaccataaaccatatttcatccaacccttcatactcacaaaggtaattggctaaagcgagatgcccgatatgaatcggattgaatgacccgctgaagattccggtttttcttgttttaacttgattcattttccgctattctttcttgctttattttctttctccacttcggtaaaacaatagcttgtctgattgtgagaagtagcgcaatgccgcttatgaaccattgttgaaaataaaggcatacaataaaagcaagaagattcatcacaccggtgacggcacacagatacatccattttcgggtgttacaattcttcttgtacattctcaagtcttattcttcggctaaaaactctttgattactttcaacgcttctgccttcgctgcttccaaatcgtcattgacaatcacacaatcgaattgcggagcaaagcccaattcatattccgccttagcaatacggctttcaatgatttccggggcatccgttccgcgcccttctaaccggcaacgtaattcttccaccgaaggcggttgaatgaacactgacaacgcacggtcaccataaaacttcttgatattacatccacctaccacatcaacgtcaaacacaacattctgacctgcttccagttgcttttccacttgtgccttcaatgttccgtaataacggtccttatatacttcctcatactccaaaaattcgttgttctcaatgcgacaacggaattcctccggcgtaagaaagaaatattccactccgtgctgctccgtaccacgcggaggacggctggtagcagaaatagaaaatgcaagattcaaattctgcgtcagcagataattgataatagtagatttgcccgaacctgacggggcagagaaaataattagtttaccggtcat

SEQ ID NO: 52 - DNA, 13949 bp, unidentified
  source 1..13949: mol_type = unassigned DNA
atgaaagtagtaatcctggctggcggccttggcacgcgcatcagcgaagaaagcgtctacaagcccaagccgatgatcgaaatcggcaacatgcccatcctgtggcatatcatgaaggaatattcctactacggctttcacgactttgtcatctgcgcgggctacaagcagcacatgatcaaggagtggttcgcggattacttcctgcataccagcgatattacgtttgatttcacccgcggccagaacgagatgatcgtccacaaccaccacaccgagccgtggaaggtcaccgttgtggacaccggcctcaacacgatgaccggcgggcgcatcaaacgcattcgtccctacatcggcaatgagaccttcatgatgacctacggcgacggcgtctgcgatgtggacattgccaagctggtggcattccaccgcgagaacggcaagatcgccacgctgaccgccgttcagcaggagcagcagaagggcgttctggatattgccgaggataattctgtccgttctttccgtgaaaagaaggccagtgacggcgcgcttatcaacgcgggctatatggtgctggagccgcagattttcgactatctggacggcgacgcctgcgtctttgagcagaagccgctgcagaagctggccgaggagggtcagctgatgagctatatccacaagggcttctggcagtgcatggacaccgcccgcgaaaagcaggtcctggagaaaatgcttgccaccggcaacgcgccctggaagaagtgggaggattgatgatggtacattacgatcctgaattttaccgcggcaagcgggtgttcgtcaccggtcacaccggtttcaagggcagctggctctgcaagatgctgctgatggccggggccgaggtcacgggctacagcctgcagccgccgacgcagccgaaccttttctccatcgccggcgtggaggacaagatgcacagcgtcatcggcgacatccgcgactttgacgcgctgaaggccgcttttgacgcggcacagctcgacattgtgctgcacctggccgcgcagcccatcgtgcgtgacagctacaaggacccgcgctacacctatgagacgaacgttatgggtacggtcaacctgctggaatgtgtgcggctggccctgcagcagggcagagcgccccgctcggtgctgaacgtcaccaccgacaaggtctaccacaacaacgagtgggcctggggctaccgcgagaacgagccgctggacggtttcgacccctactccaacagcaagagctgctcggagctggcgacgcactcctacatcaacagcttttttgccgataaggctgtggctgtctcgacggcccgcgcgggcaatgtcatcggcggcggcgactttgccaatgaccgcatcatccccgactgcgtccgcgccatggccgcgggccgtaagatcggcgtgcgcaacccctactcgacccgcccgtaccagcatgtgctggagccgctggcggcctacctgctgatcgcccagcgccagtacgaggacagccgctttgcgggctactataatgtaggccccgacgactgcgactgcgtcaccaccggcacgctggtggatctgttctgccgggcctggggcggcgacgccgcctgggagaatcaggccgaggccaatgccccgcacgaggccaacttcctgaagctggactgcagcaagctgaaaacgaccttcggctggacgccgcgctggcacatggccgagtgcatggaaaagactgtcgccttcagcaagatctggcttgccaacggcgacgtcccggcggagatggaaaaggaaatcaatatttttttggaggagcaataattatgtggaagaacgaggcagaagcccgcgagcagatcaaggcgatggtcgccgagtattatcacgacttcaaggagaaaaaggccccttatcaggagggtgaccgcatcacctacgcagcccgcgtctttgacgagaaggaaatgtgcgccctgactgacgccacgctggacttctggctgacgacgggccgctttgccgaccagttcgaaaaggagttcgctaagtggatcggcgttaagttcgcccatctggtcaacagcggttcctccgccaatctgatcgccttcatggcgctgaccgcccccgagctgggtgaccgccagatcaggaagggcgacgagatcatcaccgtggcctgcggcttccccaccaccgtgaccccggccatccagtacggcgcggtgcccgtgtttgtggatgtgaccgtgccccagtacaacatcgacgtcaccaagctcgaggccgccctctcccccaagacgaaggctgtcatgatcgcccatacactgggcaatccgtttgacttgtccgcagtcaaggcgttctgcgatgcacataatctgtggttggtcgaggacaactgcgacgcgctgggcacccagtacaccatcaacggcgagacccgctttaccggcacctggggcgacatcggcacgtccagcttctacccgccgcaccacatgacgatgggcgagggcggctgcgtttacaccaacaacccgctgctgaaccgcctgatcctctccttccgcgactggggccgcgactgcatctgcccctccggccaggataacttctgcggccaccgctttgacggtcagttcggcgagctgcccaagggttacgaccacaagtacgtctacagccactttggctataacctcaaggtcaccgacatgcaggccgccatcggctgcgagcagctgaagaagttccccaccttcatcgagcgccgccgccacaactgggaccgcctgcgcgccgcgctggagcccgccgccgacaagctgatcctgccggagccggctgccaacagccgcccgtcctggttcggcttcctgatctccgtcaagccggagagcggcctggaccgcaacgccgtgacccgctatgtggagagccacaacgtgcagacccgtctgctgttcagcggcaacctcatcaagcacccctgctttgaccagatccgcggcaccgatgcctaccgcgttgttggcgaattgaccaacaccgactttatcatgaacaacaccttctgggtcggcgtttaccccggcatgaccgatgagatgatcgactacatggccaagacgattatcgaggctgtgaatcagtaaaattttgacaacgaggtacggacccctatgatgcagcaaaaagtgaaaacgacccgcgcacccggactgcggttggacaaaaacaggcggctgacgcctatgcagatttactgctgggcgacggtggcctgtctggcggtgctgctgcttgccctgctggccagccgtggtgcgctgctgcatcaattcttcttttatgatgtcaccgataccggtatggactttttccatagtattgagtatatgcgtggacgtatgccctacggacagttcgatacgctgtacccgccgcttgcaaatctgtttttctatgtgttgtatttgcttgtgccaaagacacaatcagatacctggacggaatcgtttatctcgtctctcaacatgaagggaacagaacgggatttgcgtttacagcaagcgacgatgatgctgtttatcgtctttgttatcgtggtggtcttaggaattgtatcgatgacagaacgcctgacgcgcagctgcggggggcggaaaaagctgctggcattctgtgcagtgttcagctatggggtactgtacggcttggaacgtggcaatattctgctgctgtgctggccgttaatggcattttttatcctgtaccgcaattcagaaaaaccacttttgcgggagttggcctgtctggcactggcgattgccgccggtttcaagctgtacccggcgtttctgggcgtgctgctgctgcgcgataaaaactatctggccgcggtgcgcacggtgctgtacggtgttgtctgcctgtgcttcccgctgttcttcttcaatgaaggattgtttggcctcacactgtggttccgtgtactgtttgattttagcggcagcagaggtgaaccgtggatcggcaacggtttctccaacattttggcagaggctggacatgcggtggacaagctgctgggcacgcagctgggctatggcagctacgcactgctgggcattgtgctggctgcggtgctgctggtgtgcagcttttttatggataaggagtggaagcgcattacagcaatcattctggcgatgctgatgttccagtcccagtatgattatgtatggtgcctgtttttgattccgctgttcctgtttatggagcaggagcatgagctgcgcatggacaacgtgctgccctatctggccttgatggtgccggtgctgccgctgccgctgttccggcgggatcagatggagccgtcctttgtaccgcgcaacacgatttgtcatgccatgctgctgctgctcattgcttggtgctttgtccaggcggtgcagggggtgcgtgtacgctgtgcggaaaagccggtcaaaccggcacacggacacccggcagccacggtgctgctggccgtttgtgtggcggtggccggtgtgggcggccagcagctgtggcagcgcacccacaactggggctttgactacagctacaacggccgactggatgccgagggcatccggcagaaggacgtgcaggacagcgacggcaacccggtagaggcaacatggagcggccacggcgcgtatattatgatttacaaccacgcgccatttacgcaaaagatgacggtcacgttccagacaggctacggcatggatttaaagcgcgcctatacgatgacgtttgaagcaccgaatctggaagatgctgatggtacaaccgggaagcagaagcagacggatattaagatcgaccatgagggccagacggtgtgctacacggtagatgtggcacctggccagacccaaatcgatgtgagctatgacggcccgatggcggtctatgatgcttcttcacgcaagaatggcaccttctcggtggcaaacctggcggtcaccagtgagggcgctgtggaggaaaccgaataacggaaggaaacatacactatgcagaaattgctggccctgctgggcgcaaaaaataaagaggaatttgtggagctgttcaagcagttcatcaagttcggcctggtgggcgtaagcaacacggctgtgtccatggcggtctactatatcttcctgtggatcagcccggacctgtatatggtcggcagcatcctgggcacgattctgagcattgccaacgcctttttctggaatgacaagtttgtctttactggcaacgccaatgactggcgcagcaagctcaagcggctgggcaagacctatgtcagctacggcggcacatcgattttgtccaacgtgctgctctggatcgaagttgcgttcttcagcgtaagcaagtccattgcgcccatcgttaatctgttagtgacgatcccgctaaactttgttatcaacaagttgtggacgtttagaaatgagaaataatcaatgaatagaaaaataaagacatgggcgtatgcaattcttttgttaaatataattgttgcgggaatcggtattgcaaagcttttatttgatgtttttaccggcaacggaaatacacaagttggaaacaatcaatatggatgccgtttatccgttaggatggacgacaattgttgaaaacgttgcgttactcttgatggaagtatcgattgtttttgaggaattgttttttaggagtagagaaaacggatgaaaaataaagagcgaaatggtaatattgagctgctgcggtttgtgttctgcgtaatgatggttttataccacgcatggtatgtgcgcagaggatatattggcgttgagttcttttttatggtgacggggtatttcctcgctgaaaagatatgtaggctaaatgcaagggaagcgagccgcccatcggtagaaaatgccatgaaggaagcaacgcgagatgttacgaagcgttatcgctcaatatttccgtacttttttgtcgccaccattttgggatttatagtgcgtgcctatgcacagaaatgggacaatgcagcaatcctgttgggcgtgcagttgattccagcggatttcttatacttgcaaaaccttggattttcgacaacatctgccacgggggtattatggtatctttccgctatgacttttgcggtttggacgctatatccgttactgcgcagacattataacgtgattgtgcaagcagctccgatgggaagccttttgatactgggagtgattctgcaaaactgtgggtcgctggacgcgccatgcacatttctgtttggctgggtcaatacaggaatattacgagctttcgcgggcatcctaggggggggtgacgataaataacattgcgtcaaaactgaggaaaatcaatgttggtgaaaaaacttccgcagcaatgacgatagtggagttggctggatatgtgtgggtactttaccacatttgggcgatgaatgaaacgcgtgttgcgttggacggcattgtagtcttagctcttggggtcgcgtttactattactgtaagcggaaaatcacttttttatgggaaatttaataatggttttgtgcgattcctggggaagacaacgatgcccatttttttaagtcacttctactgtgttcaatatttgccgaatatattggcaaggtatagtattgaagtgacagaattgcagcgcttagggatttcctttgctttctgtgcaatagcggcgggaatagtctattgtgtgggacaagttatagataggcaaatgaaaaaggttggtatcttttttgaacagcaagtgattaaaaagagcgaataagttgctgaaaaagtttaaaagataatgcttggtagggtagcatagcaatgttggcgtaagcaacacggctgtgtccatggcggtctactatatcttcctgtggatcagcccggacctgtatatggtcggcagcatcctgggcacgattctgagcattgccaacgcctttttctggaatgacaagtttgtctttactggcaacgccaatgactggcgcagcaagctcaagcggctgggcaagacctatgtcagctacggcggcacatcgattttgtccaacgtgctgctctggatcgaagttgcgttcttcagcgtaagcaagtccattgcgcccatcgttaatctgttagtgacgatcccgctaaactttgttatcaacaagttgtggacgtttagaaatgagaaataatcaatgaatagaaaaataaagacatgggcgtatgcaattcttttgttaaatataattgttgcgggaatcggtattgcaaagcttttatttgatgtttttaccggcaacggaaatacacaagacggattgcttttccagaacctgcatctaacagcgtacagcacggattcattcatggacttctttaatagcattcagtatggaaggaagccctatacagcaggagtgatttatccgccactgataaatttgatttatgctatattcgggatggggattccggacagcgttaaagcacagggtacacttgcatacaggacatcgctacaaggcattgtggcattagtgctgttttatgtaatggctgtattgctgtatatcattgcgtggaaagatgattctcgcttcaccaataaagaaaagctttttttgacaacagccacattttttacgctcccgttcatttacgctgtggagagaggaaatagcttactttggtgtgtcccgcttacaatgctatttgtaaataactataataagaaagaaaaaagcaaacgtatactggcaattgtagcgttagcacttgcagcctcaatgaaaatgtacccggtgttttttgggattttgcttgtgcgtgaaaagaaatggaaagaagcactaacggcagtggttgttggtgcgattacaatgtttgcaccttttcttttaatggaaaagggaaatcgtagtccgctactatggcttagtaacattgcaaaaacaagcgaaatgtttcaaagcaatggctatgggtataaagtaaacttgtctaacacaatagggtttattgagagtgaatttggcatacatattacgggaacaaattttttgataatagcggttttacttatcaacagccttttggtgttaatcaagaagaatatgcctcagtggaagtgcatggcgttgctggctcttatcacaatcttagtgcctggatttagctatacatacacaataatgtttatgctgattcccttcttttgctttttaggaagtgagcacgatcaaaaatgggactgttattatctgattctttttatgctgatgtttgtattgctaccgataaaaaatcagtttggcggtttggaagcaatcaatatggatgccgtttatccgttgggatggacgacaattgttgaaagcgttgcgttactcttgatggaagtatcgatagttatcgaagaattgcctttaaaaaacagggagaaataaagatgaaacagcgtttagcggattatgtggcggactttctggcggcgcgcggtgtgacggatgttttctccgtggttggcggcggcgctatgcacctgaacgatgcgctgggccataacccccggctgcatgtgacctacaaccaccatgagcaggcatgcgccattgcggcggaagcctacgcccggctggaaaataagatcgcggcggtctgcgtgaccaccggccccggcggcaccaacgcgctgaccggcgtcgtgggcggctggctggactccatccctatgttcattgtctccggccaggtgcgctatgacaccacggcccggtacgccttgcagtacaccggtacgccgctgcgcgccatgggcgaccaggagtacgacatcaccaagtccgtccagtacatgacgaagttcgccgccatgctggaggaccccaaggacattcgctacctgctggaaaaggcgtggcatctggctacaacgggccgccccggcccggtctggctggacatcccggtcaacttccagggcggctacatcgagactgacgagctgcgcagctacgaccccgccgaggatgacgcccagctgcccccgccggtggacgacgccacgatccggacgattctggaaaaaatcaagaacgccaaacgacccgtgttccacgcgggctatggcatccgcctgtccggcgggtatgcggcgttccgctccgtggcggaaaagctcaacatccccatcgtcacctactggaacgccgtggacctcatcgaggatgacaatccgctgtactgcgggcgcgccggcaacatgggtgaccgcccgggcaactgggctatccaaaacgcagacttaattctggccgtaggcacgcgtatttctatccgccaggtcggctacaactggaagacttgggcccgtgcggcagaggtcatcatggtggacattgaccaggccgagctgaaaaagccgaccctgcacgtcgaaatgccggtctgggccgacgcgaaggactttttgaccaagctggataaggtcgccgcggcccccgtgaacgcgggcggcgagtggctggccacctgccagcgctggaaacgcgactaccccgccgtcttgccccgccagtgggaggaaaacggcgagactgccaacgtctacgcctttgtgcgctatttaagcagttgcctgccggagaacagcctgaccgcggtctccaacggtgcgtgctgtgtcgtcggtaaccaggcgtatgtcatccagaagggcagccgaatggcaaacaacagcgccattgccagcatgggctacggtctgcccgcagccattggcacctgcatcggcggcggacgccgccagacgatctgcctcgagggcgacggctccatcatgatgaacctgcaggaactgcagaccatcctgacgaacaagctgccgatcaaaatcttcctcatcaacaacaacggttaccactctatccgcctgacgcagaacaaccttttcaaggagcactgcaaggtcggcatcggccccgagagcggcgacctgtccttcccggagtttgaaaagctcgcaaaggcgtttggctacccctactacagcgcccacagcaacgccgagatgaagcaggccgtggacacggtgctggcactggacggcccggctttctgcgagattttcaccgacacgaaacaggtctgggagcccaagagcagcaccaagcgcctgcccgacggcacgctggtcagccccccgttggaggacctggcccccttcctgccgcgtgaggagctggaaaagcagatgttcatcccgctgatgccggaagtgtaaggaaagtgggtagaatggaaaaatgaaaaaaatgcggaatggcaatattgaattgctgcggtttcttttctgtgcggacattgtgctgtaccatgcgggctttctgccgcgcggctatgtcggcgttgagttcttctttatggtgacgggcttctttctggcagacaaaatcttgacccggaatagcaaagaccagagaaagcccacgtgggagactctggtcggggaggccaccgccgacatctggaagcgatactgcgcaatcttcccgtatttcttcgcatccacggtgttgggctttgcggtgcgcgcttttgcgctgcactgggacttgcccacgtttctgacacatctgcagctgattccggcggatatgctgtacttgcagaacatcggctttacggttacgtcggccatcggcgttctgtggtatctgtcggccatgacgtttgcggtctgggtcctgtacccgctgctgcgccgccgctatgagctggtcgcgagcgtttcgcctgctgttatacttttgattctggggctgattcagcagaattgcggctccttggatgcaccctgcaccttcctgtatggctggctcaacacaggcctgctgcgtgcctttgcgggtattctgggcggcgtactggcctactatgtgacacagaaggtgcgtggcatcaacataacaaaaggaatggcggctgccctgacggtttttgaggtcgccgtgtacatatgggtgttctaccacacttggagccggaacgacttccgcccgttgctggatgcgtttgtcattgtggcattagggggggcgttcacggtcacggtaagcggcaagtcgctgctgtatcagaaattcgacaatgggtttgtgcgcttcttgggcaaggcgtctatgccgatcttcctgagccatttttatatggtgttctatctgtccaacgtgtttgaaatgctccacatggaggacacgttcggacagaagctcgcgttcaccatcggactcagtctactggcggcggcgattgtgtatgctgcaggccagctgatgtgcagactgataaaggcgtgggcggtatcctttcagaacaagctgaaggcaattaactaagcaggggttcaatatggaacaaggcaagagacaaatccacaccgccatcatcaccggtcctacgggggcaatcgggatggcgttgtgtgcaaagctgctggcggagggcgtgacggtctacgcggtcacccacccgggcagtgcgcgggcggcgctgctgccgcaggacgcgcggctgcatgtggtgccctgcgatgcggcggagctggcctcgctgccggagctgatcccggaaaaggccgatgcgttcttccactttgcgtgggcgcacacgatcggcccgggccgcaacgacatgccggcgcagatcgagaacatccgctacaccattgcggcctgccgcgccgcggcgcagctgggctgccaggtctttatcggggctggcagccaggccgagtatggccgcgtggagggtgtgctgaccgcgcagaccccctgcttcccggagaacggctacggcatggccaagctgtgcgccggccagatgagccgcgtcgagtgccagacgctgggcatggcccacatttggacgcgcattttgagcgtctacggcccgcacgacggtccggccacgatgatcagcggcaccattcgtaagctgctgcacggcgagaagcccgctctgaccgcgggcatccagcagtgggactacctgtacgctgccgacgcggcagctgcgttctacgcgctggccgtcagcggacaggacggcagagtctacccgctgggcagcggcacggcccgcccgctgaaggactacatcgagacgctgcgcgacgccatcgacccggcgctgccgctgggcttgggggaggtcccctacggcccgctgcaggtcatgcacctgcaggcggacacgtcggccttacaggaggacaccggctggcggcccgcgaccccgtttgaagaaggaatccacgaaaccattgagtgggtaaggaaagagacaaaatgagtgagaaaaagacgatttcggtaatgatcccctgctacaacgaggagcagaacgcccgccccatctatgaggctgtgcgcgatgagctggtcaagaactgcccgaactacgactatgagattttgttcatcgacaacaagagcgaggacggcacccgtgccatcatccggcagatctgcgccgaggacaagcacgtcaaggccatcttcaacgtcaagaacttcggccagttcaacagcccgtactacggcatgatccacacctccggtgattgcacgatcacgatgtgcgccgacttccaggaccctgtggagatgatccccaggtttgtggccgagtgggaaaagggctacaaaatcgtcattggccgcaagacccagagcaaggaaaacccggtcatgtactggctgcgcggctgctactacaagctcatcaagaagatgagcagctgcgagcagatcgagcagttcaccggctttggcctgtacgataagagctttatccagacgctgcgcaacttgaaggacccgacgcccttcatccgcggcattgtggccgagctgggccccgagcgcaaggaaatcgagtacacccagccccagcgccgcgcgggcaagacccacaacaactggtacagcctgtacgacgccgctatgctgagctttaccagctacaccaaggccggtatgcgcattgcaacgttcgcgggcttcctggtggcggggctgagctttctggtcggcctgttctatctgattgccaagctgctgttctggcagagcttccgcgccgggtacgcgccgacgatgatcgccatcttctttatgggcggcattcagctggcgttcctgggctttttgggtgagtacgtcatggctatgaacacccgcatcatgaaccgcccgctcgttgtggaggaagaacgcctcaactttgggccggacgaccagtgaccggcatgaagcaggagtttggttatttcctgaaaaacgcgaaattccgcgcggcgctggggctgaccctgctgctcagctacggctatgccatcgccacgacacgggtcagcattgactcgctggaaggggaccgctacatcggcacgggcggcgttatgctgtccaccggacggttcggcatgaacctctgggccgcggtgctgggctacggcagggccgagccgagttatgcctttggcattgacctgctggcggcgctgctgctggcgctggcggcggtgagcttctgtgcgctgctgcgcaaggccgcgcaggaccgcatcagcatgttcggctatgggctgtttgcctgcctgtttgtctcctacccgctgatgaacgaaatttgggagtacagcggcgcgaatgtctgcgtctgcggcggttatttgctggacgccgctgcgctgaatctgctgtgggacgcgcgccagcccggcgtgccgtggcgcggcagggctctgcgcatgggcgcggcg

SEQ ID NO: 53 - DNA, 23185 bp, unidentified
  source 1..23185: mol_type = unassigned DNA
ttaattattctcttttggttttcttcttttatgctttttctctgtgagcggagtcatactcttggcacaaataagcatggtggaagaattatgcaataatgcagacatagacggagaaataagacctaaaaatcccgaagccatcagtgctgaattaaaacctacaataaatctgtaattgcggttaattctatccattaaggtctgacttattgttcttattctcgcaagttcggtaaggtcggagcttttgattgtaatatctgcggtttctcttgcaatatcagaagcatctcgcatagcaacagatacatttgcagccgcaagcgccggtgtatcgttaataccgtcaccaaccataattacgcccttgctgctcttcttgagttcttcaacatatttatgtttatcctcgggaagtacctgacatttatattcggtaatgccaagcatttctgcggtcatttgagccgccttctgactgtcgccggtaagcattataactctttcaataccctgatttctaagcatttgaatagctctcgcagcctcttctcgtggtgggtcacttatacataacgcaccgacaagcgctccgccgatagcaagataaagcacagagcaagcgcctgatttttcatcaatagttttctgctgttcttcggttacagaaatctgctcgtcctccactacaaaatgcttactgcctattacagcctttttgccgtgcagtgtggttgcaattccgtgtgcaacaatatactgaacatcagagtgctcctctatgtgagataatcctctttcattcgctgcatttacaacggcattcgcaacgctgtgagggaaatgctcctcaagacaagctgcaattttgagtatttcttcctctgaataatcactgaaagaaattactttttcaagcttcggctcggcatttgtcagtgtacctgttttatcaaatacaatggtatctgcgtgagcatatgcctcaagatacttgccgcctttaacggtaatatcgtggtcggccgcctccttgattgcggaaataaccgcaatcggagtagaaagtttgatagcacaggaatagtcaaccataagcaaagaaacagctttggtaatattccttgtaagaaccaaagtagccaaaaaacctaaaaagctgaacggtacaattctgtccgccaaagtttcggcacggctttgtactcctgccttaagattttccgaattatcaataaggtcaataattttacttatttttgtgtttgaagaaagagcctttacattaactacaatgtttccctcttccacaacagtaccggcaaatacggttatgccctcacgctttgcaacagggagcggctcacctgtcatagacgactcgtttactgttgcctcacccgatacaacaacaccgtcaacaggaataacattgcctgtctgtactctgatgttatcaccctctgtcaaatcagacataggaataagtacttctgaattatcatcggttacaagccataccttgtccgccttaacagcaaggctgtccgtaagcacagcttttgtacgggcatgagtataatcctcgagcataccggatacggtaagcaagaacattattgttcctgcggttttaaagtttctctgtaacaagcaggttgcaattgacgcaccgtcaagcacatcaacattaagtttgcagtcccaaagtgcctttaaagccttttttatgtattttatacttgtgtaaattgtaactaccattctgataggtgcgggcaaaagccatttttgcaaaagtctttttgccacgcaagaaatcagattatgtttaaaattattgtcaatatcttgaacgctaacagttttctttgcctcaacttttacaagagaactgcgctctattgacgctataacatcaattacattctgacgataacctttgtcatacataacaaggataccgccgttttcggaatttacttcaaccttttttacataatttttctctataagaaaattataaatacaaccctcatacgccttatcaaaagcatatgcgccgcagcggaatctgattcgctgcggcttatcatatacaatagaatatttcattattcttcaacttctgtttcagtttctgtttcaatgccggcttctgcctttgcatcgtagcaaagatctgccgcatcgtctttcatgctctggaatttagccttagcatctttctgaagcttcataccttttgcaagaccggttactgcaacgctgcgagtctttggtgaagtaaatacttttttacctacaataactgctgctgcacctgcaacaacgcaccataatttttcattttttaaaaaattcttcataactgttcctcctaagatttatgataattatattatactcatttgtcacaatttgtcaatactgtaagaaaagcctaaccgaaatttgtaggttatcccaaaccaacatctaaaatcatcataattacgaacccaattgcaactccgattgtaccgatatttgagtgttttccgctctgcgattcgggtattaattcttccgttacaacataaatcatagcacctgccgcaaaagacaacagatacggcagaatttgtgttactattcccgcaaaaatcaaagtaatcattgcacctatcggttcaaccacacccgaaatcacgccgtaataaaatgattttaactttgaacagccgccgtctttgagcggcagagatattattgctccctccgggaaattctgaattgcaattccgactgcaagtgaaatcgcacctgccacggttatacccgtattttctgtaattgcacctgccaaagttacgcctacagccataccttccggaatattatgcaatgtaaccgcaagcacaagcatagtattttttgaaagtcttgactttacaccctcaggtttgtcactgttaagatgcaaatgagggattacactgtcaagcaagagcaaaaatcctattccgagcaaaaatcccaccgcagcaggcagccattcgattacattttgtttagcggacatttcaacagacggaattatcagcgaccacaccgatgcggctatcattactcccgaggcaaaaccgagtaaaaatttctggaatttttcgttgattttattttttgtaaagaaaaccattgcagaacccaaagaagttcctaaaaacggtattaaaagtattgctgtttgttgataaagcatcttccaccaccttatattattgttttataatatgcaaagaaagtctgtaaaaagcagtctttctttacatgtttatgcattaattttccaacctgccgcttgctgtcgggcattaacaaagttcttgtaaattccgccctcctgcataagctgcgtatgtgttccgagctgtgctattttgccgttttccacaacaacaatctgatctgcattgcgcaccgtctttaatctgtgcgcaatcataattattgttttttcctttgtaagagcgtcaatcgcttcaacaagctctttttcgttttcggggtcaacatttgcggtagcttcgtccaaaataattataggtgcatttttcataattgctcttgctattgaaattctctgtttttcaccgcctgaaatacttgcaccaccctcacctatcactgtatcgtaaccatcgggcaaactcataataaaatcgtggcagcaagccttttttgcggcagttacaatttcttctcttgtagcgttttctctgccaaaagcaatgttatttgctatggtatccgcaaaaagataaacattctggaacacaaagctaaagtttttcataaggctgtccatactgtattcccgtacatcaataccgcccagtcggatattacctccgtcaacatcccaaaaccttgaaataagattgcaaagggttgatttgcctccgcctgacgggccgacaactgcggttgtggtcttttgcgggatatgcaatgaaatgccgtcaataatttttcgtttgtcatatgaaaattcaatattattaacatctatatcgtagttttgcggaataatatcttttccgtcaatatccattgtatcaaggtcaagaattttctgcgctttgtcaatacaaatatcaatcgtacgcaaaagtgccgagtaacttcctgcctgttcaagacttgagtaaagcataaatgcgcaaattgtcataccaatgcagatcataaggctcatagaaccgttaagataaagcaaaaccgaaacaaacatcataaccgcacccgtaagttttgttataatattctgaattgtcatatacggaataaatgcaaattccatttcggtgtttacttttacattgttatcaatagctttattcagttttttagtttgcttgccgaaaaggttgtatgatttaacttccgctatgccttgcacatactccattatttcacttacaagtttttggtccgattcaactttttcggcagaaagtttatcgcctgctttttgtagaagagaattaacaacaaaaaacaaaattacacctgcggcggcaataagacctattctgaaatcaaaacataacagcattacaattataagcgctgtatttaaaatcccctgtgtgctcatcattacaactcgggttgcaacatctccgagattttccattgtattggttgctacggaggtaattgaaccaaggctgttcttattaaaatagcccattgggagataacgcaaatgctgtgcaatttcaattctcttgtttgccgccgcattataacctgcttctgtctgcagcatagctgattttttccttacaaagaaatcaaccgtaattgaaacaaacattatagcaagcgacaaaaatacagtttttgaactaagtgtattatcggttatatccataagaacaatcataatcgcagggattttcatagcctcgcaaacagcctgaataactccgagcacgattgaaatttgaaacttctttttatttacacttccgcaaaaatcaaaaaacttatttaaaattttaagcattaatatcacctccgttatctttaacagaaatatgagcctgccacatttgcttgtataatccgttatcctcaagcaattccttgtgagttccctgttcgcaaactctgccgtcgtcaataacaaaaattttgtctgcgtctgtaattgtagaaagtctgtgtgcaattacaattaaagttttgcctgccacaagttttgcaacagacgactgtattaccgcttcattttcagggtcggtatatgcagtagcctcgtcaagaataactataggagcatttttaagcattgctcttgcaattgatatacgctgtctttcgcctcccgaaaggtgtccgcccgcaccgcctgctacggtgtcaaagccgttttcaagcgacattataaagtcataacagccgctgagccttgccgcctgctcaacctctttgtcagtcgcattcagattgccctgtctgatgttttcccttactgtttcgttaaaaaggtaattgtcttgtgcaacataagctacgctcttattgtattcttcaagcgacaaatctctgatatttacaccgccgatttcaatacttccgctgtctgtatcccacagagaagctatgagttttgcaattgttgatttaccgctgcccgaaggacctacaatagcgtttacactgcccgaatccatacacatatttatgttgtgcaggacttcttcatcgtgataaccaaagcatatatctttaagtcttatagaataatcataaggctttttctttgatttttcgggtctgtcaagttccttttgggtgagaatacctgccacttcgcccacaacagtgcctattttgccgaggtcatcggtgtagctcataacggtaatgagcggtcctacaatgctcagtgcaagaataatgcacattacaaaatttgcaacagaaagactgccgtttaaaataaacattgcgccaaacggcaaaacggtgagaagtgtgtacggggtaagaacaagcgaaatgctatggtaaatacagcatttgcgcatccagccgatatacgcctctgctccctctttagcggcttttgtgaatttttcgtaagaggagtccgccttgccgaatacctttataacctcaatgccgtttatgtattccactgccgcattgttaagcgccttggttttttcgaccgcatttttaaagttttcttcatagccgataaacattccaaaggttgagcaaaagccgagcacaacggttacaagcgaaagcagtgccattcgccagtcaattacaaacaaatatacaagcactgcaacgggcggaatcagattggaagtaaattcgggcagaatatgcgcaagcgtggtttctatgctgtcaatccgctccaccataatgtttttaagagtacccgatgaggtgtctttaacatatcctagcggcactcttgaaagtttgtcgcaggtttccttgcggatttgtccgagcacgctgaaagtagccttgtgcgaaaatgccgttgaaactgaatgaaaaatctcagctataacaaacgagcctgcaatcattgcaatttcaatcagatacaccgaaaagcttttctctccgtttaacagtttgttgataacatcacctataatgaaaaacggtatcagcttgaacaatacattcaaaaccgcaagcactacgcttactgagtaaagagatttttgcctgcctgcccactgcataatccatgccgcagaggatttttcttttttcattattccactctcctttgataaaatagttagtttatgctaactattatttaaaaattttcgtatctgcctatacagatacgaaaaaattatactgattttaaaatgatataccaaaaagtttttcccagcctccggtataaaacattttcagctttttgacacgctcaatcgcaacgctcttttccatatcatgaaccacaatttcaaacattgccgaaaacataccgctcgacaccatatgaataaagtccttgtcaagctgcggaatttccgttccgctttttcgcatatcttcaataaatgtaagggttgactgcgtttctctttcaacaagattatgtataaaagaagtaaactccgtgccgtcagccttacaaagcagcaatttaaaattatcgtaatgttcgtaaatatagttgagcatttgcgtgatggaatccgttgaaactccggtcatggcattttgctgttcactgctcgacaaagtctgaaaattatgcaaagtaacatcataaatagaatatattttatttgcatacggttcaaccagcgaagcaaataaatcttctttagtaggaaaatatttgtaaaacgcacctgtggtaagtcctgcattttttactatttgtcttaatgaggcattggcaaaacctttttccataaattcatcaagagccgctttttcgatttttgcctttgtttcttcattacctgtcattcaaattacctcacaaaagataacagtgttatataacactgttatcttatcattaatttatctctttgtcaagagagtttttaattgtataacatattaataaacctgcattataaaaatccctcaacagcaaattatgaaatttaccgttgagggattgtctttatctttctctaagtaagacggttaagtctgttttttcagaccgttttaccgctgttttacaaactataaagaggagcaatataatcatcagtattaccgttgaaatttcaccaatcgttatttttacggtcatttccataattgtattgccaagcaatgaatatatgtaaggatttataagcagatttcctaacaagaaagcgaaaattatacctataaatatcgaaatcaaagcgagtattatatgctctgtaaaaattatataaaatatatgctttgttttgtagccgagagcacggtataaagcaagctcgtttgtacgattgcttatattgttttttaaaaaaataaaaaatccgactataataaaagcaataaataaaaccgctgtcgcaatagaaatatacattgctgtattataagtctgtacatttataacatccgttcttttataaacattacatataccagacaactcctgcagcgccgtttcggtattttcgggtttatctacaacaatcatataacttttatcgtccgaatattcacccgataccgccgcatcgtatttaaacaaatcattcttcggcacaagtatttctttattttcaaatataggatccgatgtactgtaagcgccgattatttttattttaaataccgtatcctctcctacatttaattcaagagtttttccgattaaatcttcaccgtttatctcactgaatttgcgttcgttttcattgtaatcttttattttttcgggaacaagcgctactccggtttcgctttcgtcaaaagttctgcccgaagtaattaaaggagaactttcgttatgaacaaacgccaatgtgtattgtgacgacaaagttttagaactatcggaaaaagtcagttttgacggaattttataaacatcggttacatattgattttctttcagctttgtgattttactttctatatagtcgtccggtatattatccgtaaaatcagtttcaagttctcgtcttgaaatatgattattaattttatttaccacattgtcagtcataggtaaaatcaaaccaatcgacaaaagcataagaactgttgataatatcacaaatatacagaaaaatgcggaagacagctttctggtttttaccgatgattttatcagaatattaagttttgcaagtttcattttacttttctcccaatactccgtctttcatagtatatattttatccgcaaaatcaataacggcgtcattatgacttacaacaagcacacctttgccaagataacacaacttttttaattcttcaaaaaccataagttcgtttttactgtcaagatttcctgtcggttcgtcggcgagaataaaatcggggtcattggcaagcgctcttgcaatggcaactctctgctgttcaccgccagaaagttcgaaaggataatgttctttgcggttagtaagacctaccgaatctatcagctgcattgcctgttctttcatatcattcattgaggtgaatttatcgtttatcagcataggtaccataacattttcgtagagttttaaatgtgcattaagatgaaaggcttgaaacacaaagcctaaattttccatacgaacatctgcaatcgcatttttgtcaagggtagatacatcattgccgttaataattacctgccccgatgtgcaagtatcaagtaaacccgcaatttgaagcaaagtgctttttccgctgcccgactgtcccataacggcaataaattcaccttgatttaccgtaagcgaaacattgtccacggcaacaacactgttgttatatatttttgaaatttcttttaattctattgcgttcataacagtacctcgtttaatttaattcatagcatcctttggctgtattttattaattttgcagagtgaaataagctgacatataagcggaacaacaactgccaaagccaatgaaacggcaaggaaaatcaggtaatcagtccaatttacaacatacaaacgatttatatatgtatcatgattaaacataaaattcataaccgcaattaccaatgctgaaataaccgcacctatagcgcagccccttattgtaagaatcaactgttcaaaatacatacatttaaatatctgactgtttttataacctatagctttcagcaaaccgatttcaccctttctgttaaacagagaaagcaccgtcgattgtataagaataacaacacacagtataagcgatgccgaaatcataaaaacacttaatattttgaaaacttttgatgatttaaccgtttcctcctgtattccgagttcggggtcggaaaatacaaaataccctgcctcattaagttcattacacaacggtactatgttatcgtaatcatcaacgactataaagtgatcgtgcaaagacggggtcttgtaccaatgcacggcatttgacctttcatcattcaaatctattattgaagcgtcaaaagcgtcttgaattatctgcacccccgtatcctccgaaacaaatatatggttataatagcccttagttgtaggctctgaataatacacacccacaactttcaacttatattcaattgcaggcaaatacatagttttattttcatacattgccaattcagggtcgatattataaaaaacttcaagtccgtcaccattcgaaggcgttactgtaattgtttttccgataagactttcgccgtctatataattaaggtcagaatcagtgttttcatattcaaaaggataaaaaagacttggtattatacaactgtacacgggactttcatcaagactttttcctgccattacatccattttttcatcgcctatcaacggatataaatttaaactgcagtttaaatcttcgttgcctttataaaaatctttatattcgccgttttcgtcacttacatcaactacatccatatactgatttattattcccttaagttcgtatatatcttccacatggtcaaaagacattaacttgctctttaattcgtcggtaacggcaccgttgtctatcggactgaaagtaatcattctcgcacgaatatcatttttataatcagttacggctctgttaattgttacggcataacttgaaatcaatgtaagggaaataacaagtataaccataaaagctgtaataaatatactctttcgattacctttgatatttgcttttgccaagaaattaatattttttatcttcattacttttcacccgtaaataaatctgtgtaatatttgcatataaaatataaagttaatacaattttataatatcattaacgattatttttgtcaattaaatttcgacatatataatcaattttacaaaaaacgacagtgtatgaaataaaaatcacacactgtcgtatatttttctttttaatttattctgcaattgttttcacaaagaatataaaataaatcaggtgacaaagccatactatcgctaaaattatacaagggacgagtatgccctttatcagcattagcacaaagccgaatgtcataagtacagtgaccgaagttatgatttttacctttgtttttgtggtcattccctttttgtttacaaatgactcaaggttccttttatacatttttgtattaacaaaccaattatgcaatctttgcgatgaatttgcaaagcagaacacagttgccaaaaagaacggcactgtcggcaaaatcggcaatactattcccacacaaccgagtgcaagcgatatacagcctaaaactaaaaataatattctttttattttcatcttctttcctccaaattaaataatttttgcataaagcattaaagccgatatgttattataaagttagcttcggctaactttcaggtatattattgcttgtttttatgcggcggtacggtgcataagcaaagcagccgcaccgccttagttaaatatggttctataataaatataatgggaatgatgctgtcttaaaaattttagcatactttaaagttttcctctatgtgaggggaaaacttgataaattcgttattaaccccaacttttgacaaaaagccattattataaaattagtctttatttgcgagatttgcaagctgttttttctctttgccgctctctataaggtggctgaccgccataacagggtgataaaaaatcattttcgggcctgaaaaacgcataatctctcttatcttttcacgcatttgcggcttgtagcaatgcaccttgcagtttgagcaaaaggttttggtttccataaaagggcatttactgctcctaagctgagcataatcctttaaagccttgcagtcggcgcaaatctcgcccttggtcttatgctttttatggcagtacaggtcaatcattttggaaacaacctgcttttctctctcccttttttcgtcaacaccgagtcttctgctcatcagcttgtcctcccgttctccacgcaataaacggtgtcggcaatcttcattgttgactctctgtgcgatacaagcactacggttttattttctctttcctcattaagcgatttaagaataaccgcctcgttaaggctgtcgaggttgcttgtaggttcgtcaaggagcataagcggcgcattgtgcaaaaacgcccttgcaagtcctattctttgcttttcgccgcccgacagagtgtcgccgagttctcctaccatggtatcgtaaccgtttggcaggctcataataaaatcgtgaacagaggcttttttgcaggcattaactatttcctcatctgttgcgtcaagttttgcaattctgagattattcttaatgctgtcgtggaaaaggtgggtatcctgcgtaacatagctttctatatcccgtaaattcgaggtgtttatatcctctatgcttgcgtctgaaattttaatatcacccttttgcacctgccaaaatctcatcaacagctttagcaaggttgacttgccactgccgctcttgcctgtgattccgacaatggtattttctttaatatcaaccgatacattgtcaagtattacctcatcgccatacgcaaaggtaacattctccgcctttgcgccattaaaaacaatatctttcttgcctgtaatctcctcaacaacaggcgactcgtcaagaatattaagcactctgttgcctgccgcaaatgtattctgcaatgtactgccaaggtttgcgagagacacaacagggccaaatgagctcataagtgcaagtacggggataattacaccgtcaagacccaccatatctttttgatacagaagtgccgccgcaactaacagcataatatcaaaagcaaagattgcagtattggttacagccgtacttgtgcctgttttttgtttcattctcttttcggttgcaagcagttcttcggttttttcattcatcttttgcgcacgattttttccgccgccaaactgaattaactccgaaatgccgtacaggccgtcaagcacaaaggcgcttagctcgcccgattttttgcggaatttttcgccgtcactgccactgctttttgaaaccgcaatcggcactattaccccgacagtgatatatgccgcaagtgcgagcataccgagaattacactgtacgagccgataaacacaaccataataatgcaaaagataacagctattgcaatcggagaaattgtgtgggcatagaacacttcaagcaattcaatgtctgaggttatgattgaaataaggttgcccttgtcctttccctcaagctttgccgggcaaagtctgcgcaaggctatgaacactttatctcggataagcgcaagcaatttaaaggctatgtagtgattgctcgcctgctctgcgtaccttaaaacaccacgcaaaagtgcaaatacacctgcaagaataaaggcagtgagcattgaaatacccgtagaaatattgagcgcatcaaggatagcgtatccgccgagtattgttataaaggcggcgcacaaattaccgattatgcccattgctattgcaagcgccataaagcctgcgagcagctttacaagtgccgaaagtctgaacataatgtttaaattacttctctttttcattgctcacaccccctttgtgtagttttcaagctgaatttgcgaattataaagatttgcgtacacactgttgtttttcaaaagctctgtgtgtgctccgctttctattatgtttccgtcctgcattacatagatattgtcggcattcacaacatttgcaagcctgtgcgaaataagaataactgttttggctttggcaagtttaataatctgctccattatatcgttttcgctctcaatatctatgtttgaggttgcctcgtcaaagatatatatgtcgctgttgtgcagtaatgctcttgcaagcgcaagtcgctggcgctgaccgcccgaaatattgcttgccttttcattaataaaggtatcgagtccgttttcactctttaaaaagtttgcgagattaacctgctcaagcacccgccaaagctcttcgtctttaacattcgccgccattaaaaggttctccctcaccgtacccttaaaaatatagctgttgtgaccgatatatgtaatagatttcatcagactgttttcgtttatttcttttatagaaataccgccaatcgtcacacttccgccaaagcctttgttttttcctgtaagaattgaggcaacagtagatttaccgcagccgcttttgccgacaacagctgtaaaactgccctttttaaagctcatatttacaccatgcaaaatctctctgctttcatcatacgaaaagctgaggttattacattcaatgtcggtattatctgtgattttttcttttgcgggattttcttctttaatatcaagaagattaaagattttatcgcttgccgccataccgttcattgctatgtggaaaaagctgccgagccggcgcattggaataaagaaatctgccgagagaagtattataaaaaggcagcccgaaatatcaatgtgtccgcctgcaaactgcgttacggcaagaatcattccgacagccgcaccgccgtatgcaatcagatccataattgtaattgaatttaactgcatagtgaggactttcattgttatttttctgaacttttcagcctctatattcatctcgtcatttttaaatttatcggacttgtaaattttgagagttgtaagtccctgcaaattttcgaggaaagtatcgcccaaggcagtgtactgaccccaatactttgagagtaattttttcgcccatgtttgtacggcggcaatcgcaacgggaataagcggcacacacacaagcagtacaactgccgacagaacatttacaaaacaggttacgataaacaatgtaagcggcgctatcattgcataaaagaactgcggaagatatgcgccaaagtaggtttcaagctgttctacaccctctaccgacacctgcacgatttccgaggtttttactttttcgttgtacgatgctccgagcctcagcaccttttcaaaaataagacttctcagcttttgcttaactttctttgaagagagaaagctcatttttgaggaaattttagtgcatacaaattgcacagccacgcacaataaaattacagcgacaagaaaaacaatatcgcctgcctgcggtttttcataggcaagtttgcccacaaaggctgcgatactgcccataattacaacattggagcagagtgaaacccattggctcgccacattgcctgcaatatatttttggctttctgcgactgttgcaataagccgtttatttatcatcataagcataccaccttttttgattagtttcaactaacttattaaaccacaaatctgcaattttttcaagtaggaaattatgtttagcgataaaaagtgtaaatgatatgcaagtgtttgcagtaaagatgaaaatttattggctctttgtcaaaagttgggattaagaacaaagttatcaaggtttcccctcaagtggaaggctttttagtttgataaaatttttaagatagcatcattccacaacatttataatagaaccaaatttatttaactaaaccctaaaaccaaaaaaacagatgcaaagcattaaactctgcatctgtttatgtattggggattattataatttttgaataacgatttttctgtatgtgttaaacttaacccactttgcgaaaaattcggaatcgttaatatcttcaagatttttgtattcgtcaagcattgttttgattttctcgtcactgtcggcaagaatctcaaaacccctgccgttgataataggcacagcgctgtatttgtaatcatctgcaggagtaattgcagtaaccaccttattgcgaacgcttaccgcaacaagatcacgaagtacaataatatcaaagctgtcaggatatgagtagctgtcgccgcttgtcggaatttcgtcaccgacagtgtaagtttctcttacaggctgatatttaagtacattaaggcttgtggtatcatagtagaattcttcaaaaatatcacctcttgcctcaagctcgccgtttttgaacgaagctttttcagaacccgatacgcctttctgacttaccttttcaaccacaccgcatgccgaagtcatattcgttacacggtttataagtataagttcacccaaagttttgtgagcagagaacaagtcggcaacaatcggctcggtaagtaaaagattacataccgcaataccgtttttacttaaaacatctgccttgatatgctcgcctgtatttacatcaacagcatattcaatacctgtaataataccgctgattgtctttgtaccgagttttacaagataatctgtaccgaccgcaagaggttcgtcgtccatccaaagaattgatacattaagtttctgataagacgcaagttttgtgtcctttgcaattacacagcctcttgacacatcaacttctttatcaagtgtaattgtaacaggctgacccttaaatgcggtttttacatctttgcctgccgcaagcaactgcttaaccttagctttttcgttgcttggcaatgcaatgatttcatcgcctacatttatactgcccgactcaatctgtccctgaaaacctctgaatgtgtgatcgggacggcaaactctttgaacaggcatataaaagccctcttcctcttccgaggcagatacatcaactttttcgaggtattcaaggagcggaactccgttataccagggaatgttctgtgactttaccgtaacattgtcgccctctgtggcagaaagcggaataatgtagatattttcaagagaaagctcttttttaagctcgtcaatctgtgctacgatttcattaaaacgctgttcactgtaatttacaaggtccattttatttaccgcaaaaacaaaatgtcttatacccataagtttgcagattcttgcgtgtcttcttgtctgcacaagtacaccctgagatgcgtctataagaattacggcgaggtctgcaaaagacgcacctaccgccatatttcttgtatattcctcatggccgggggtatcggctacaataaaacttctgttatcggttgtaaaataacggtaagcaacatctattgtgatgccctgttcacgctctgccataagaccgtcaagcaaaagcgaatagtcaatgtcaccgttacggctgcctaccttactgtcaagctcaagagctttttcctggtcggcgtaaattaactttgcatcatacagaatatgacctataagtgtagatttaccgtcatccacacttccgcaggtaataaacttcaataaacctttcattagaaatagccctccctttttctgcgttccatactgcctgccgcctcgttgtcaataactcttgaggtacgctcggaagacacagagcttaaagtttcgtcaatgatttcgttaagggtagttgcggttgattcaataccacctgtaagaggataacagccgagtgttctgaaacgaaccgacttgtactccggtacttcaccctctttgagcgggaatctgtcatcgtcaaccattataatattgccgtcacgatatacaacaggtctttccgccgcaaaatacagcggaacaatatctatattttctctctttatgtactgccagatgtctttttccgtccagtttgaaatcgggaaaactcttatgctttcgcccttgttgattttagtgttgtaaagtttccacatctcggggcgctgatttttagggtcccaagcctgcgcctgatttctgaaagagaaaattctctcttttgctcttgacttttcttcatctcgtctgccgccgccgaatgccgctgtaaaaccatactttgtaagtgcctgctttaaagcctgtgttttcataatatccgtataagcagcaccgtggtcaaacggattgataccctgctttattccctcttcattggaataaacaatcatctcaatgccaagtttttttgctgtatcgtcacggaatttaatcatatctttaaacttccatgtagtgtctatgtgcataaacgggaacggcggcttttcagggtaaaaagccttcattgcgaggtggagcataacagagctgtccttgcctattgaatagagcataacaggcttttcgcactctgcggctacctctcggattatatatatagcctctgcttcaagctcatctaaatgtgaaagctgactcattcttattcctcctcagtacttattcgattccttttggttaatatctatcttaatggtttcaccctcgggcttgtcaattatccaactaagtatatcgccctttttctcggtatgaacaagactgcccataccgccgatatctgcaccaagataaaagctgattgcatatgcaggacattccttaatacatgaagtacagccccagcaatctttcggatactttatgtaagcacggttgtcactgtcaagctttataagactgccgggacatacatttctgcatcttccacagcctatgcacttctgcttgtcaatcgcaatgctcatagcttttacctccctctaccaaatctcggataattattttaatttcgccgttttcgaggcgtgaatttacatatttattaaagtttttgtcatccttattcggataatcaaggttttccgcaaagctgtgccaacgggtttcctttcttgcctttaagtgagcaattacacttctgcaaaccgtaagtctttccctaagctcgtaaatatacataagctcctgaaaatcttccgcatataaactgtctgaaagtttaataagctgtttgattttgtagtctgcaatatcaagctgtttttcgttaaaacggtagtttgtctttataccgcctgcatagctgtccattacagtctgcattgcctcttcaagctgttccgttgtataacgggtatctttttttgttaaaaatccttcaacttcggcaatgtgcttatcggttatttcatcttcaagctgcggtgcttgtgtatgattgttcacatactcaacagccgacatacctgcgatttcaccctctgcaagtgcacctgttacatacttctgcgggcaaccgcctgcaacatcaccgcctgcaaacaatccgtcaattgttgtggctcttttggtatcaacccaatagccgctcgctgtgtgaccgccgacaatatacggttccgttccctcaatctcaacattttgctgcgacgggttcttgccgctttctatccacttaattgtctgtgacggcgccatattaagataagcctttaacagcgattcgtcctgctcggctgttataccctctgtacgaagatagcacggacctctgccctcttggttttcatttactgtgccgtaaactcgctgtgaagttgtaagtccgtagttggtttcatatacctcgccgagcgaatttacctgttttgcgccgatgccctgtgcaagtgtacctgtcggagcgatggtgtctttacagcgaagtgcgataaaacgcatttcaaaggttgtcatctccgcacccgcattaatgcccattgcatagcctgcgccagtattaaacggaggataccacattttgtgtcttgaaaagcccggattatttggcttgtaaagacctgccgcaccgcctgtggcaacgattacggcttttgcttctattatgtaaaatgtatcgttttcaatgcctataccataagcaccgttgatcttattgttttttacggcaaaatctataatgtttactctgttgaggatttcaacattctttgttttttcaacagccgaggcaagaataggtttaatgttttcaccgtttattttaaggtttctattaccccttgtaacatacttaccgttttcatcctttaaaataacaagacctaacttttcaagcctatccgttacctcattcaacttttcggacattgtaaggagtaaatcttctcttacaattccgtctgcatctttttttgcgtaatcaacataatcctgcggctttcttccctcaacgatgtatgcgttaagagcgtttactcctgccgcaagacatccgctgcgcttgatgtgtgccttttcgcaaattaaaacttttttatctgaattttctgaaatagtgagtgcggcataacagcctgctgtacctccgcctattatcagaatatctgtacttaatttttcaattttcataggctgcctctcccttttacactcaccttattttcatatcattttattttttcaagataatcttccgcagataatacgcaattagcaccgtccgatacagctgttacaacctgtcttaactttttggtacgaacatcgcctgcaacaaatattccgtttgccgaagttactccgtcctcatttgcaacaatatagccgttattgtcaacttcaaccaaatccttaagaattgccgaattaggcacactgccgactgcaacaaaaacgccgtcaactttgatttcggcttctgcgccgtttttatcaactgtgatcgactcaaccttattactgccgttaatcttttttatctgcgaattaagcaatatttctacattagaaatattttcaactttttgctgtaaggttttattggctctgaatttatctctgcgatgaataagataaacttttttcgcaaactttgaaagcaaagccgcatcaccaagtgcggtatctccgccacctgcaacagctgtgattttatctttataaaatgcagcgtcacaaactgcgcaatacgatactcctctgcccgaaaactctttttcaccctcaacctgaagttttctgcgttccgttccgaccgcataaattacagtgtgagtttctaatgaatttccgttgtcaagttcaatgctgtaatcagttgcgtttttgctgattttaacagcctctccctctataaattcagtaccgaggctttctgcgtgtgatctgaacttttcgcccaaatcaaagccgttttcgccgtataatcccgggtaattatctacacgctcgctttctgaaatctgacctgtgccaaggtagtttttctcaaccacaactgtcttaagtcctgctcgttgagcataaattgccgaagaaagtcctgccggaccgcttccgataataactatgtcgtacataattcccctccttgtttagtaaataaccaattcttccttttctgaagctgtgccgttgattttaaatgaatttagcacgggattttctctgtccataagtgacaaaatcatatagcttgccttgctgtcatatgcaagtcgcttgtcctcatccgacggtcttgacggagattcgggatgtgaatgccagttaccgagcggtacaaaaccgttctgtcgcatatcctttaccgccgcaagctgttcctttgggtcaagcgaaaaatgctcgtttgagtggtcgatgtttgaaagaagataaacttttttaatttccttgttttcgccgtcaaccgtacccgcaatcaatccgcaagcctcgttaggcagctcactttctgcgtaagctacaattttattataatcagcttttgataatttaatcataaatgaacaccgtcacattctgcctgttcgtaatctataagctcggtaattgtaggatgatcaccgcaaaccgcacaattatgtgtgtttgacggaagttttatcttacgaaattccattttgagtgcatcgtatgtaagtaaatatcctgtgagcaaatcacccttgccgagaatatacttaatagcctccattgcctgcaaactgccgataacaccgcccattgctccgattacacccgcttgcttacaagtaggaactgcgtcctttggcggtgggtttttaaatacacaacggtagcaaggaccttcaccgggcacatatgtcataagctgtccctgaaatctgataatacctgcgtgtgaaaaaggttttttagccattacgcaagcgtcattgataagaaactttgccgggaaattatcggtaccgtcaatgatgaaatcgtaatctttgataaggtccataatattttcacttgtaacaaaggtatggtaagtttttaccgtaacatcgggattcatagcctccatagtttcctttgccgattctacctttggcttgcctacatcttttgtagcgtgaataatctggcgctgaagatttgaaaggtcaacctcgtcagcatcggcaataccgattgtaccgataccggcagcggcaagatacattgctacgggtgcaccgagtccgcctgcaccgattataagcacttttgcgttaagcaactttttctgtccctttgcaccaacctctttgagaatgatgtgacgggaataacgctcaagctgttcgttagtaaatgccattactgaccgcctcccatgaaataaagaaattcaactacatcgccgtccttgagtacggtttcttcaaaagtaccgcttgcaagaaattcgtcgtttacacttactgttacatactccggtgtttctacatcttcgtcaataataagctgtgctactgtaagtccttctgctacttcttttttattacctgcaactgtgattgtcataataataacccctttaaactgatttttcaataacttctttaatttctgcttgttttactgcgcctcgcagtcttgaaacctcttcgccgtttttaaaaaataccaaagtcggcgctgcctgtacctcgtatttttcggcaagctcggaatcaaaatttatattgattttaacaattttgagcttttcggcatattcttcttcaagtgcgaaaagtaccggtgaaagtcttttacaaggcacacagctgtctgaataaaaatcagcgagtacagttttatctgcctgtaaaacttctttttcaaaattgtctttactgattcttgtcggcat

SEQ ID NO: 54 - DNA, 11331 bp, unidentified
  source 1..11331: mol_type = unassigned DNA
ttatatatttaatcctgctgcaaacccttcaaaatttgcattcataatgttcgatggactgatacagtccccaattgctatggtatctttacagattccgtaaaatgcttctacaagctttttctgtgccgaaagtccggtagaaagaatcaggttgtcataggaaatactcttctcttctcccttttcatccttataaacaacaacatcctcttcgattctgctgcaaccgcattttaacaggctgtgaagattctcatactgcaaaaacttctgacgtaatgcttcccggtataaagagttggcatttgctgccagtgtatcggtcagttccagaatggaaacattctttccctgctcggcaagttccaatcctatctcgcatccaatacttcctccaccgaggattacaatctcctgtcctaactgctccggatgcataatcgcttttgttgcaagctgtacctttggattatcaattcccggaatcggaagaacccgctccgtagcaccaagggcaactatcaatgaatccgtctgaagctcttttatgaactccggtgttgcttctgtgttcagacgaacctctatctttctttttgccatctgcgtccggtaataatttaaaagccgcttaacttcttccttgtgtgcttctttttcaatgaagcgaagcatgccgcccagttcactttctttttccagcaatgtcacctgatgtccccggtcatatgctgtcatggcagctttcatgcctgccggacctccgccaacgattaccacatgctttttctcttttgcttccggcaaatcaagccctgatggaataaattcctcattgtgatatcttggatttaccgagcagcctacattccagtggtctgtggaaatgtgataacagttggagcatctgagacacggaacaatgtcttccggatgcccctccagtgctttcttcggccagttcgggtctgccagaagtgttcttccaaatgccaccatatccacgtagccctttgcaataatttcatctgccatttccggcgtcataacggcgctgaccacagaaaccggaatcttaagctcctgctttgcaatttttgcccatttgagattcggcatttcttcttccagattggttgtgatgcaatgcacatttgcttcaaacactttatcaattccagatgaaatctgaacggtatccacatactgctctgcctgcttcaggaagtacatcacatcctcaaagcttatggaatcttcaatccattcataggcactgacacgcatatcaatcggataatcttttccaactgctttccggacggtttctaatatccgaagtggaaaacggctgcggttttcgatacttccaccgtaggaatctgtccggtgattgtaatgtggggaaaggaactgtgccggaagccagccatgtccgaagtgaagaaaaatggaatcaaaaccaatttttcttgcacttgctgcggtctcggcataccactgcaacgtttcttccatcaacgcttcatccatttcctttacttccactccatccgggcggataaatccagacggtcctttcgcataatccaccgttcttgcatcctgtccggcatgaaagatttcgatagaagctttcgctccgcctttgtgaatcttaagcactttctttctggtggcttctctttcatacttggcaaatggatacggttcttccggacttgcaaaactggaacgtcccggttctactattgcatgtcccgcaattacaagtgctgcaccgcccaatgctttttcttcaaaatcatcacctgtcggtgttgccacaattctattttttaatatcattccattaatagaaattggctgaaataaatgattatacacgttcttctcctttctgctgtattttatttaccttcatcttaaggcacttaaaccgcagaaacaagccactgaaaacaactggaaaatatttttcacaatctgtattttttcatcatttatttatgaaatttattatctttttataattttgggcttcactttttgcttatatttactttcatacagcaactacgagaaacacgctttgcgagtttctcgagttatcgcgttgctcgccaaatctgagtagaaaaggagttcactcaagcaagcttggctccttcttttctcccagatttttctcgctactcgcgtaaataaaacagccatctggaatttcatccaaatggcttgctaatatacatattattatttttttaacctgtcatacaaaacaatttcttcacctgtgttcaaattatatttctttttatataacagggtccatgaagcctgcttcttggtataatctttttcccctttcggaaagaatgacctgcaaaaatacttatcatctgtagcatgcgataaaaacagatataaatctttctcttccattttatttttcatcagataatcagcctctatcatagaatacatatttgccttcttgttatacttaaatattgtatcattactatctaataactgctccaacaacggaaggaaattcactctttcttctattcttttataaaaatccgatgactcaacttgttctgtgctaatgcttcccaacattattccatcaaatacttttcctctgtctcgatttaattcaggtcgatcaaccaaatactgtaatcccatcaaatgaaagcagtcctttttatcaaaagtaattcttagagttacagctacctcttttctccccaatacaatcttgtattcagtatttaaaagcggaaggaaagcacttacacaatcttttatatttcgcataaagtcagttcctcctaattatgtaaaaagaaaggctctgctaaaattagcagagcctccgacattttctttcgaaacccacggtctctagccagattgtggtaaatgtcaaacccttataaagctcgtaaggcactgctctctggcacaacaccttacctccacgcttggcagacactcaagttgcctgtctttaatattatactaatcacattgaaaaaatatgtcaatccataattcttaattttataaaaaattcatatttcccactcatgcgatttttttctgtcctctacattacccggaacactgcgacaccaaacggcggcagtggataggaaatggaatattctcttccatcgcattccgacttcacagccttatagcttgccggtctgctcttatctgcttctgtaccgccgaaacgggcttcgttgctgtttaacagcagatggtaagtgcctttctttggtacacccacacggtaatcgtctctggctaccggtgtcatgttgcagacaaagagaagtgagttcttgccattcttgctcttgcggacaaagctgtagatgcttcggtctgcatcatccgcatttatccattcaaatccgttccagtcactgtcctgctcatacattgccggatatttccggtaaatgtgaagcagttcacggaagtattcatttaactgtctgtgacgtggttcttccataagataccagtctaactcacgctcttcactccactcacgaagctgtccgaaatcctgtcccataaagagaagcttcttgcccggatgtcccatcataaaggagtatgcactctttaaattgcggaacttgtcttcctcatcacccggcatcttctcccacatggatttcttcagatgcaccacttcatcatgagacagcaccagaatgtatttttcagagttgttataactcatggcgaaagtcatcttgtgatgattatttttgcggaaatacgggtctaaggacatataatccaggaaatcatgcatccatcccatattccatttgtatgtgaaattcaatccgcccttgtctgccggtccggttaccatcggccatgcggtagattcctctgcaatcatgacagtaccgtgatttcttccggtgattaaggtattgatatggcggaagaattcgatggcttctaagttcttgttctcgccatatttattggcaatccactgtccttccttcttgccatagtcaagatataacatggatgccaccgcatctacacggagtccgtcaatgtgataatgttcaatccacattaaggcacttccgattaagaagttctttacttctgatttgccataatcaaaaattttggtaccccactctggatgttcacccatccgcgggtcggcatattcatataacgggcagccgtcaaagtcagccagtccatgggcatccttcgggaaatgtgccggtacccagtctaagataacgccgatgccgtgcttatgcaggtagtttaccagataaacaaaatcctccggcgttccataccgtgaagtcggtgcatagtagccggttacctgataaccccaggaaccatcgtatgggtattcggaaattcccattaattctacatgagaatatcccatgcctttaacatacttcgtcagtgccgctgccatttcacgataggaataatatccatcatcctctcttcccggatggcgcatccaggaacccggatgtacctcataaattgccattggctctgcataaacatcttctgtctgtttccgtttgtccatccacttatcgtcagtccatttgaaatgctcaatgtctgcaatacgggatgctgttcccggacgtacctctgcatagttggcatatggatctgctttatacaatttccgtccatctggtgtgataatcagatatttgtataaatctcccagctctgcctttggaataaatgcttcaaaaattccaattcccgccggctctaaccgccgcatcggatttgctgtctcattccagtcattaaaagttccaatgacatagacttctgcagcatgtggtgcccagacatcgaaaagaatcccctttttcttccttatctctgccggatgagctcccagtttcttgtaaatatcatagtgtgttgcctggccaaataaatacatgtccagttctgtgaagttccccatttatactacacctcgtttctttctttcctattcttcgaaatccttttcatggagaatgacgtaatcatcatccttgtatttctttgaaaaaaatactttcttaatgctgaatttctcggaattggcaattgcttcatccacgatttctttcacctcggtcagcgtggtcgctctgtctaagcgttgaatgttactaattctgttgtatagagcaagaaccgccatctcatctatttcataggtcagttcgtgggcatacgattttgcaaaggataccagctcgtcactggtaaatatcggaagcgtaatcttctcggtaaatcgtctggcaaaggactcatctcttcccattgctttggtgattccctctctggtatcttctgcgattacaaggattccggtgtcatctgcttctaatgccagtgataatttcacggctgtttcccggctgattcctccgattttttctataataagacatccaccggcaactttctttaaaagctccgggatatttttctgatttaatgaaacggcatctatctttccgacacgcttgcccggctttccgatttcattctggattgccttcaccagtgcggtggcaagtaccgtcttaccgcttcctcttgctccctgaatcaggatgttgccacctttgattcccttttctaaatgttcaatggatccttccattgcctgacaaatctgcggctccattccggataccggaacaaaataagtaaagatagctttctgctccttggaaagatgggtaatcggttttctctctccgatgttatcctcatctgaatccggctctgcaatctccggaagtttctcctccggctttgcatcctctgtctcagcttccggttctaactgtatcttcggtaagacttcttctgcagcatcggatacttcctctgcttctgttgctgccacttcttctgctatatcgtccggcagtgcaatctctgggagttcttcttccggagaaagttctgtcatttcttctgtgccagccggctcttcttcatcggcagctgcaataccttctccttccggaatttccatcgcatctgctgcacctgcagccgcctctccgttctgtcccggtacaccggcagctaggaattcatcgattttcgcatttgcctgactgatggaatcaatctgctgctgcaaaatatcattcatattggcaacaagctgtccggcttcttcctccggcagcttgcctaagtattctttttctaataattctttggaggtaagtcctgcatccagctgcggaattacatctgcaagacgttccatgatatctccggcttctgctaatgcctttgccttggcagattctaacttctgctgctccgcttcctgtaatgctttttctgcggcacgcttggtcttctcccactcctctaaaatatcctgtatgctcatctgtccggtaatctgtgcttctaatgcactcttctccggaactaccatacgcatctgaccatcataatcttcgcctaacatctcctggaaattaattttcagggagccatcgatttcttcatcggttgggatatccgcaaaacgctctttctgtgcttcttcatcctgtggaagctgtaaataaggaatttcttctacaattttcttgattccctgcatggtatctgccacttcttccttctctgtggcattcataatctgctgcatgctgcgggctaattcttcctgcaggtttaccgtattaaatttctctgcattggtggttaccggtttaatctgtaccggctccttgataatctcaccggattccagataatcctccggccgcacttccacgattccgtccttccgctgtttaaactggcggtacttgtcctcctgtgcccggtttaatggctgataaagcatctttaattccagtgctttctctacatatggaccatcgccaaaccagagaatcagttcatcacaggcattgatacattcttcgctgcgtcctgcctgatgatataaatatgccagttcaaatgcccatttctcggtatattcctgttcctttaattcttcgagaatctgaattaagacatccagacctgcaccctttgctttattcatctcatagcggagaatatatttcaaattatcatgtggtgcaatctctacaaactcatcataatattcctgtgcttcatcaaattccttcgttttgatggcaatctctgccagcttatagataatcattcgtccgataggagaacggtcatatgccatcaggagaatctcttttgcttcatcataacgaccaatctgtgcataaatatctccggctttcatcagtgcgttgacattacggacctttcgccagttgatactgtcagcaatttcagcagcttctgtatactgcttcttcgccatcagattttttatttcatctagttttaatttgtattcatatttatccaaaatatgtcacctcaatatctatttcaagtaaacttaaattcatcttttttcgtcagggtatactgaccccaattattgttttaagtgtaccataaggggtgccttctgtcaaaaataatccgaagaatcataacattttatctgctatgattctccggattatttatttctttaccagaatttactttttctcttttttctttatggatggaatatgaagttcctttttctcagaggcttcctctaccggttcctccaaaagtacgatttcattggtcttttcatcgactttttccaggcgaatatattcgtccgtatcctccggcagctttcgcttccgcagacagtaatccacagtcttatcaataatataatagatgactgcgaaggtcggaacaccaagaatcattccgccgattccaaagagtccgccgcctaccatgatggcaaataccacccagaaggaattcagtccggtggaatctcctaaaatcttcggtccgataatatttccatctacctgctgcaaaataaatataaatatcaggaaatagattcccttaatcgggtctgccagtgcgatgataataacgctcggtattgctccgataaaagggccaaagaacggaataatattagtcagtcccacaaatacggaaaccagcagggtatatggcatcttcataatcagaagacagatataacacaatacaccgataatggcggaatccaataatttaccggaaataaatccaccgaatatttcattgctcttccggaaggtgtcaataattacattgccccgcaccggcttgaaaatggcatatacaatctttttggactgaccgataaatttctccttcgtcatcagcacataaacagatacgataagtccgatgactgcattcatcagtacctttaccatattgattacaccacttgtaatggatgtaatgtaagtctggatgtttggcagaaaggaatcctttacccagttttcaaggtacgttaccatatccatcatgttcgtttctaaggactgtatgatttcattatctgaatttgtcagtccattgaaccagtcaataaatgaatccacctgctttggcagggaatttaccattccagaaatactgctgattaactgcggaatcatcatggcaaacagcaggattacaattaatacaaagacaactacggctccaccggttgcaatacttcttgcaatcttcttgcacttcttctctttctgcactcttggttctaagaaatgcagcaaatgcttttcaaagaatttcataattggattaatgaggtatgcaatcacaagtccgaaggtaatcggctgtaataccctcattatagtgtcccagccctttgagacaccattgtaccggtatatcataaagaaaaacattgtgcagcagcagaacagtacaaataccagcactgcaaggctgatgtaccagcgcatctcatgttctgttttcccgctctttttcttatcttcttccattccgttctccttctttttccggatattattttcggttatagttaatgaggcatcctttacggataatccctctctcctcgtcagtaaggtcacccaaggttaatgagaactcggttaactgtccgtcttttacagcatacgcttttacttccggagctttctcttctactgctttgcggatttccggtacaaagagatagtctccgttggcaaatggcagttctccttctttgatgataaatggaagcataccccagttaatcaggttggaacgataacgcttggttgcatattcgttggcaatgtttgcccagccgcctaatactttctggcaggatgctgcctgctcacgggcagaaccgtcgcctggttttactgcaaaaatggtacttccgattccggtattctcttcattgatatccgggaactgtgtacggattgcatctacagctgcctttaattccggcagcacagcgtatggttcttcgcctgcttctcttgctgcttctgccttctgtacttctttggcacgtccaacgtatgcagggtcttttctggaaagtgtgaactctgccagtcccagcggattagaacgataagaagatgtctctccggaaggaatcagctcatcggttgtagttaccggatcatgaatctcggatactacctttaagatgaggttatcggttaatgctaccatcttcggccagtctttaatgtttggtcccatctggatttctacggatggatctgctacaccatggctgtcaaagacacggttctcatatatggtcttatcaaagaaatacttcggcttgctgaagtttacatccacatcagttgctgcggttaaatatcccttgtttgctgcggttgctgcaatagaacgggcatccatcaatgctacggatgcaatctggccgttctgtaccttggagccttcacggttcgggaagtttctggtagaatgccggatggagaatgcattgttagcaggtgtatctcctgctccgaaacatggtccgcagaatgcagtcttaacgattgctcctgtctccattaattttgctacagctccgtttttcaccagttccatgtaaatcggggtacttgccggatatacgcttaaggtaaattcatccggtccgatgctgcttcccgctaagatgtctgctgcatcacagatattttcaaatccaccaccggcacagcctgcgatgattccctggtctacatatagttttccattgcggactttatccttaagatttaagtctactgctccattgaagcttacctgtgctttcttctcgcagtcatccaagatgtccataaggtttgcattcagttcttcaatggtataggtattgcttgggtggaatggcattgcaatcattggacgaatggtgcttaagtcaatttcaatcatgccatcatagtaagcaacctgtcccggatttaattctttgtattcttctactcttccgtgaatgtcatagaattctttcactttctcatcggttgcccagatagaggaaagacaggtagtctctgtggtcattacatctacgccgatacggtaatctacgcttaagtttgcaacaccaggtcctacgaattccattactttattctttacatagccattggcaaatacttcaccgatgattgccagtgcgatatcctgcggtccaacgccttttaccggttctccggttaaatatacggctacaacgcccggcatattgatatcataagtctgctctaaaagctgttttacaagctccggtccaccttcgcccattgccatggttcccagtgctccgtaacgggtatgggaatcagaaccaagaatcatttttccgccgcctgcaagcatttcacgggcaaactggtgaataactgcctgatgaggtggtacatagattccgccgtatttctttgcacaggtcagtccaaacatgtggtcatcttcgttgatggttccaccgactgcacaaaggctgttatgacagttggtcagtacataaggaattggaaacttttccagtccggatgctctggctgtctggataattccaacatatgtaatgtcatgggaagtcagcttatcaaatttgattttcagcttctccatgctgccagatgtgttgtggtcctttaaaataccgtatgcaatggtattttttgctgcttcttctttgcttaccgcagtgcctgtcatggatgcaatagctgcggatgcttcgctattgtcttctactacggtacatccgtttacgagatatgcccctgtctcatgtaacttcat

SEQ ID NO: 55 - DNA, 8554 bp, unidentified
  source 1..8554: mol_type = unassigned DNA
atgatgaaaaagttgattaaaatattatcattttttgttttgatgattgtcgtattgtctggttgtcggaaagataattatgatgaacctgaatcttttataaccggacgagttgtatatcaaggtagaccacttcagttaaaaggaaatgaaggtgttgttttacaattgtatcaaagtggttatgaacttcatgatccatttaatgtacatgttaatcaaaatggagaattttcgatttgtatttttgatgggcaatatcagttgataacaaaagcaggacatggtccatggacttctgaaggaagagatacaatatatattgatctgaatggttatgctaatgttgatgtaaatgtgcaaccatattatttggttgataatgcaaaaataactcttgatggaaataaggttaatgcttccttcgatgttaataatgttgcaggaaagggtattgaccgtgtgatgttattattgggaactacacagttcttatgtgatgataatcataatgtggatagatatgatgaaactgataacatggctgaatacaaagacggaggtaagacttatgtatttcaaacaagagattatgccgaacatcaaatgtttcaaactgctctgaaacgtggtactttgtttggtcgtattgcattatggccttccggttctgaccaagctatatattctgaagtaatacgtttaaaatgataatggttatatctttctaaatttacatttataggctataaagggacttactttagatataattttaatgtaagtccctttttgtatataaatgaatagaaaatgccattaattgcacaagaattatcggtgaatgaaataagaacaatttttctttgcaataagtgagttgttttgtaaaaaatctgtattctcatacaatacttcggtaaaaatttaccgaagtattggtttaaagaatagggatttaaatctagaattttgggatgcataatataaaaaggagttgtatcaacgagatacaactcctttttgttttatcaacagtggattttataaaacttcggtattgtcttgttgtttggctggatgcggatagtctatggtgtaatgtagccctctgctttctttacgttccatagcctgacgcgtaattaaatagccgacattaatcatattacgcagttcacagatttcacgtgaagcctttacacgcttaaacaatcgttctgtttcttcgtataagatgtccagacgattccatgcacgaacaagacgaagattgcttcgtacgatacctacgtatgattccataatctgatttacttctttcatgctctgagtaatcaggatgcgttcttcattgctgattgtaccttctgcattccattcaggaatatcttcattgaagtcataacggtcgagaacgcttaaagcatgtttcgcagcagagtctgcatacacgatagcctcaataagcgaattggaagcaagacggtttcctccatgcaatccggtacaagagcattctccaatagcatacagacgtttgatgctagattgtccgtccaagtcaactttgataccgccacacaagtaatgagcagcaggagccaccggaatataatccttggtaatatctataccctggctaagacattttttataaatattggggaagtgtttctttgtttcttccggatctttatgggttacatccaaatatacatgatcttcaccccgttgtttcatttcactatctatggcacgggctacgatgtcgcgcggagcaagtgataaacgtggatcatatttttgcataaattcttctccgccgagatttcttaatacagctccatatccacgcatggcttctgttattaagaaactaggacggtctcccggatgatacaaggctgttggatggaactggatgaattccatatcctttacaagtcccttagcacgataaaccattgcgataccgtcaccagtggcaaccagcggattggttgtatgggtatatacagcttcacatcctcctgtagccattactgtgacttttgaaaggaaggtatctacatctcctgttttttcattcaatacataagcaccaaaacatttaatgcctggtgtatgacgggttacgatgatgccaagatgatgctgagtgataatttctacagcatagaagctggtaaatactgtgatattaggatgtttttttacagcttcgatcaggctcgtctgaatttctgctccagtattgtccttatggtgtaaaatgcggaattcagagtgccctccttctttatgtaaatcgaattctccgttttcggttttatcgaagttaactccccagtttattaattcttcaatctgagcaggggcattacgcactactttttctacagcttccgggtcgctaatccagtcgccagctaccattgtatcgtggatatgcttttcgaagttatccactttcagattcgttacagaagcaattcctccttgtgcatagtaggtattggcttcttctagtccggctttgcagatcagtgcaaccgaacctttatgcgcaactttcagcgcaaagctcattccggcaattcctgaaccgataacgagaaaatcgaattttcttaccataataaaatatgtatatattgttgcaaaactacaaaaaaactgacatgagagcactgtctctttgttttttttctaaagaaccttatgataagtatggttttcggtgataaattgctatcttcacaaagaattaataaatcttgtagatataatggacaggacttttcactctaaagtagactggtggtactggttactgatggctgtaactgcttttttattgttcgatttcttttggtttcattataccatagccacattactggttgctgctgtgatgatatttgaaattgaaatgttaatacatacacgttatattgttacgggtagtggcaagttattgattgaaacaggacgctttgtggctgataaaactatattactgaatactattgtcggtatgtgcgaagtaaattctttctccattgctcctgccctttctgttcatcgagttgagataacttatcgtgtcggtgataaacatgaaaaagtttttgtctctcctcaaaatgcggaagattttatccgatgggtacagaaaaaaatgaaaagtggcgaaaatacagatatgatcgataactaaaatatgttttatgaaaaatttcaaacctcgaaaatcggtaaagagatttatatgtgaaactcttataagtgctcttgtcctgactgttatattaggtataatctattatcaggaaagactttgggtacttgctatggtattgatttttatacttgatgtattgttctgcatgttcgaagaaataaaagaataccggatagatgatgatggaacagtacatgtagtttgttatttaggcttttcaaaggtcgttttgaagggaattaccaaagtgtattttgacccccagcgtaaagctctgcgtatcattgctgaaaaaagtgacaggtggtatcctttacaggagccggaattgtttgtagatactctatacgaatattatccggatatggaatacgaaaactggagctgatataaattgaaacctattaatctaaataaaataatatgaaattccaacttgcaattattggtggaggtcctgccggatatacagctgccgaagctgccggtaaggctggattgagtgttgttctgttcgaaaagaatagtttgggaggtgtttgtctgaatgaaggatgtataccgacgaagacattgctttattcagctaaagtatacgattatgcccgtcatgcatcgaaatatgctgtaagtgtaccagacgcttcttttgatttgccgaaaattatttcacgaaaagccaaggttgtccgtaaactggttttaggcattaaggctaaactggcagcacagcaggttactgttgttaatggagaagcttatattgtggataagaatactgtacgttgtgcagatgaaacgtacgaatgtgaacatctgattatttgtacaggtagtcagactgttattcctccgatacaaggtattgatcaggttagttattggactcaccgtgatgcactcgataataaagaattgcctcgttcgcttgctattgtaggaggaggagttatcggaatggagtttgcttctttcttttccagcttgggagtacaagtaaccgtcatcgaaatgatgaatgaaatcttgaatggcatcgatcgtgaacttgcggcttctcttcgcacagaatattcaaagaaaggagttaaattcctgcttggcgccaaagtaaccagtctttcacaggatgacgaaggaatacatgtacattatgaaaatgcggatggagcaaacagtatatgtgccgataagctgttgatgagtgtaggtcgtcggcctgttacagaaggctttggtcttgaaaatctgaatctggagctaacagggcgtaggcatatccgtgtcgatgctcatttacgtacctctgttcctggagtatatgtatgtggtgatctgaatggcgtttctttgctggctcatacggctgtgagagaagcagaaatagccgtaaaagatattttgggtgagccggaagaaatgagttaccgtgctattccaggagttgtttataccaatccggaaattgcttctgtaggacagacagaagaggtgttgcaggcaaatggtacttcatatcgtacagtgaaattgcccatggcatattcaggacggtttgttgctgaaaatgaaggttcaaatggagttattaaagttttggtagacgataaagatacggtgcttggcgtacatatattgggaaatcctgcttccgagttaattgtcttgggaggtatgatggtagaagaacaccgtaatctggaatattttaaacgttttgtttttccgcacccgacagtaggtgaaatctttagagaattgtaatatatgaagcgaacaggactagtattaatctctctcataatatgttgttgtacactggctgcccagtctattgccggaaagctggatgcattggtttcttcagaaaaagtattgacgacttcggaggttggcattagtgttttcaatttgacacaaggaaagcagatgtatgcctatcaggataaaaaactttatcgtcctgcctccattgaaaaagtgataacatcggttactgcattggcagagcttagagaatattatcttttcaatacacggattgcttatacaggaactatcgttcaggacagtatattacagggagatttatatctagtcggtggattcgatccggagtttatggatgaggatatgaataaactggtagaagctgttcataactccggaatacgttgcattcaagggagcctgattgcagatgtatcgttgacagactctatttattggggggcaggatggtcttgggatgatactcccgaagcctttcagccatatttatctccgctcatgttaaacagaggatgcgtaaatgtaacagtaattcccacatcgaagggaagaaagccgaaaatagaggttataccagaatctgattattacaccgtttgcaatttagctcagagctatgctccgcaatgtggaaaactgaaagttacccgtaactggctggataatggtaatacgatttgtgtagatggaaatgctaattacagatgtacaaagacactgaatatgtattcgtcaaaagatttttttctgcatacatttgcttatcgtttaaaagaaacgggtatttctatacagtcagtccggtatggaatatgtccggatgaggcaactggtatgtatacattttcacgaccgttggaacctgtattaaaacgtgcgttgaagaaaagtgataatctgtctgccgaagcaatgttttatcatctggctatcagtcgttctgggaaaaaaaatgtaggttttaaggatgcgcaggaagttattcactcctttatgaagcatgagatcgggcgtaatcccgataattacagtatcgtagatggcagtggtgtatcactttacaattatatctctcccgatttgatgatggagtatctgaaatatgcttatgcacatcctgagatctttcatacattttatgaggctcttcccgttgcgggagtagatgggacactgcattatcgtatgaagcagggaaaagcatatcggaatgtacatgccaagaccggtactgttacagggataagttcgcttgccggatatgtaaaagcaggaaatggcgatatgcttgcttttgttattatcaaccagaatgttttacgaggtaaggaagctcgtgcatttcaagataagatttgcgaaatattagcacactaataaaaagaaattagtatatttgtgaacttagaaaattagaataaataaatccgtgttcgtaaacggaaaaacaatttgcttttttaaggttgatattagttattaacaatataaacactaaagaaaactatggttaatttttcactcgaaggtaaagtagctcttgtaacaggagcttcttacggtatcggttttgcaattgcaacaggttttgcacaggctggtgcaaaaattgtattcaacgacatcaagcaggaactggtagacaaaggtcttgcagcatataaggagctgggtattgatgctcgtggttatgtttgtgatgtaaccaacgaagaagctgtaaatgctctggttgcccagattgaaaaggaagtaggtgttatcgatattctggtaaacaatgcaggtatcatcaagcgtattccgatgtgtgagatgtcagcagccgaattccgtcaggtaatcgatgttgatttgaatgctccgttcatcgtatcaaaagctgttattccgagcatgatcaagaaaggtcacggaaagattatcaacatctgttcaatgatgagtgagcttggccgtgaaacagtatcggcttatgcagcagcaaaaggcggcttgaagatgcttacccgcaacatcgcatctgaatatggtgaattcaatatccagtgtaacggtatcggtccgggttatatcgctactcctcagaccgctcctttgcgtgaacgtcaggcagacggttctcgtcatcctttcgatgctttcattgttgccaagactcctgctgcacgctggggaaatccggaagatctgatgggtccggctattttccttgcttcggatgcttcaaacttcgtaaacggtcatgtactttacgtagacggtggtattctggcttatatcggaaagcagcctaaataattttagttcttcccgagagatataaaaaaactagctgaagttttttataaaacttcagctagtttttttattttttgtacgaattttcggtcaaacttcatgatgttttttccggcttatgcgctttatccaaagataatatcctgtaagtggtaaaatacctcctacgaatgcagacagaaaatatagaacacgggttatgatacctccccattgtccggtgtggaatgaatatatgattcctttcatcttgctggatataggttgttcattggcatcatagattgttatttctgtaatttttccagtatgagcatcaaataatgctgtgtcacctttccgttttcctgtctgaatgatctgtgcattatttttgtttaactggattgtgccatagctgttatactttgtttgcagttccgcaagggcagtatcccaggtcagatagtttgtttgctctgctcgctttcttttttctttattattatgtccttctccatgtgcggcagtctgctgtggctgttcggtagaagctccaaagagtgcataaaatccggtacgataccatcggaacgaccacgttagtccggtaagagccatgattagcagaaagatggttgcatagaaacctaatgatacatgactgtcgtaccagaaacggaaccagcctttgttgcatgataatttaagccggttttgcagacttttgcagctacggggccaccagattactaaacctgatatcagaataaccaccatgagcagggtacttatgcctacaatggtttttcctgttgacggagctcctttctgagcaggagcatccagtagccagcgatgtaatttgcggacagtctggaagaaagaacttccttctacccatccgtttatttctcccgaatagggattaatacttaactggcggcgtccggcatttttaaagcttaccatccaggcttcttcagtattttgggctgtttgcaggctgtttacttccagggtatcacttatttggttgttgataagtgcgacaatctgcgaaggttttagcggcgtagccccttctgtatagtctacggtatatagatgaggactgactgcacgggttatttccttctcgaataccaggagtgcccctgtcaggcagacaattgaaataatcagcccgacaggaacagatatccataagtgtatttgtttgaataattttctcat

SEQ ID NO: 56 - DNA, 26258 bp, unidentified
  source 1..26258: mol_type = unassigned DNA
atgagcaaacccatcgtagcagtggtcggccgccccaatgtgggcaagtccaccctgttcaataagctctgcggccagcggctggccatcgtggaggataccccgggcatcacccgcgaccgcatttttgcaaactgcgagtggagcggccacgagttcatgctggtggacaccggcggcatcgagcccaaggcgaccgagggtattctggcccacatgcgtgagcaggcagagatcgccattgacaccgctgactgcatcatcatggtggtggatgtccgcgacggcctgaccgccgccgacgaggaagtggcccacatgctgcgccgcagccataaacccatcatcctggctgtcaacaagtgcgataagaccggcgaggcccccatggagctctacgagttctataacctgggctttgacgaggtgatgcccatctcgtccgtgcatggtcacggcaccggcgacctgctggacgctgtctgcgcccacctcgatttcagcgagaccgtggtggaggaggatcgcatccccgttgccatcatcggccgccccaacgtgggcaaatccagcctgaccaaccgcatcctgggtgagaaccggatgatcgttgccaacgaggctggtaccacccgtgatgccattgacacccctgtggataacgcttacggcaagttcatctttaccgataccgccggtctgcgcaagcgcagcaacatctctgacggcctcgagcgctatatggttgtgcgcgcgctggccgctgtggagcgcagccgcgtggccctgatcctggtggatgccaccgttggctttaccgagcaggacagcaaggtggccggttatgcccacgagcagggcaaggcctgcatcatcgttgtcaacaagtgggatgctgtggagggcaaggagaccaacaccatggagcatcagcgccgggattacgccgattgcttcagcttcatggggtatgcgcccatcatctttatttcggcccagaccggctataacgtgaacaagctgatgcagctgatccgtgacgtggatgcccagaacggtgcccgcgtgcccaccggtgtcctgaacgagatgctggcccgcgctaccgcccggatgcagccgcccagtgacaagggccgccgcctgaagatcttctacctgacccaggcttccacccgtcccccgacgtttgtggccttcgtcaactccaagcagctgttccatttcagctatcagcggtatctgatcaaccagatccgggagaactttggtctggaacacacgcccatccgcctggtgatccgtgagcgcggcaccggcagcgtcggcgcaaaagatgtgtaacaggggaggcggctgttgatgatgaccttcttcatcgttctggctgccgctgcgcaggcttacctgctgggcagcgtggacaccggcatcctggtcagcaagtacctgtaccatgatgatgtccgcaatcacggcagcggtgcagccggtatgaccaacatgctgcgcacctttggcaaaaaggcagcggcgttcaccgccgcaggcgatgtgctgaaaggcgttgccgctgtctgcatcggccgctggctcttcgggttcctgcccgcagatgccgccgtttcgccctatctgggcgtgtatctgactgccattctggccgtggtgggccacaccaagcccatctatttcggcttcaagggcggcaagggcgtgctggtggcgggaggggccatcctggcgatccagcccatcctcctgccggtgctgaccgtcgtctttctgctctgccttgtccccaccggcatggtgtcgctgggcagcattgcaatggcggcatcctatccggtgctgaccctcatctacggcctgctcaagggctttgccgctgacgacctcatcgtctgcgtggtgggagctgccatcatgggcggcatggtcatctggatgcaccgggccaatatccagcgcatccgtgagggcaaagagtaccgctttggttccaggcacaagcagtaaccggaacaaaaataacagcgcatccttcgggcagagcctgcctgcgggatgcgctgttttgcgtggagggggctgtgcccggtcgatgtgcctgcacggttcagtttactgaaaaatctttgcaaaaaaggttgacaaagggcggcgcagctggtataataattcacgttgcaggacacgaaccaaatatgtgggggattagctcagctgggagagcgcttgcatggcatgcaagaggtcagcggttcgatcccgctattctccaccaaaaaagcactgtacttcgtagaaagtatggtgcttttctttttctcagccgcaaaaaatgggggctgcactgccttgtctgcatcgttttcagatgttttgcaggcggttcagtgcagcccccgagtcattggtgcttcggcaggtcagaaggtgccggttcagctgacgatctccagcatctgatcgaacacctcttccatctggcgcaccagcgtgaactgggtgcgggcgcggtcaaggttgtggtcggggcgggcggtgtggaaatagtgatcgccctccagatagtcggtcagaaagcggatgccgcactccagcgtcatcagcttggcaccccaggcaaggctctttttctccgcagggctcatggaagccccggcagtggagagataccccttggcgaacacctcgtacaggtgcaggtcaaagtggaccttgctctggtcgggctcgtcctcggcgcagtcgttggcaccggtgcggatggagtcgccgaaatcgtaggccgacaggcccggcatcacggtgtcaaggtcaatgacgcagatgccttttccggtggcggcatcgatcaggacgttgttgatcttggtgtcgttgtgggtaacacgcagcgggatctcaccggctgccagcagatccagcagggtgtggcagtccttttcccgcgcgtggatgaaggcgacctccggtgcaatgtccttggcacggcccagcgcatcggcggcaagggctttttcaaagtttgcatagcggttgggtgtgtcgtggaagcgggcaatggtttcgtggagggtagaggccggataatctgccagctggttctgaaatttgcccagggtctcggcaacagtgcggaagtcggcctcgctgcccacctgctgcaggcagatggtgtcctccacaaaatcgtaggcacgccacgcgccgccctcggcatccagatggcaggccgcgccggacagggtggggatcacgttcagggtctcccgtgccgggtcgccgcctgcggcaaggatcttctcccgcagatgccgggtcacgccgcagatgttctccatcaggcccaccgggtcggtaaaggtgtcggtgttgatgcgctgtaagataaagcgcttggagtggtcctcccgccagaccacgaaggtatcgttgatgtgaccttcgccgtagtgacgggcatcgcagaccacaggcccgccaaaatcaaaggcatttgcggcggcgcggagaatgggttcagtaacaggtttcattttgagttcctcatttcttatccttcatgccgtttggcaggtgcagggcgttgtccctgccgcacctgacggcggtattcgttgggggtcaggccttccgccttgcggaagcactgcgaaaagtagctgggggaggaaaatcccatcagctcgctgatctgcgccaggctgtaaccggtgttgcccagcatatatttgctctcttcaatgcggcggcggttcaggtaggtgatgggagaaatgccgtatgccttctggaaggtgtgggccagataatatttgttgatgtgggcaacctcggcaagggtatcaagggagatttcctcccggtagttgttgtccagataccgcttgatctccacgcattcccggttgtcggagcggggggattcctccacctgcaaagagagggtggtgcaccgcaccagccagatgagcaggacttccagcaggtcctggcagacggtctcgcagccgtccagactgcggtctgcctcagccagcagcatgtgcagcagcgttaccatccgctcccggttttcccggcagttgaagatggcgtaggtggaatcggctttgccaaacaggatctcgatacccgaaacgcccagtacgatgtattccaaaggcgaggcgttcaggctcagctcggtgtgctccacctgcgggttgacgatgaccatatcatccggcttgaccgggaacagctgcccgctgagcagaaactgcccctcgccgctgaggcagtagaacagctccgtgcaggaatgggtgtggaccgtgctgttccagtcgccgccgaatctgctcttgctgatgtacagcagccggaaggattcccgtggagcgggagcgtggcggatatcaaagcgctcggtactcataaaaggctccttttgaagcagacgcaaaaaatataaaaataaaagcaagatactaaaaattaaatgcgaaaaacgccgcactgcttcgtgcattttttctcattataggggcaaataagaaaaaaagcaagccctgttttttagcatggtaaatattttcctctgcacagaaagacggaaatgtgtcaaattggttacaggttgggagaatgtaccaaaacaatgccgcaaaatttagtacttttgctgaagaaaatgataaaaaagcaatatttataaaaaatgaaacaacaaagaccttgttgaaaactgcaaaaacctctatattggaatcacaaaaaacacagcccctcgggcaaaacctgtttgctccggctgtgcatgaacggaactttatgatggaggacacattatgaaacgcatttctcgtcgcaatttcctgaaagtggccggtgtgggtgccgctgcactgggtctggctgcctgcggcggttcttccagctccacagcttccagcacggcttcttccgctgctgcatctgccgctcccgctgaggacgtgaccatcaaggttgccgccatcgagaccggctatggcgctgatatgtggaagaaggtcactgaggcctttaccgcccagaccggcatcaaggtggagctgaccaccgacaagaagctggaggatgtcatcggaccttccatgcagggcggcgattaccccgacgtgatccacctggctaccggccgtgaggctgccctgaccgagcagttcatcaagggcaacctgatcgcggatatcaccgatgtgctgagcatgaccgtgcccggcgagagcaagaaggtgagcgagaagatcgccggcggctttaccgacacctccctgaccaacccctacggcgacggcaaaacctatctggctcccatgttctacagcccctgcggcctgttctacaacgccggtttcctgaaggaaaagggctgggacgtgcccaagacctgggacgagatgtgggcactgggcgacaaggctgccgctgagggcacctacctgttcacctaccccaccaccggctacttcgacgccttcttctatgcgctgatgtacgctgccggcggcccggagttcttcaacaaggctacccactacgaagaaggcatctgggacacccccgaggcaaagacctgctttgatatcgtggcaaagctggcttcctacaccaaccccattacccccgcacaggccaacgatcaggactttacccagaaccagcagctggtgctggacaacaaggccctgttcatgcccaacggcacctggatcgtgggcgagatggccgaggctccccgtgcagacggctttgagtggggcatgaccgccctgcccgctgtcaaggccggcggcgaccgctacagctacacctggttcgagcaggcatggatcccggccggtgctgagcatctggatgcagccaagcagttcgtggcttacctgtacagcgacgaagcctgcaagctgtttgccgagagcggcgctatccagcctgtgctgggcatcgccgacagtctggaaggcgacaacaagatgttctactccatctacgacaacggcgcaaaggccgctatgggcaactttgcagccttcagtgccatccccggcgtggaagtgcgcaccgtgttcttcgaccctgtcaactctctggtgtccggcagcatgaccgagcagcagtggatcgacggcatcaagtccgccagcgaccagatgcgtgccaatatcatcgaataattgaaccctgcccagcgggggcggttttgaccgcctccgctttttgtggttttcgggttccgatagaaaggagcggtttgtctatgagatctgacaaaagccgcagacggttcgtctttctctgcgtggcaccggccacgatcctgttctttctctttatgatcctgcccaccctcaacgtgttccgcatgagcctgtacgagcgcggtgcctactcgcccaacgagacctttgtgggtctgaagaatttccaacacctgctcaaggacacccagttcatccgctccatgcagaatatgatcctgctggtggtagtggtgaccatcgtcacctttgcctttgcgctggtgtttgcggccattctgacccgggaaaagatcaaggggcagaatttcttccgggtcatcttctacatccccaacatcctgtcggtggtcgtcatctccggcatcttctcagccatctataagccggaaaacggtatgctgaacagcatcatcggtctgttccgggatatgacagaccccatcctctggaagggcgaaaagctggtcatcccctccatcatcatcgccatggtctggcaggccgtgggctattacatggtcatgtatatggcttccatgtcttcggtgcccgccagcctgtacgagagcgccaatctggacggtgcgggccgcctgacccagttcttccagatcaccattcccctcatctggaccaacatccgcaccaccctgaccttcttcatcatctccaccatcaacatggccttcctctttgtcaaggccatgaccagcggcgggcccaacggtgcttcggatgtggcgctgagctatatgtacagccagaaggacgcgggcctgtatggctacagcatggccattggcgtggtcattttcctgttctcgtttgcactgtccgcctgtgtcaacaaggccaccgaccgcgatccgctggaattctaaggagggaagaagatgcagaataccaccgaaagatcttcccgctcggcggaaggtctctacaagttctttatctattttgtgctggtcctgctggcggtgatcatcatcgtgccggtggcatgggtattcatggcctccatcaagcagaacgcggagttttacggcaacccgtgggcgctgcctgccgggttctactggcagaactttgtcaatgcgtggaacggagccaagatgggcgagtatatgctcaactctgtcatcgtgaccgcattggcgctggtactgctgctggtcattgcgctgcctgccgcctactgtctgtcccgcttccggttcaagggccgcaaattgctgaacaccctgtttatggcgggcctgttcatcaatgtcaactacatcgtggtgcccatcttcctgatgctgcgggacggcgatgtctggctgaagagccactttggcagcagcttcctgctgaacaatctggtggtgctggcggtggtgtatgcagccacggccctgccttttaccatctatctgctttcgggctattttgccaccctgccccatgattttgaggaggctgcctacatcgacggtgcaagctacttctccaccatgacccgtatcatcttccccatggcaaagccctccatcatcaccatcatcctgttcaacttcctgtccttctggaatgagtacatcatttccatgacgctgatgagctccaccagcgcgccccgcaccctgccggtgggccttttgaatctgatgcaggcccagcagagcgcggcccagtacggcaccatgtatgccggtctggtgctggtgatgctgcccaccctgatcctgtacatctgcgtgcagaagcagctgacacagggcatgaccgtgggcggtctgaaagggtaaggtgacaaacgatgaaagcattctggaaaaatcatcccgccctgcgcatggtgctgatgctggtgctgtttgtgctgtccatcgcgctggtgacagcaggctggaaaatgaccgggcagctggctggtcttggcatcatgcttttgggggtggcgctgctgctggccgtgctggcgctctataacgccccctatcaggattgaggagaagagaggtaaaggagaattcccatggaagaaaatagaatgaccgggcgcgtaacgatcccgaccgatctggacgtggtgcccgaaacgctggagatcctgaaaaagtggggcgcggatgccatccgcgactgcgacggcaccgactttccgcaggagctgaaggatgccgacgcaaagatctactccacctactataccacccgcaaggacaacgcgtgggccaaggcgaacccggatgaggtgcagcagtgctacattatgaccggcttctacaccgcccccggtgacaccgtgaccattccactgatgaagggcatcagcccggagttgatgcaggtgaacaccaacgacgacatcacccgctggtgggaggtcatggaccgaaccaccggtcagcccgtgcccccggcacagtggagctacgccgacggcagcgtgacggtgcaggccgtgccgttccacgagtacaccgtcagctttctggcctacctgatctgggacccggtgcacatgtacaatgctaccaccaacggctggaccaactttgagcaccagatcacctttgacgtgcgccagcccaagacccacaaatactccatggagcggctgcggaagttcattgcagaccacccctatgtcaacgtgatccgctacaccaccttcttccaccagtttaccctgatcttcgatgagctgaagcgggagaagttcgtggactggtacggctattccgcctcggtcagcccctatatcctgaagcagttcgagaaggaggtgggctataagttccgcccggagtacatcatcgatcagggctactacaacaaccagtaccgggtgcccagcagggaattccgggattttcaggcattccagcgccgggaggtggcaaagcttgccaaggagatggtggatatcacccacgagtgcggctgcgaggccatgatgttcctgggggaccactggatcggcaccgagccctttatgccggagttcaagaccatcggtctggatgccgtggtgggcagtgtgggcaacggttccactctgcgcctgatctcagacatcgagggcgtaaagtacaccgagggccgctttttaccctacttcttcccggacaccttccacgagggcggcgacccggtgcgggaggccaaggaaaactgggtcacggcccgccgcgccatcctgcgcaagcccatcgaccgcatcggctacggcggctacctgaagctggcgctgcagttcccggagttcgtggactatgtggagagcgtctgcagcgagttccgtgagctgtatgagaacatcaagggcaccacgccctactgcgtcaagcgggtggccgtgctgaactgctggggcaagatgcgggcctggggctgccacatggtgcaccacgccctctactacaagcagaactacagctactccggtgtcatcgaaatgctgtccggcgcgccctttgacgtgaagttcatcagctttgaggacatcaagaaggaccccgccctgctggatgagctggatgtcatcatcaatgtgggcgatgctgacaccgcccacaccggcggcatttggtgggaggacccggagatctcctccgcgatccggaagttcgtctggaacggcggcggcctcatcggcgtgggtgagccctccggtcatgcctatcagggccacatcctccagctggccagcgtgctgggcgtggaagaggaaaacggcttcaccctcaactacgacaagtacaactgggaagagcacccggaccacttcattctgcaggatgccgaccagcccatcgactttggcgagggcaagaagaacatctacgccctcgagggtaccgaggtgctggtgcagcggaacagggaagtgcagatggcggcacacgactttggtaagggccgcgcggtctacatcagcggtgtgccttacagctttgccaacagccgcaccctgtaccgtgccatcctgtggagcgcccacagcgaggaggagctgcacacctggttcagctccaactacaatgtggaagtgcacgcctatgtaaaaaatggcaagtactgcgtggtgaacaacacctacgagccgcaggacaccacggtctacaccaccgatggaaaccatttcgacctgcatctggaagccaacgagatcaaatggtatgagatctgagttctccgtttcataagcaaacacccctctgcattccgaaaggagcgcagaggggtgtttgtgtatccgggcggctcagcggggagagcccagacggtatttgaaatcgtggtagccgaagcgggccagcggctgggtggtgccgttttcatgcagcacccagatatccggcaggggcatcccgttgaaggtgttgttcttgcaggtggaatagatggccatgtcgccgaagatgagccggtcaccctcggtgaggggggcggcaaagctgtaatcgcccaccacgtccccggcaaggcaggtggggccgcccagccggaaggtgcagggcttttcccccggctcgccagcgtccagcaggggcgggcggtagggcatctcgatgacatccggcgtgtggcaggctgcggacatgtccagaatggcaagatgtgtctgaccattctgcagggtgtccagcaccgtggtgacgaggtagcctgcgttcagcgcccaggcctcgcccggttccagatacacctgcacgccgtacttttcctgcatcccggtgatgcacgtttccagcgtggcaaggtcgtaatccgggcgggtgatgtggtgcccgccgccaaagttgagccacttcatccggggcagcaggtcaccgaatttcgcttccagcgcgggcagggtggccgccagcgcgtcggaatcctgctcgcacagggtgtggaagtgcaggccgtccagcaggtcgggcaggtcagggtgctgcgccgcagcggcatcccactgggcacgggtggtgccaagacggctgcccggggcgcaggggtcatagatctcgtgtccctcctgggtggaatactcggggttcacccgcaggcccacgctcttgcccgccgcctttgcggccgggccgaactttgccagctggtggggcgagttgaacacgatgtggtcagcgtattgcagcagctcctcgaactggtcggcccggtaggcggcgcagaacacatggttctccttctccggcagctcctccctgcccaggcggctctcgtacaggccgctggcctcggtgcctgccagatagggggccagcaccgggtagaggtcgtagttggaaaaggccttctgggccagcaggatcttgcagcctgtccgctgctgcacgcccagcaggatctcgccgttgcggtgcagccgggcttcatccagcaggtagcagggggtgggcagtgcagccagtgcagcctcagagaggctcgccagccccgcaaagggcgggcgggtgtcggccagccgcatcagtccaccagagccggggcgtggctctcggagcggggcaggccgtacttgtccagagcatccagatacgggtccggatcaaactcttccacagtgtgcacgcccttggtggtccacttgccggtcagcagcatcagcgcgccgcacatggcaggcacaccggtggtgtagctgatggcctgagagccgacctccttgtagcactcctgatggtcgcagacattgtagatgtagtaggtcttttccttgccgtccttcttgccggtgaagatgcagccgatgttggtcttgcccttggtgcgggggccaaggctggcggggtcgggcagcagggccttgaggaactggatgggcacgatctcctgaccgttgaagttgaccggggtggtggacagcatgcccacgtcctccagacagcgcatgtggtcgaggtagctctggccgaaggtcataaagaagcggatgcgctttgcctcggggatgttcttggccagagactcgatctcctcgtggtggagcaggtacatatccttctggcccacctgatcaaagttgtactcccgcttgatgctcatggccggaatctccacccagtggccgttctcccagtagctgccgggggcagagacttcgcgcaggttgatctccgggttgaagttggtggcaaaggcatagccgtggtcgccgccgttgcagtccagaatgtcgatggtgtcgatggtgtcgaactcgtgcttcttggcgtaagcgcagtaagcctgggtcacgcccgggtcaaagccgctgcccaacagggcggtcaggccggcctcctcaaacttcttggcgtaggcccactgccagctgtaatcaaagtaggcggagaaaccggcctccttgcagcgcttctcgtaaatggcgcgccactccgggtcgtcggtgttctcgggctcgtagttggcggtgtccatgtagttcacaccgcaggccaggcaggcatccatgatggtcagatcctgatagggcagggcgatgttcatcaccagatcgggctggtagctcttgatgagggcgatgacctcgtccacgtggtcggcatccacctgtgcggtggtgatcttggtggtggtcttgggggccagctcggcggccagcttgtcacactttgccttggtgcggctggcgatgcagatctcggtgaacacctcggggacctggcagcacttgtggatggcaacggaggccacgccgccgcagccgatgatcagaactttgctcatatcggttactcctttatctgtaaagttgtctttttacggtctgtccttatacctgaaagcccggccagcccttgtccagcgcaatcagcagctcccgcaggaccttgcaggccgtggccgtggaaacgccggtggtgtccagcgtgggagccagctcgttgaggtccgcacccacgatgttggccttggtcacggtgcggatggcctccagcagctgcaaaaagctcacgccgccggcctccggggtgccggtgccggggaagcaggaggggtccaggcagtcgaggtcgatggtcaggtaaacgggcaccttgctggcacagagctgctcagtgagctgggcaaggcccgtgaaatcgaacttgtgcatctcagtgtgagcagccgcgaactcaaactcggtgcggtcaccgctgcggatgcagaactggtggatgcgtccgtcgccgatgaggtcatggcagcggcgcaggacacaggcgtggctgagctttgcacccagatagtcgtcccgcagatcggcgtgggcatcaaagtggacgatgtggaggtcggggtacttttccaccatggcccgcacggcacccagcgtgaccagatgctcgccgcccagcaggagcgggaacttgccgtcgtgcaggatctctgccgcgcggctctggatgtcggccagtgcgctctcgctggagccgaagcagagctccagatcgccgctgtcgaagatgtcaaaatcggtcaggtcggcgttctggtaggggctgtaagtctccagaccgtagctctcatgccggatggcagccgggccgaaccgggcccccgggcggtagctggtggtggaatcgtagggggcaccgtacagcacgatgctggcggcacggtagctgctgtcgcagccgataaaggtttcaacgttggggtaaagcatcagtgttcctccacttcccgcagcatctcctccagaaaagccggcaggtagaatgctccgatatgcagtttggtggtgtagtaccgggtgcgcatgttcagggccttccaggcggttgcatccagatcatcaatggggtggtacttcttgctggcaaagccgaacagccagtagcccgctgcaaaagtggggatgtgggcctgatacacccggctgatggggaaggtggaagcaatgcgtttgtggctgcgctgcatggcgttggcatcctcggcgtagaaggggctgccctgctggttgaccatgatgccgtcctctttcagggcgttgaagcagctgccgtagaactcacgggtgaacagaccctcgctggggccgaagggatcggaggagtccacgatgatgaggtcgtattcttcctcgcactggcggatgaacttgagggcgttctcaaaatagatgtgcacccggcggtcatccatccggcaggcgttgccgggcaggtaggcgcggcaggcctccaccacctggggatccatctccaccaggtcgatgcgctccacccggtcgtagcgggtcagctcccgcaccacgccgccgtcgcctgcgccgatgacaaggatatcctttgcctcccggtgcacggccatgggcacatggacgatcatctcgtcgtagatgaactcgtcccgctcggtcagcatcacattgccgtccagtgtgagcacccggccaaactcgggcgtttcaaaaatatcaatgcgctgataatcgctctgcttggagtagagctgcttgttcacccggatgctgtgcttcacatcgggggtgtgaaattccgaaaaccaaaactccatctgttttccctccttatgccagaacgttcaggtgcaaaatatcagggtcctcagggccggtcatgctgcagcccttggccttggcgtactcgatatagttcaggatctccttggtgatgcgctcgccgggggccagaatgggaatgcccggcgggtagcacatgacgaactcgctgcagaccatgccctcggtctcccgcaggggtaggctctttttgggggcatagaaggcctcctgcgggctggcggccaccacggggtcgatgtattcttggctcagcaggccggtgccgtcggtgtggtagcggcgcttgatctcggccagagcgctgaccagccgctcgatctcctgggggcggtcgccgatggagaggtaggccaggatgttgccgatatcgccgaactcgatctggatgtcgtactcatcccgcaggatgtcgtagacctcgatgccggcaaggccgatgtccagcgtgtggacgctgagcttggtggtgtcaaagtcaaagacagagttgccgttgcacagttccttgccaaaggcatagtagccgcccacggcgttgatctcttcccgggcgtactcggccatatccgccacctgatggaacacctgccgcccccgcagggcgaggttgcggcgggagatgtccagactggacatgagcaggtagctgccggaggtggtctgggtcaggttgatgatctgccgcacatagccctgatgcacattgggcccgatgagcagcaggctgctctgggtcaggctgccgccgctcttgtgcatggagaccgaggccatatcggcccccgctgccatggcggaaacgggcaggccgttgccaaagtagaagtgggtgccgtgggcctcgtcggccaggcagagcatcccggcctcgtgggccatcttcacgatggcgcgcaggtcggaacagatgccgtagtaggtggggttgttcaccagaacggccacggcgttggggtgctccttgatggccttggccacctgctcccgcttcatgcccagcgagatgcccagccgcttgtccacctcgggattcacatagaccgggaccgcgccgcagagcaccagcgcgttcagcacactgcggtgcacattgcggggcaggatgatctcatcgccccgcttgcaggccgtcagcaccatgctctgcacagagctggtggtgccgcccaccattaaaaaggcatgggctgcgccaaaggcatcggcggccagctcctcggcctcccggatgaccgataccgggtggcagagattatccagcggcttcatgctgttcacgtccacacccacgcactgctggcccagaaaggccgtcagttccgggttgccgcggccccgcttgtggccgggtacatcaaaaggtaccacacgcatctgccggaattgctccagcgcctcataaatgggcgcgcggcgctgatccagccggaaccgtgtacggttctcactcatctcttctcctccgtccctggttccggcgcaacaaaaaagcgcaggcccaccacactggtgcagacctgcgcttgaaaaagcgttctgaacatgcaaacaaagccccggtgatactggggaaaacctccgcatggttcaaaaagacgggatgacgagagtctatatagcaattacacttttactactcttattgaccgtttcacaagtctgcacggcgttccgcgcaatttcatggttgtaaaggaaccaacttataaaatttgagcttcaaactcaatcaataatggcagcttgcgccgccggtcggcagtggacccggctgtccgtatggccttagccccgatgggcggtcccaggtaatttgctttgaaaagactctgacacgctttgtctctcaaaatcgatgatatcttatcatgctatgagggtggtgtcaatactttttgggaaaataaagcggaaaatgggcaagcggttcgcattatgacaaggacactgtaaagacatggtaaaagtgtggcaaaacactttgcacagacacggcaaaacgcttttgcttgacaaatgaaagaaattctactatactgattcttaccggtgcgccatcgccaagcggtaaggcaggggactttgactcccccatcgtaggttcgactcctgctggcgcaactgaaaaagaacccgcagggggcctgggcgacaggttccgtgcgggttttattttttgtgaaaagagggtgtttgtgtgaacgaagagaattctctgctgaccggggcagtgcggcccgcgctgctgcggtacgcgctgcccattatcctgagcatggtggcaacacagttttacgccgtggccgataccatgatcatcggcctgcggctggatgccgatgcgctggcggcagtgtccaacgcttccacggttctgatgatctttctgttcatctccggcggcatggagctgggcggcggcctgctggtggcggcgggcaagcccactgccacaaagcatgagatgacagagctgctgtacaacctgctgttcgtggatgaggtcatcgccctgttgaccacggcagtgggctttgtgaccctgccggccctgctgcggctgatcaacacgcctgcggagatcctggataccgctgtgctctacgggcgcatctatctgctggggctgccatttctgatgccctatgatctgagcaaggagtgtgtcatgggctgcggcgattccaaaacgccgctcaaggtcattgtggcgaccagcgtgatgaacattgtgcttgaccttgttctggtggggcccttcggggtggccggtgcggcggctgccacagcggcggcgcaggtggcgggcgcggtctacatggtggcgtttctgcgccgcacccagatggacgcggccttctcgccccggatgctcaaggcgcgctatgccagggatatcttccggctgtcggcccccaacagtgtccagcaggccagcggcaccatcatcaccacggtcaaacaggggctgctgggcggcctgggtgtggaagccattgcaggcttctcctgcgcaggcaagctgtccagcctgctgatgatgccggtgtttggctttgtgcagtccacagtgttctttattgcgcaaaacacagccgcccttcagccgggccgtgtgaaagagggcctgcgggaagggcggcggatcttgttggtgtattcgcttggggtggtggcggtctgcatcggcctgcgggggccgctgctccggctctttaccaccgacccggcagcggccagctatggctgcaccatgctggcctttgagtcggtgacctacctgtttgtggcacagaagcatctgttcgaggcccgcctgcgcggtgcccagaagatggggctgtatctggcctccagcctggggcagatcgccctgaacctgctggcctgcgtgatcctggtgccccgcatcggttttgcaggcttctggatgtccagctggatcagcgcacccatcggaatgctgctggcggcggcgctggcgaacctctcaggcgcttcgcaccagctcccctaataggggggcttgcctctcctattaggagaggtggcatcccgccgggatgacggagaggttcagccaatcacctcatactgaaaatactcgcacttgaccttgctgcccacctcgatctcgggcggcagcagggccagcgcaacgggattcagctcgtcgctttcaatgtcagtgcggcgcaggttgacataatcgccgtcaaagctgacgacctcgtaataccaggggcccataggataccttctttcatttgagcttttctttgagctgtcgctttttggagcggcggcttttttaatgcttccgtcttttcttttcgtcccaggcaaagtacccggtgtagagcaggaatacgggcagggcggcaagggtgacagtccggctcaggtggatgccgtccggctgatagacaaagtcgatggtgaccgttccggcagggcagaggacggccatcaggccctcgtccacccgcaggatctcggtttcctgcccatccacataggccgtgaagccgtcatcgtagggcacggagaagaacatcaggttggtcctgtccagcgtggcttcagcgtggaagcctgcgctggtcatctcaaaggcggtgcaggcagaggcccggcggtcggcgcagtcctgagtgtagcgggtgtaggtcaggtcgttgagctctgccgtgggcaggggcgtgaggtactgcccgtaggccaccgcatcttcctcagtgagcaccagtgcccgcatgagcaggttggagcgggtgggggtcacggtgtcctcgtactgggtctcggtgagatagtaatcgtaggtgaagcccatgggaacgtagttctggttctcgtagagaacatagccgtccagggtatcgtaatacgcccagccctcatcggcctcagcgtggaactgcttctgatgcgcaagcgtggtcagcaggtatctgacgctgagcaggccgcgcagggcgtagttggagagctcgggctgactgcgcacatcccgcttgacccccagtgccgggtagaagctgaggatgctgggagcggcggtgctgccgaaatactgcaggcagctcttgtccagccacaggcccagattgtcgtgggtcttgtaggtgtcaatgcgccagtcgccctcgggcagatcctccttcagggccagcgcgttgatgtactgctccacaaggtcactgtcggtgttccactggccgaacttgccaatgccgatgtggacgatgccgaacaggcagctgaacgccagcacaccggccagcaggcggcgggcaaagaccctgcgctgctgccagcgcctgcagatgcaatggtagacggccagcccgcccagaccaaaggcgagcactgcgcagtactggcccggattctgaagcacgcccaggctccactccttggtggtggcatcctgcacgggcaccagtgcaaaggccagcgtggcgatcatcacaaaggcaatgctccgggcggggcgggcgaggtcgaggctggggtcctcccacgcgctcgccgtcatggccgcaaggatgagcaccggcatatagaaccaccgggcatagtagctggaattgagggcataaaacgcgctgttcaggatgggcaccagcgcaaataccatgcagacggcaatgatccgctttttgctgtcgccctgccgggcacgccagtaggccaccacaccggccagactgcacaggggcagataggctgtcatgctggtccatttgatgatgccctcagaccagatggaggtcatatagggggaatccgggggcagcacccagctcagcaggatggccagatactgctggggcttggaataggtcagaaagccccagccggaggaaaggtcgatggtgcgcgggttctgcagcacgctgaggacagtgggccagagcaccacaaagcccagtgccacgcccagcaggctctcaaaggccagctgaccaaagagccggggtgtgagccggaactccccggtggagagcttgcagacgaagtagatgacaaggaagagcacctgccccacaaagaaaaagtagttgttgagcaggttcaccgccacccagaaggcaaaccaaccgtggcggcgctcgtagatggtctcatccagtgcccagagcatccaggggaagagggccagcacatcgatgaagtggttgaagaagatgttgtacagcccccagcccgaaaaggcgtagagggccgcgcccagcaccgcaaagttcgggtctttgacgtagcggcgcaggtacagatacgcgccgccgcccgccaccgcgaacttgagcaccagcagcggcaccatgagataggggagccagttctgcgggaagagcagggaaacccagaagaagggggagccgtacaggtagaacgaataggcgttcatggttccgctgcccaggtcagttgcccaggaaaaggtgttcttcacgcctccgtatccggcggggtagcctgcccccttgagaaagccgttcatgtagcggtaaaagctgatctgctggctgttgaaatcgcctgcatagtggaaaaagccgccgtccagcagatagaacggcaggaagatgagggcggctgtcagggcgcagagccccacggtgagccagaacttatcctgcttctgccccagcatccggggcgaagaatgaaatgcagtcatgcgtcagtcctcttttcagtatcggaaatttcccgcttacgggaacggcacctcgcgggtgtcatcggggtcctgcgcggccctgcgctgctgctcgaacaccgcgtcgatgagggtgtcgaggtcagagaggcggctcagctcacagcagtagcgccgcaggctggcggcccccttcaggcccttcatgtagtgcatggtctgggcccgggcctggggcatggcaacgaactcgcccttctgctccaccatctcctccacctgccggcgcagggcgttcatccgggcctgcaggttcggctccttgggggcgggcaggccctccagcgcggcgttcacccgctcaaaaagccaggggtcgcccagagcagcccgggcaatcatcacgccgtcgcagccggtctcctccaccatccgcacagcatcctcggcggtgcggatatcgccgttgcccagcacgggaacgtggacggcatccttcaccgccgcaatgatggacgggtcgatgcccggggtgtacatctgctcccgggtgcgggcgtggacggtgatgagcaccgcgcccgcctgctcacaggctttggcgcattccacggccgtgacgtgctccgcgtcccagcccttgcgcatcttcacggtgacggggcgggaggtgtttttgaccacttcctccacaatacggccgcagcggtcggggtcaagcatcagcttgctgcccgccccgcccgagacgatcttgggggccgggcagcccatgttgatgtccagaaaatcgaacgcgtactgctccacggcggcagcggcctgccccatgatttcgggcacttcgccaaagatctgcacgccgtagggggcaccgttgggttcggccttgagcaggctgacggttttgtggtcgccgtataccagcgcccggctggacaccatctcactgacagtaaaaccggctccgtgctgggccatcagccgccgggccggggcatcggtaaagcccgccatggggccgaacactgcccggtggggcagggagatctccctgatcttcaaaggggtgttgaaaggttccatgatactccttagcgctatctgatttagttgataacatgataaaatttggattataagtataccatatttccggcggcagaacaagaagcggaacatctttcttgtcagcgcgggatttttccggtatactgggggcaaaaggaggagcggctggaacacggcagccagctgcacaaaagagatggaatacagaacatggaaaaagcagaacggcgcaggggagagcatccgcacctccctgctgggttatggctgtatgcggttccccaccacaccggagggagccattgacgagccccgggccgaagcgctgctgaacgccgcgcgggacgcgggcgtgaactattttgacaccgcctacccctaccacggcggccagagcgagccctttgtgggcagggtcattgcaaagtggccccgggagagcttttatctggccaccaagatgccgctgtggcagtgcgggagcctggaggaggcccagcacatctttgaagagcagctccggcggctgggcgtggagtacatcgacttctacctgctgcactccctgtacgccgcccggtacgaccgggccaaggaaatgggcatcgtggactggctgtgggagcaaaaaaagctgggccgcatccgcagcttcggtttctcctgccacgacaacgcggcgggccttgagcacatcctgcgggatcagccctgggatttctgccagctgcagtataactatctggacaccgatgaccgtgccgaggagatctcgggtgaccgcggctatcagctgaccgaggagctgaacatccccctcatcattatggagcccatcaagggcggcacgctggccaacctgcccccggaggccgaagcacccctcaaggccctgcggcccgaggcctcggatgcctcctgggccctgcgctgggtgggcagccaccggaacgtccatgtcatcctctcgggcatgagtgccgaggatcagctcacggataacctggccacctttgcccgctttgagccgctgaccgctgcagagaccgccgcggtggagcagaccgccgccttcctgcacagccgcatcaagatcggctgcaccggctgccggtactgtatgccctgtctcatgggggtggacatcccggacaacttcagtatctggaacaagctggggatgttcggccagcccgaggccatcaagcaccagtgggaagcccacttccccgatgccgaaaaggccagccactgcgtccgctgcggcaagtgcgaggcggcctgcccccagcatctgcccatccgcaatgcgctggcccagctgcagcaggagctggatcagctgtaatctgcatcagaaaagccaccggtaaaaaccggtggctcttttctcttattcgctccactccatcccgatcttatccagcattgcgcggcgctcaggggtgagcttggggtcgtgggtggtatcccactcccgcatccggcggagccagtcgcccaggcagaagccggtttcgtcggatttgtagttggcggcggcgtggaggttgccgtgggccttgtagtaggccctggcctgctgataggcagttccccacttggcatcccgggcatcccacaccatgccgatgctgttcagctttttgatgtgggcgggcgtgacctgataggaatccgggcggttcttgcgggctgcacgcaggttggagatccacacgcccagccggacaccatcgctgtccacatagctggcgggaaccagcagatgtttgtacttgcgggcgtagcgggcggcactgcggaagttccgctcccagttggcctcgcgcacggtgccgtggtcagcggcgggatcactggggcggcgctcgcccttgaacagggtgcgcagcagcttgcggcgctcactgctcagggcgctgctgccggagttcagggtctgccgctggcggctgacccagctgcccagccaaacgccgtcggcggtcttgtagacagaggggatctccagatcgccgtgctctgtcttgtaggccagagccagatcatagcgctcctgccaggggtcgtacttttcccacaccatgcccagcttgtccagcagggccttgcgctcaggggtgacccgggcgctggagcggtccgggttcaggtaggcatagcgctggcgcgccacccacttgcccagcagtactccgtccggcgtgacatactccgaggggacgttcaggctgccgtgctcatggtagtagacggcggcaacatcgtacagggacatccacttgcggtcgttgcggttggtccagtccatgcccagagcgtccagtcgcgccacctgctcctgaggcagctcgcctgccttgtgagcggcgcgctgggcccccagccagacccccagaccgaagccggagggcgtttcgtacttgatgggcacttccagatcgccgtgttccagataatactgggtggcggcggcatagttctgctcccacaggtcgttggaggtactccacaccatgccgatggcttccagccgctcgatgcggttctgggtcaggttgccgcccagatagcgctggcggttgtagacgatccattcgcccagtgcaaaatcatttttatcgcggtagcgcaccggcaccagcaggtcgccgtgctcggtgcggtatttctgcgcggaggcaaagcctttttcccaagcagcttccagccggtggttccagcggatgcccagtttttccagcttggcggcctgctcagctgtcaggcggcccgggcgctgcccggcctgtacctgccgctgaagctcgagccacttgcccacgggcacgccgctgtggatggtatagctccggggcagctccagggtgccctctttggcggcagcagcggcggcggcctggcacagcacctcccagcgggcctccatctcccggcgcagcttgccgtacaggcggtaggtctgctgcatggggcgctcctgccggaagcccggcgttttgctgccggctctggtcatggcctcggtgcagtcacgctgcagggtacggccgttgcccagcccctcgaactgcgccacaaggtcgaacaccggcacgctgcggctgcctgcagccaccagcgcgcggcagagcatctgcttgaaggtggacatcaggctggactggcgcaccagaatgaccccagccagcccctccagcggctgctggactcccggcgcgttgacgcagagcaggaccttggggccgggggctgtatcggagaggaaggtctccacggcggcagaatccgcaaagcaggcgtgatctgcagcgtaaaagcggacggcagggtccacagtgcgcagcagctgttccagctccgtgcccagcttttcctgataggcggcggattcaaacaggaccagataatggccgctggtatcgctgagcaggcggggcagcagaacggtcaggttctccacctgacgcagagaccagctcagctcttcatattgaacgcgcagggaggtgtcgcccttgggcatacacaggtttttgatccgggcgcgcagggtggccagctcctcctcctgaggccagagcagggctgcataggccgagggcaccggcatggtcccggcggccatggcctcggccacagtcatgtgggagacgatgcagtcggcaaacagctcctgcgcggcggcgcagacgggggcaccgttgggcacacccagccccagcacctttgcctgggggcacatccgcagcagcttctgcaccgactgtgcccaacacacggcgctcaactcatggtagcagtccagcacgatgcagccgggtttctgctcccccagccgcacccactgctccggggtggcggcggccagcttttcgcaatcacagaagcggacattgccgggcagggtgccgccgttgtagcgtgtcagctctgcctgccgcagggccagacgctgtgcaccggccaccagccagaaaaaggtagtctgggggtgagcctccaccaccttccaggcaatacagcttttgccggtgccggtgggatggaacacggcggcccggttcagggtctccagagactgtacagctttctgaaaagcggcttcgttgacgggattcagggtcatcgacatggtggtagtgtcctctccgagttgcatgtttgacat

SEQ ID NO: 57 - DNA, 5805 bp, unidentified
  source 1..5805: mol_type = unassigned DNA
cttccagccagcatctacaactgcacgagagcagcttactgtaccgccgatagcttctgcaaggtcatcaagaagcttgaagttctcagcgcttcctactccacgaccaccagatacaaggatcttagcatccatgatatctactgtctcagataagttcttaactactttcaggatctctacatacttgttatcaggtgtgaatccaggattgaactcttcgataacagccttagcaccatcgttcttaggaagcttctgcataacaccaggacgtacagtagccatctgaggacggaactcagggcaagcgattgtagcgattgtgttaccaccgaaagcaggacgagtcatcagtaactgattatgcttctgctctcttccaggaatcgggttgatagggaaatcaccgatttcaagggatgtacagtctgctgtcagacctgtatggattctagcagatacacgaggaccaaggtcacgtccgattgctgtagcacctactaacaaaatttcaggtttatatttctcaacaacagatgctaatgcatgtgcataaggctctgttctgtattcctttaattcaggatcatctaccaggataactctgtctgcaccatatgcagcaagttcatctgcaagatccttaacaccactacctactaatactgctgttacttctgttgataatttctcagccagtcttttgccttcgccgattaattcaagtgcgataccgcttaccttgttatctacctgctgagcaaagacaaacacgcctttatattcttctaaattcatgttgaacctccatatttaatagcacttcgtatgttctaaattaatgcattattaaatcacatgcttctcttttaacttgtccatgatataagttacagattcggaaggatctaaagtaaccttctcgccctgtccttttcttaccttatcagatgctcttgcgatctgtgtaggtgaacccttcagaccaaggttagaatcttcaacatcctttaagtctgctctgccccatacggtaatgtcagctttgaatgcatcgaaaattccgcctggtgtcatataacgaggctcgtttaattcagcaagtgctgtaactaagcaaggcattttagcttttaatacatgatatctgtcatcatactgacgttcaacgattacgctgtcgccttctacttcgatcttctgtgcataggagattacagggattccaagatgctcggaaatctgaggaccaacctgtgctgtatcaccatcaatagcctgacggcctgtgatgatcagatcatagtcaaggttacggatagcgcctgcaagtgtctgggaagtagcccatgtgtctgcaccaccaagtactctgtctgttacaaggattcccttgtcagcgcccatagcaagtgcttcacgaagtacttcttctgccttaggaagacccattgtgataacggtaacttctgcaccgtactgatcttttaatcttaatgctgcttcaagacctgctttgtcatcaggattcatgattgtaagcatagctgctctatcaagtgtaccatcaggattgaacttaacgccaccctttgtatcaggtacctgtttaacacatactacaattttcattgttattctccttatcaaacttaatttagggttagttacatcttactttaacagatttgcagagataaccattctctgaacttcgctggttccttcgtagatctctgtaatcttagcatctctcatcatacgctctacttcgtattctcttgtataaccataaccaccatgtaactgtacagccttagttgttacttccatagccatctctgctgcgtataacttagccatagctgcttctacattgtaagatgtcttatgatcctttgtatactgatcctttgtgcaagctgccttgtataccatgaactgagctgcctgagcctttgtagccatatcagcaagctggaactgtgtattctggaactgtccgatagcacgtccgaactgttttctttcttttacatatgcgattgttctctctaatgcaccttcgccaagaccaagtgcctgagcagcgataccgatacgtccaccatccagtgtatgcattgcgataccaaagcccttgccctgagcacctaacatattttccttagggatacggcaatctgtgaagatcagttcgtatgtggatgaaccacggatacccatcttcttctccttagtaccaaagctgaatccaggtgtgcccttctcaacgatgaatgcggagatttcctttgtcattctgccacgcttctcaaccatgcctgtgatagcgaagattacatatacgtcagcttctttaccgtttgtgatgaatatcttggaaccgttaagtacccattcgtcaccatctaatacagccttggtctgctgtccctgagcgtctgtaccagcgcctggctcagtcaaaccgaaagcaccgatcttcttgccgcttgcaaggtctggtaaatacttcttcttctgatcttctgtaccgaatgtaagaataggatcacagcacagagatgtatgtgcagatacgataactgctgtggtaccgcataccttagctaattcttctacgcacatagcatatgttaaaacatcgcagccctgtccgccgtattcctttggtacaggaatacccatgaagcctgcttttgccattttctctacagtctctctagggaaaacttctgtctcatccacttcaattgcaagaggtttaacctctttttcagcgaactctctgaacagagctctcgccatctcatgctctttacttaatgtaaaatccatgttaaaaatcctccattatctataatcttataaatccgaccaagggagctgtcctgccagctccctttgccgatcttatattaactcttatttactgtaatcgtagaagccaacacctgtcttcttaccaagcttacctgcacgaaccatctttctaagaagtggtgaaggagcatacttggaatcgcctgtctcagcatagattacttccatgatagcaagtacgatatcaagtccgatgtaatcgccaagtgctaaaggtcccataggatgatttgcaccgagctgcatagcaacatcaatatccttaacacttgcaacacctgctgcatatacattgattgcttcgttgatcatagggatcaggattctgtttactacgaaacctgctgcctcgttaacctctacaggtgtcttgccgatctctgtagcgattgccttgatcttctcaactaattccttaggtgtattagcacctgcgataacttctactaacttcattctgtcagcagggttaaagaaatgcatacctactaaaggacggtcaagacctgcacccatctctgtgatagacagagaagatgtatttgtagcgaagatacaatcaggttttacaatatcctgtaattccttgaatgttgtcttcttgatttccattttctcaggagcaacttcgattaccatatcacaatctgtacagatatcctttaagccagttgtgatcttggcagcgattgcgtctgccttttcctgtgtgatcttttccttgcctacgaggaagttaagattctttaagatcttagccttaccgccatcagcaaattcctgcttaatatcacataagcatacttcatagccatcggtcattgcaaaagcctgtgcaataccggagcccattgtaccagcaccaataatacctactttcattgaaagttcctccttgtattatgaatcatatattttaatttagttgaattagcaattcttgaatggctcttttaccttttccttattcttgtcaaggaagaaagccataccatacttctgatcttctgtctcgaagcagtcaccgaagagcttctcttcgattacgattgcttcatccatatctgcgtctaagccttcgttaatagccttcttgcagttacggacagcgataggagcattctttgcaatagtagctgccatcttctctgctgcaggcattaactcttctgcaggatatacagcatttacaagaccgattctgtatgcttcgtctgccttgatatttcttgctgtgtagatcatctgcttagccataccagcacctacgagacgggcaagtctctgtgttccaccaaatccaggtgtgataccaagacctacttcaggctgaccaaatactgcattctcagaacagattctgatgtcacagctcatggaaatctcacatccgccgccaagtgcaaagccgttaactgctgcgataacagggatagggaatgtttccagcttgcggaacacatcgttacccttcttaccgaaagcttcgccttcagccttggttaatgtgctcatttctccgatatctgcacctgcaacgaatgacttagcacctgctcctgtgaggataaggcatcttacttcgtcaaggtttacagcatccagagttgcgtttaattcatcaagtacctgagaatttaatgcattcaaagccttttcgcggctgatggtgatcttaccaactgcgccgttctgctcatatactatatattccatgttcgaatctccttaatattagtctctctcaacgattgtggagcagcccataccgccaccgatacaaagtgttgcaagacccttcttagcatctctcttctgcatctcatgaagcagtgtaacaaggatacggcatccggaagctccaacagggtgtccaagtgcgatagcaccaccgtttacattcaatacatcattggagaatttcagatcagcctgtactgctaatgactgtgctgcgaatgcttcgttagcttcgatcaggtcgaaatcattgatatccataccagtcttggcaagaaccttctttgtagaagctacaggaccaacacccatgatagaaggatctacaccgccaagagcaccagctacccatgtagccataggcttaacacctaattccttagctttctcttcgctcataacaacgattgctgctgcaccgtcattgatacctgatgagttagctgctgttacgattccgtctggcttgaatgcaggacgtaacttagcgataccttcctttgttgtgccaggacgaggaccttcatctgtatctacaatgattgtttctttcttcttcttaacttctacaggaacgatttcatccttgaacttgccttcagccatagccttctcgcatttctgctgtgaccatgctgcgaactcgtcaagctgttctcttgtaagaccatacttctctgctacgttctctgctgtgatacccatatgatagttgttgaatgcatcccataatgcatcgtttaccatggtatctactaatgtagcattgttcattctatatccataacgtccctgcatagcagcgtaaggagccatagacatgttctccataccacctgcaacaacgatatcagcatctcctgccttgatcatctgtgcagccatgtttacacagttcagaccagaaccacatacaacgtttactgtaactgctggtgtttcgataggaagtccagcctttaaagctgcctgacgtgctacgttctgtcctaaaccagcctggataacacatcccatatatacatgatcaacctgctcaggagctacgcctgctcttttaagagcttccttaataacgatagaaccaagtactggtgctggagttgtgcttaatgcaccgcccattgtaccgattgctgtacgacatgcgcctgctaatacgattttctttgacat

SEQ ID NO: 58 - DNA, 13849 bp, unidentified
  source 1..13849: mol_type = unassigned DNA
  misc_difference 7798: note = a, c, g, or t
  misc_difference 7799: note = a, c, g, or t
  misc_difference 7800: note = a, c, g, or t
  misc_difference 7801: note = a, c, g, or t
  misc_difference 7802: note = a, c, g, or t
  misc_difference 7803: note = a, c, g, or t
  misc_difference 7804: note = a, c, g, or t
  misc_difference 7805: note = a, c, g, or t
  misc_difference 7806: note = a, c, g, or t
  misc_difference 7807: note = a, c, g, or t
  misc_difference 9192: note = a, c, g, or t
  misc_difference 9193: note = a, c, g, or t
  misc_difference 9194: note = a, c, g, or t
  misc_difference 9195: note = a, c, g, or t
  misc_difference 9196: note = a, c, g, or t
  misc_difference 9197: note = a, c, g, or t
  misc_difference 9198: note = a, c, g, or t
  misc_difference 9199: note = a, c, g, or t
  misc_difference 9200: note = a, c, g, or t
  misc_difference 9201: note = a, c, g, or t
  misc_difference 10152: note = a, c, g, or t
  misc_difference 10153: note = a, c, g, or t
  misc_difference 10154: note = a, c, g, or t
  misc_difference 10155: note = a, c, g, or t
  misc_difference 10156: note = a, c, g, or t
  misc_difference 10157: note = a, c, g, or t
  misc_difference 10158: note = a, c, g, or t
  misc_difference 10159: note = a, c, g, or t
  misc_difference 10160: note = a, c, g, or t
  misc_difference 10161: note = a, c, g, or t
  misc_difference 10484: note = a, c, g, or t
  misc_difference 10485: note = a, c, g, or t
  misc_difference 10486: note = a, c, g, or t
  misc_difference 10487: note = a, c, g, or t
  misc_difference 10488: note = a, c, g, or t
  misc_difference 10489: note = a, c, g, or t
  misc_difference 10490: note = a, c, g, or t
  misc_difference 10491: note = a, c, g, or t
  misc_difference 10492: note = a, c, g, or t
  misc_difference 10493: note = a, c, g, or t
atgaaagttgtaattcttgccggcggctatggcacgcgcatttcggaagaaagcaagttcaagccgaaaccgatgatcgaaatcggcggtatgcctattttgtggcatatcatgaaagagtattcttactatggcttcaatgattttgtgatctgcgccgggtacaagcagcatatgatcaaggagtggtttgcggattatttcctgcataccagcgatgtgacctttgacttcacccagggcaacgagataatcgtgcatgaccagcacgccgagccgtggcgcgtgacggtggtggataccggcctgaacacgatgacgggcggccgcatcaagcgggtgcagaaatatatcggcaacgaaacctttatgatgacctatggtgatggcgtctgcgatgtgaacattgccgaactggtcaagttccataagcagcatggcaagctggcaactctgaccgccgtggtgcaggaacagcagaaaggcgtgctggatatcggccaagataacactgtacaggcgttccgtgaaaaaagcgtcaacgatggggctatcatcaacgcgggctatatggtgctggaaccggaagtgtttgataccatcagcggtgatgataccatttttgagcaggccccgctgcgcgagctggcagccaaaggccagctgatgagctatgtgcaccgcggattctggcagtgcatggataccgagcgcgaaaaaagtatgctggaaaaaatgtgggcgtccggctgtgcgccctgggaagtgtggaaccaacaatgaacttggaattttaccgcggcaaacgcgtgtttgtaaccgggcataccggttttaagggcagctggctctgccgcatgctggtgggggtcggtgcggtggtaacgggttacagcctggaaccgcccacaacccccaacctcttctctctggcagggctggaaggcaaaatgaccagcgtgatcggtgatatccgcaattttgccgccctgaaagcggcctttgatgccgcccagccggaaattgtgctgcacctggcggcccagcccattgtgcgggacagctacaaggacccgcgctatacctatgaaaccaatgtaatgggcaccgtgaacctgttggaatgtgtgcgcgccgcccaaaccccaccgcgctctgtgctgaacgtgacgacagataaggtgtaccagaataatgaatggtgctggggctaccgcgaaaacgaaccgttggacggcttcgacccctactccaacagcaaaagctgctcggagctggtgacccacagctataaaaacagcttttttgcggatggcagtgtggccatctccactgcccgcgcaggtaatgtgattggcggcggcgattttgccaatgaccgcatcatcccggactgcgtgcgcgcgatggcaaaaggggagagcatcggtgtgcgcaacccgtattccacccgcccataccagcatgtgctggaaccgctggcggcgtacctgctgatcgcccagcgccagtatgaggataaccggtacgccggctattataacgtcggcccggatgactgcgactgtgtgacgaccggcaccctggtagacctgttctgccaggcgtggggcgatggtgctgcatgggaaaaccgcgctgaggcaaacgccccgcatgaagcaaactttttgaagctggattgcagcaaattgaaatccaccttcggctggaaaccgcgctggcatatggcggaatgtatgcaaaagaccgttgcgttcagcaaggtatggctttccggcggggatatcccggcggagatggacaaagagatcaaggaatttttgagtgagtaagggagcagacgatggcaaattggagcaatgaggccgaagcccgcgagcagatcaaggcgctggtggcagaatattaccatgactttaaggagaaaaaggcggatttcaagcccggcgaccgcgttacttatgcatcccgcgtgtttgatgaaaaagaaatgtgcgccctgaccgatgcaacgctggatttctggctgaccaccggccgctttgcggatgaatttgaaaaagagtttgccaagtggatcggcgtaaagttcgccaacctggtcaactccggctcctccgccaacctgattgcctttatggcgctcaccgccccggaactgggcgaccgccagatcaaaaagggcgatgaggtcatcactgtggcatgcgggttccccaccactgtcaccccggcgctgcagtatggcgctgtgccggtgtttgtggatgtaaccgtgccgcagtacaacattgatgtgaccaagctggaagccgctctttcccccaagaccaaggcagtcatgatcgcccataccctgggcaacccgtttgacctgtccgccgtcaaagccttctgcgatgcccataacctctggctggtggaggataactgcgatgccctgggtacccagtacaccatcaacggcgaaacccgctttaccggaacctggggcgatatcggcacctccagcttctacccgccgcaccacatgacgatgggcgagggcggctgcgtgtatacaaacagcccgctgctgaaccgcctgatcaagagctaccgcgactggggccgcgactgcatctgcccgtccggccatgataacttctgcggccaccgctttgacggtcagtatggcgaactgcccgcaggctatgaccacaagtacgtttacagccactttggctataacctgaaagtgaccgatatgcaggccgccatcggctgcgaacagctgaaaaagttccccagctttatcgagcgccgccgccataactgggaccgcctgcgcgcagccctggaaccggccgccgataagctgatcctgccggaaccggccgccaacagccgcccgtcctggttcggcttcctgatttcggtcaagccggaatccggcctggaccgcaacgccgtgacccgctatattgaggaccacaatgtccagacccgcctgttgttcagcggtaacctgatcaagcacccctgctttgaccagatccgcggcaccgacgcctaccgcgtggcaggggagctgaccaacaccgactttatcatgaacaacaccttctgggtcggcgtgtaccccggcatgaccgatgagatgatcgactatatggcgaagatcattattgaagcggtgaaccagtaaaaagcgctgataagatgaatcaataagaaaaagcaaagccgtgctgataagaaaaaatggctgctgcactgcggtaaattatcaatacaggctttgctttttgattgcttataaagaataataaaggaacgggatccatgcagaaattgttggcactgttgggagcaaaaagcaaagaggaatttgttgcgctgcttgcacagtttatcaagtttggccttgttggcgtaagcaacacggcggtatcaatggcggtgtattatatctttttgtggatcagcccagacctgtatatggtaggcagcgttctgggaacaattctgagcattgccaatgcctttttttggaacgataagtttgtgtttaccgggaatgcaaacgattggcgcagtaaactgaaacgccttggaaaaacatatgtcagctacggcggcacgtcgatcctttctaatgttttgctttggatagaggttacgttcttcagcgtaagcaaaacgattgcgccgattgtaaatttgctggtcacgattccgctgaattttatcatcaacaagttgtggacatttaaggaaagataaacgacaaaatgtttcccgtcaacgatgtggagcttatccggcacggaaaagtgcggtatcgggatccctaaccatcatccgactcaacgaggttggttggcggtgctttattgttgaaaataagactgcaaaatatatcggtaaaaaatatgggaaaccagggaatatctgatacataaccgggaacagaaatagggcaaggctgtgtatggacaacatgacaacaaataacgagaataaatctggtatcagcactggattagatcagctgttgccggaagataacaaatcggtgcagctgggactgaattatggccagaatgaatgcaacagccagcgcgtgctgaaagagaataacacgaaatggggaaaaggcctttttggtaaaaaaggaagagggagtaatccgttctggaaaaaaacggccaagctgtactgtgtactcagcgcagtgtgtgccattgtggttatggtaacgctgtatgttacccatggtgattttctttcgtactttttataccatgatacactggatgccggcatggattttttccatagcattgaatatgttcgtggacgccagccgtatgcggtgtttgacacactgtatccgcccttggcaaatttgttcttttatgccctgtttttactggtgcctgcttcggtatctgataactggacctatgactttgaggcgtcagttgccatgcgcggcacagaaactgatttacgcacaacacagtcgtgctttttgctatacgtcttttttgtggtgctggcggttcttttgctggcggttttgctccgtgacgtgatgcaaaatgcccagtgggccagggccagtacgttttttgccttgttcagctttggtgtgcttaatgcggtagaccgcggtaatattattttgctggcggcggggctttcgctttttttcgtcatgtatcaccgttcaaagcgcgcatgggtgcgggaactggcattggttgcactggcagtagcagccggacttaaaatttatcccgcattcttaggtgttatgcttttaagaaaccgggatttcaaagcagcaatccgcacggtgttttatggcattgcagcgttggtgctcccggtgtttgccttccaggagggcgtgtacggcttgcagctttggctgaagattttgttctcttttggaagtaaaagtaaaacaccttgggcaggcaatggcatcaacagcatgttcgcacatggggcgcatctggtggacctgattgccggaaccagcaatgcaacggtatctttttttgcagcagcctttgctgtggcggcggtactggttgtgtgtgctctgctctgccgccaggaatggcaggcgttgctgctgattaccgtggctatgatgtaccaaagccagggcaactatatttactgcatggcgctgattccgctggcgtattttcttgcacaggaaaaggtgatgacacgtcaaaatatattgccttttgtggttttgatggtatttaatctgccgcttccaatctttgaagagcgtaactcttatattcgcaacaccattgtacagttggcaatactgacagctatcatctggggcgttgtacaggcagtaaattgtgtgttggcagcgctgaaaaccaaaaagcctgaacaatcaaaactagataaaaaagctgcacgcagcacgctggttactttcggcgcttcactgggggcattggcagtttcccttgccgttttctatggcgtgtgggtgctgtataatgcgccgtctattaccatgcagctgggggatggcatttataacacagaatattatactcctgaaaactccaacaaagagctaccgttttactggtgcaagaaaagtgcggagatcaaactggtaaacccgcagctgaatacggaaaggtacacctttacctttacagttggggattatttctttgatatttctgaccgccccagcattaccattaccttcggtgacagtagccagacctttgtggtcagccaggaaaacatgaaaatccgctataccgtggatgttccttttggtgaaagtgcaatcgatattagctacagcggcaagcgggttgatgccccgcaggattccagaactttgtattttgtaatggttcagccgcagcttgaacggattaaataaaaggaggacactctcaatgaaacagcgtctggccgattatgtggccgattttcttgcggcgcacggcgttacggatgtgttcagcgtggtgggcggcggcgccatgcatctgaatgatgcactgggccaccacccggcgctgcatgttacctataaccatcacgagcaggcaagtgccattgcggcggaagcatacgcccgcattgataacaaaattgccgccctgtgcgttaccaccggccccggcggcaccaacgccctgaccggtgtggtgggcggctggctggattctatccctatgtttgtaatctccggccaggttcggtacgataccacggcccgctatgccgcgcagtttaccgatggcctgcccctgcgcgcggtgggcgaccaggaatacgatatcaccaaatctgttgcccacatgaccaaatacgccaccatgctggaagacccgaaccagatccgctatgtgctggaaaaagcctggcacctggcaaccaccggccgccccggcccggtgtggatcgatatcccggtcaactatcagggcggctacattgaaaccgacagcctgcccggctatgactcggcgcaggacgatgcccggctgccgcccccggtggacgatgccaccgtgcagatggtgctggaaaagatccgccacgccaagcgcccggtgttccacgccgggtacggcatccggctttccggcgggtacgcagcgttccgcgccgtggcggaaaagctgaacatccccattgtgacctactggaacgccgtggacctgatcgaggacgaaaacccgctttactgcggtcgtgccggcaatatgggcgaccgtcccggcaactgggccatccagaacgcagacctgattctggctgtgggcacccgcatttccatccgccaggtgggctataactggaaaacctgggcccgcgcggcggaagtcatcatggtggatattgaccgcgccgagatgaaaaagcacaccctgcatgtggagcaccccgtgtgggcggatgccaaggactttctgcaaaagctggatgccgccgcagcgccgctgacccctgtcagccaggcagcggactggctggcaacctgccagagatggaaaaaagattaccccgccgtgctgccgcgccagtgggaagaaaacggcaccaccgccaatgtgtacgcctttgtgcgctacctcagttcccgcctgccggaaaacagcctgaccgcagtttccaacggcgcctgctgcgtggtgggcaatcaggcgtatgtcatccaaaaaggcagccgcatggccaacaacagcgccattgccagcatgggttacggcctgcccgccgccattggcacttgcattgcaggcgtaccaccatctgcctggaaggcgatggctctatcatgatgaacctgcaggaattgcagaccatcctgacaaataagctgccgatcaagattttcctcatcaacaataacggctaccactccatccgcctgacccagaacaacctgttcaaagaccattgcaagatcggcattgggccggagagcggggatctgtccttcccggagttccgcaaaattgccgaagcgttcggctacccgtattcctgcgcacattccaacgctgagatgaaacaggtggtggatgccgcccttgccgcagaaggcccgactttctgcgagatctttaccgatacccagcaggtctgggagccgaagagcgccaccaagcgcctgccggacggcacagtgcttcgcatcagcgttctgcgccagacgctggcggtcctgcttctgggcatgctccagccgattctggttgttgcgcttgccgccgtaattctaagcgcgcttctnnnnnnnnnnggacggcacactggtcagcccgccgctggaggacctggcaccgttcctgccgcgggaagagctggaaaagcagatgtttatccccctggtgccggaagggtaagaaaataaaaaatgaaaaaagcgcggaatggcaatattgaattgctgcggtttgtattttgcgtgggggtggtattgttccatgcgtggtacgtgcgcaggggatatatcggcgttgaattcttttttatcgtaacagggtattttcttgccgaaaagatatgccggttaaacgcaagagaaacaacctgcccttcgctagaaaatgccatgaaagaagcgacatgggatgtgctcaagcgttatcgtttgatatttccatactttcttgtggcaaccgttttggggtttatagtgcgtgcctatgcacaacagtgggacagcgctacaattctgttgaatttacagctgattccggcagatttcctgtatttacagaactttgggttttctgtagcctccacaacaggggtgctatggtatctttccgcaatgacttttgcggtctgggtgctgtatccgctgctgcgcaggcattatggcttgactgtgcaggcgaccccggcagcaatcctgctgatactgggcgtgatcctgcagaactgtggttcactggatgccccatgtacacttctgtttggctgggttaataccggaatgctgcgtgcctttgcaggaattctgggaggggtagtagcaaacagggttgcatcaactctgaaaaaaattgatgtagggaaaaagatggccgcgatgatgacagccgtggaattggctgggtatgcgtgggtactttaccatatatggtcaatgaatgagacacgtgctatgctggatggcattgtggttttggcgttgggtgcggcatttaccattacggcaagcggaaaatcgcttttctacggaaaatttgacaacggctttgtcagatttctggggaaagcaaccatgccagttttcttgagtcatttgtattgcgtacaatttttgccgaatatactggcaatgtacagcgtagaagtgaccgaactgcaaaggcttgttctttcttttgcctgctgtgcaatagcggcaggaattgtctattatgtagggaaaattatagacaggcaaatgaaaaaaagctggcatgctttttgcacagagatcattgcgaaaaacaaataaggtgttgaaaatggaaaaaatcgaaaggcagatacaaaccgcaatcgtaaccggccccaccggggccgtgggcacagcattgtgcagccggctgctgcaggccgggtgtaccgtggtggcggtctgccgccccggcagcccgcgggccgtagcgctgcccaaggatgcaaacctgnnnnnnnnnntgtatgtagttgcctgcgatgccgccaacctggcggatttgccgcagtgcatggccgcagccgggctgcccgtgcaggcggatgcctttttccacctggcgtgggcgcacaccattggcgcgggccgcaatgatatgccggctcagattgagaatatccgctataccattgatgccgtgcgcaccgcggcggcaatgggctgccgtgtgtttattggtaccggcagccaggcagagtatggccgtgtggacggtgttctgcgggccgatacccccacaaaccccgaaaacgggtacggcatggccaagctgtgtgcaggccagatgagccgtaccgaggccgccgccctgggtatggaccatgtgtgggcgcgtatcctttcggtttacggcccgcatgacggccccaacacgatgatctccgccaccatccaaaaactgctggccgggcagtgcccggacctgacggcaggggagcagaagtgggattatctttactccgccgatgctgcggatgcactgtaccgcatggcctgccatggccgcagcggtgccgtgtacccggtgggcagcggcaccgcccgccctctgcgggaatatattgagaccctgcgtgatgccatcgacctggccctgccgcttggcctgggcaaaatcccttacgggccgcagcaggtcatgtttttgcaggcggatatcacccagcttgcggcggataccggctttacgccgcgcaccgcctttgccgatggcatccgcgccaccattgcgtgggcaaaaacgcaaaagcaaaccaattaagccaataaggaataatcccgtccgtgcgggcaggacccgcatggacgaacaggagccagacagtatttatgcagttgacctaccaaaagttaaagccgtttgccttatcctatctcaccgcgccgctggcggggttttttgcggggtatcnnnnnnnnnnccgcgcgccgtttgccgttgcgggcctggccgtgctggcctttgcctggtggtatgccgtgtgcaaaacgccgcaggttaagcaaatggggcaagaagagcagggcattacgctttcggtgccaaagctggtgctgctgtttgccctgatgctgttgtggggctacctgggcggtcagacgggctttttttaccagaactcggactggggttaccgcaacgccatttaccgggatctgatcacaaacagctggccggtgtattacccgcaaaaggatacggcgctggtgtattatatcgggcactggctggtcccggcggcgnnnnnnnnnnccaaaccggtatacgccctgtttgggctggatgccgcctggatgttcgcccgtatggccctttgggggtggacggcgctgggcacctatctggtggcgctgaatttgttggtctacctgcgtgccgataccggcaaaaagcaggggatcggcctgctgtttttgattttcttcagcggcatggatattctgggcgcgctgtacagcagccgactgccggacctgctggcctatgacgctatgcacctggaatggtggacgaatgatttccagttcagctccctgacgacctgcctgttctgggtgttcaaccagacagtgggggcatggctggcaaccgtctgctttttgcaggagaaagactgccgcaactacctgctgctgggcacggcctgcctgatgtgcggccccttcccatttgtggggctggttatttttatggtggtgcgcggcattgttctgctggcacagcgtcaaaaaggcgtgctgcaatcggcgttctccccggccaatgtgctggtgctggttgtggtgctcagcattacggccagttattttttggccaataacgcctttggctacagcgttctgggcgaaactgtcgccgggaaccaggcagcgcagcagacttttggccaaaacgttctgaccagcctgcaaaaaggcatgctggtattttacctgctggatgccggcatctatctgctgttgctctggcggcagaaccgccgcagctggctgttttatacctgcgccgtgtcgctcttcatcattccgttctttaaggtgggacaggggtgcgatttctgcatgcgggtgtccatcccggctatctttatcctgatgaccctctgtgcccggtactttatcgccttggtgggcaccaaatggcgggacggtacgcttgcacagcatgccgtgaccattctgctggcggcaacgctgctgatcggtgtctgcaccccggccatggaaatttaccgcggcatctgccacattgccaaagaggggacgttctgcctggaaaacgaggagccctacaccctggcggaccgccctgtaagcctgaactttgaaacgcaaaactgcgaaaataaattgttctttacctattttgcaaaatagtgtatagtgataagggtctgcccggctattgcggcagtgggccaaagactaaacttaaaggaatgaaacctgcatgagcgagaagaaaaaagtcatctctgttatgatccctacctataacgaggaggagaacgcccgccccatctatgaggcggtgcgggatgagattcggaaggactgcccggattatgactatgagatcctttttattgataataaaagccaggatcgtacccgccggatcattacggacatctgcgcgcaggaccccaaggtcaaagccatttttaacagcaagaactttggtcagttcaacagcccctattacggtatgatccataccacaggggactgtaccattaccatctgcgcggacttccaggacccggtggagatgattccaaagtttgtggctgaatgggaaaaaggctacaaaattgtaatcggcaaaaagaccaccagccaggaaaaccctgtcatgtactttttgcgggattgttactacaaaaccatcaaaaagatgagcaatgtggaaatgatcgagcagtttaccgggtttggcctgtacgataaaagctttatccagaccctgcgtgatttgcacgaccccaccccgtttttgcgcgggattgtggcggagcttggccccgagcgcaaggagattgaatacacccagcccaagcgccgggcaggcaagacccacaacaactggtacagcctgtttgatgccgccatgctcagctttaccagctacaccaagattgggatgcggatggcggagttcttcggctttttctgcgcggcggtcagctttatcctggggcttgtgttcctggtggcaaagctgatccactggaatacctttgctgcgggttatgccccgatgatcattgccgtgttttttgtgggtggtgtgcagctgacctttctgggatttttgggcgagtacatcatggcaatgaacgcccgtattatggaccgccccctggtggtggaagaaaagcggctgaattttgaatccgaaacgccggaaagtgatactacccgcgccaagtaagaccgagtggttataatagattgcgagttgacagtaaaacaatgattccttttaatattcccccgcaggttggtacagagctggactatatgcgccaggccatggcaaacaataagatctgcggcgatggcccttttacccgccgctgtgatgaatggatggaacagcggttccatgcgggaaaggtgctgctgaccaccagcggtaccaccgcgctggaaatggctgccctgctgtgcggcatccagcccggcgacgaggtgatcctgcccagctacacattttcttccacggcaacggcctttgttttagctggggccaagctggtgtttgtggatatccgcccggacaccatgaacattgacgaagcaaaaattgaacccgccattactgaaaaaaccaaagtcatctgcgtgatgcactatgccggtgtggcctgcgatatggataccatcatgcagattgcgcgccgccataacctgaaggtggtggaagatgccgcccagggcgtgatggccagctataagggcagggcactgggcaccatcggtgattttggctgctactctttccatgagacgaagaacttctcaatgggggaggggggcgcactggtcatcaatgaccccgaaaccgtgaccaaggctgaaatcctgcgggaaaagggtaccaaccgcgccagttttctgcgcggccaggtagataaatatacctgggtttcttatggatccagctacctgcccagtgatctgaatgccgcttacctgtgggcacagctggaacaggccgataccatcaatacagaccgtaccaacagctgggattattacgcacaggagctggcaccgctggctgaagcaggcctattggagctgcccaccgtgccggaaggctgtgtgcataacgggcatttgttctatgtcaagctgcgggacctggaacagcgcaccgcgttcattgcttatttgaaagcccacggtgtggcatcgtctttccattatgtgccgctgcacagcgccccggcgggcatccaatacggccgctttgccggggtgggtgaatacaccccaaaggaaagcaaccgcctgacccgcctgccgctgtactatggtctgaccgaagccgaccgcgcagccgtggtgcaggtggtcaaagacttttttgcacagaaataa

SEQ ID NO: 59 - DNA, 5994 bp, unidentified
  source 1..5994: mol_type = unassigned DNA
  misc_difference 1582: note = a, c, g, or t
  misc_difference 1583: note = a, c, g, or t
  misc_difference 1584: note = a, c, g, or t
  misc_difference 1585: note = a, c, g, or t
  misc_difference 1586: note = a, c, g, or t
  misc_difference 1587: note = a, c, g, or t
  misc_difference 1588: note = a, c, g, or t
  misc_difference 1589: note = a, c, g, or t
  misc_difference 1590: note = a, c, g, or t
  misc_difference 1591: note = a, c, g, or t
  misc_difference 1592: note = a, c, g, or t
  misc_difference 1593: note = a, c, g, or t
  misc_difference 1594: note = a, c, g, or t
  misc_difference 1595: note = a, c, g, or t
  misc_difference 1596: note = a, c, g, or t
  misc_difference 1597: note = a, c, g, or t
  misc_difference 1598: note = a, c, g, or t
  misc_difference 1599: note = a, c, g, or t
  misc_difference 1600: note = a, c, g, or t
  misc_difference 1601: note = a, c, g, or t
  misc_difference 1602: note = a, c, g, or t
  misc_difference 1603: note = a, c, g, or t
  misc_difference 1604: note = a, c, g, or t
  misc_difference 1605: note = a, c, g, or t
  misc_difference 1606: note = a, c, g, or t
  misc_difference 1607: note = a, c, g, or t
  misc_difference 1608: note = a, c, g, or t
  misc_difference 1609: note = a, c, g, or t
  misc_difference 1610: note = a, c, g, or t
  misc_difference 1611: note = a, c, g, or t
  misc_difference 1612: note = a, c, g, or t
  misc_difference 1613: note = a, c, g, or t
  misc_difference 1614: note = a, c, g, or t
  misc_difference 1615: note = a, c, g, or t
  misc_difference 1616: note = a, c, g, or t
  misc_difference 1617: note = a, c, g, or t
  misc_difference 1618: note = a, c, g, or t
  misc_difference 1619: note = a, c, g, or t
  misc_difference 1620: note = a, c, g, or t
  misc_difference 1621: note = a, c, g, or t
  misc_difference 1622: note = a, c, g, or t
  misc_difference 1623: note = a, c, g, or t
  misc_difference 1624: note = a, c, g, or t
  misc_difference 1625: note = a, c, g, or t
  misc_difference 1626: note = a, c, g, or t
  misc_difference 1627: note = a, c, g, or t
  misc_difference 1628: note = a, c, g, or t
  misc_difference 1629: note = a, c, g, or t
  misc_difference 1630: note = a, c, g, or t
  misc_difference 1631: note = a, c, g, or t
  misc_difference 1632: note = a, c, g, or t
  misc_difference 1633: note = a, c, g, or t
  misc_difference 1634: note = a, c, g, or t
  misc_difference 1635: note = a, c, g, or t
  misc_difference 1636: note = a, c, g, or t
  misc_difference 1637: note = a, c, g, or t
  misc_difference 1638: note = a, c, g, or t
  misc_difference 1639: note = a, c, g, or t
  misc_difference 1640: note = a, c, g, or t
  misc_difference 1641: note = a, c, g, or t
  misc_difference 1642: note = a, c, g, or t
  misc_difference 1643: note = a, c, g, or t
  misc_difference 1644: note = a, c, g, or t
  misc_difference 1645: note = a, c, g, or t
  misc_difference 1646: note = a, c, g, or t
  misc_difference 1647: note = a, c, g, or t
  misc_difference 1648: note = a, c, g, or t
  misc_difference 1649: note = a, c, g, or t
  misc_difference 1650: note = a, c, g, or t
  misc_difference 1651: note = a, c, g, or t
  misc_difference 1652: note = a, c, g, or t
  misc_difference 1653: note = a, c, g, or t
  misc_difference 1654: note = a, c, g, or t
  misc_difference 1655: note = a, c, g, or t
  misc_difference 1656: note = a, c, g, or t
  misc_difference 1657: note = a, c, g, or t
  misc_difference 1658: note = a, c, g, or t
  misc_difference 1659: note = a, c, g, or t
  misc_difference 1660: note = a, c, g, or t
  misc_difference 1661: note = a, c, g, or t
  misc_difference 1662: note = a, c, g, or t
  misc_difference 1663: note = a, c, g, or t
  misc_difference 1664: note = a, c, g, or t
  misc_difference 1665: note = a, c, g, or t
  misc_difference 1666: note = a, c, g, or t
  misc_difference 1667: note = a, c, g, or t
  misc_difference 1668: note = a, c, g, or t
  misc_difference 1669: note = a, c, g, or t
  misc_difference 1670: note = a, c, g, or t
  misc_difference 1671: note = a, c, g, or t
  misc_difference 1672: note = a, c, g, or t
  misc_difference 1673: note = a, c, g, or t
  misc_difference 1674: note = a, c, g, or t
  misc_difference 1675: note = a, c, g, or t
  misc_difference 1676: note = a, c, g, or t
  misc_difference 1677: note = a, c, g, or t
  misc_difference 1678: note = a, c, g, or t
  misc_difference 1679: note = a, c, g, or t
  misc_difference 1680: note = a, c, g, or t
  misc_difference 1681: note = a, c, g, or t
gtgtcgacttatattgaccagcgtgtacgggtaagtgcatttaaggccgaacaaactctaaccaaagatacggttccggtaaatgtggatgcagtcgtatattggaccgtctgggacgtggaaaaagctgcattggaagtacaggagtaccaaaaagcgatcgaacatatcacacagactggtctaagagataccatcggtaagcacgaactgtcggatctcttgcaggaacgcgataagatagctgaggatttgcaacaggtcttagacagaaatacgaatccgtggggcatcacatgccagactgtcggtatcaaagatatcgctattccgcaagacctggccgaagcaatgagcaaagaggcccaagccgaacgtgaaagaagagctcgtgtcatcttgggaacggcagaaacggaaatcgcagaaaagttcgaacaagccagtaaaaaatataccgataatcctgtggcattacatctcagagggatgaatatgctgttcgaaggcttaaaagaaaaaggatcaatggttatcgtaccgagttcggcactcgacaccatgaacttaggggctatgggaggcttggtttcattggctaagaacaacgagacaccgaaataaactattttctaataacaaaaaattaccatttatgaaaatacacaaacaagggattacttttgttctccttctattagtcttcacaagttgttcacgaaaaccatcgctgcaatggattcccttcagttgggaaggtgatacaatttcggggatatacattgaaaaagcttttctaaatgttccggtaaaaatagagaatttaccctacgaattcacaatgcagtttgatttaggaacatataattctgtcttttacgggaatacttttgctccttatctcaaagaagccccatctttaatgaacaaaaaagattcaaccgggatgtataagaatgtcaacctgcaaatagggacagtggagtttagcaatgccaatatcggattcatgcagaatttcggaaatgaaatccctaaagattcacttcattcaaatacacccaagcatattggaacgatcgcatccgacatggtgcaagataaagtcttaatcattaattacaaatcaaacaagcttgcaatcacagactttttaccggctgaatacgaaaatctgccggctgaagaatttgaatcagaatatggggtaataaaattgcctttacggattaatggaaaaacatgtaaagtattgttcgatacaggttcaagccctttccagttaataacgacacaagaaagagcttggagcgtatcagaccttactattgtcgactctctaagcggtcctttatggtggggacaagaaataacattttatggctttaatgtaaccaaaccgatcgagttcggcggaaaagccttgaacaattcgaaagtctactacgccaaagacggcctttgggatagtatttatagttccctcgatgtctggggaataaccggaaatgcttatttctttgaaaacaccgtgattatcgattacaaaaacaaactattcaggataaaataaaaattcgannnnnnnnnnnnnnnnnnnnnnnnnnnnnnnnnnnnnnnnnnnnnnnnnnnnnnnnnnnnnnnnnnnnnnnnnnnnnnnnnnnnnnnnnnnnnnnnnnnncgacaacgtcgaaaacaacttacacttgcatcaaaacaaaaacacattgccatcttacatcaaacctttgccagagcttggtctaggtcatcaatgatatcatcgatatattcagtacctatactcaggcgcacaatggaaggcgtgatatgctgtccggccagctcttccggagtcatttgagaatgggtagtcgtatacggatggatcaccaggctcttcacatcagccacattggcaagaagggagaatatttcgagcgaatcgataaacttccaggctgctacctgtccgccttcaatctcgaaagtgaaaatacttccggcacctttcgggaaatactttttataaagttcatggtctggatggtctggaagagccggatggttcactttggttactttcgggtgtttggataaatactcgacgactttcagagcattggcaacatgacgctccacgcggagagacaatgtttccagaccttgcagcaagataaaagcattgaaaggcgagatcgtagctcctgtatcacgcagaatgacagcccggatgcgggtgacgaaagctgccgaacctgccacgtcggcaaagaccgctccatgataacttgggtccggtgtgcccaaggtcgggaacttatcggaatttgctttccaatcgaaattgccactgtccacaatcactcctcccaagctcgatccatgtccgccgataaatttggtggcggaatgaacaacaatatcggccccgtgctcgatcggacggatcaggtacggtgtaccgaacgtattatccactatcaacggaatattatgacgatgggccacctccgccacagcatcgatattggtaacatcagaattgggattaccgaacgtttcgacatacaccgctttcgtattctcccgaatagccgcctccaacgcctgcaagtcattgacatttacaatcgtgtgggtaatgccctgagccgctaacgtatgcgtaatcaggttgaaggaaccgccatagagattatcggcagccacaatatggtcgcccactccaagtatattctgcaaggcatatgtcacggccgccgcaccggaagccaccgccagaccagccactcccccttcgagagcagcgacacgcgcttcgaaaactccctgtgtcgaattggtcagacgaccataaatattcccagcatcacgaaggccgaaacggtctgccgcatgttgtgaatcatgaaatacataagatgttgtctgataaatagggacggcacgagcatctgttgcgggatcggcctgttcttgccctacatgaacctgtaatgtctcgaaatgtaatttctttgttgccatagtcgtattattttaaattgttcttcttgctcattttccagcaaaactatagcagacagagatatcagacaagatatatggaaaatacagaaaataacgctatttttacggtcgtcaacagaacgcataaactgtatcaggatcgaaaaaaggattctgatagaattttattcttatgaacacacttgagaaattagacaaagtagacttgcagatcctccgtaccctgcaatcgaatgcccggctcaccacaaaagagctcgccgcgagtgtcagcctctcgtcgacacccgtattcgaacgcctgaaacgcctcgaaaacggaggatatataaagaagtacattgccgtgctggacgccgaaaagctaaaccagggcttcgtggtcttttgcagtgtcaagttgaggagactgaacaaagagattgcggcagagttcacaagaatcatacaggaaattccgcaagtcacagaatgctacaatatatcgggaagttacgactacctgctgaagatccatgcaccgaatatgaagtattaccaggagtttatcttgaacgtgttaggcacgatcgacagcctcggatcgctcgaaagcacctttgtgatggacgaggtaaagcatgaatacggaatccatatttaaacgccgccccgtccctatcttacatttattacttcaatgcataaatccgctggatgatgtccacaaccttcatgccttccaatacgttggtcgtaatacattccgaacttgcaccagaaaggacacggaccacattgcggatcacgaaattatggttctgggcggaacctttataagggccgtagtcatttcccggattcgtcggcgccagttccggcatttcataatctttgatatggcagtattcgacttcgttcatatactgtccgccgattttcacgcttccgttctccgcaacaatcagcatactgctttccatgttcctgttccagacagaagtggaatagctcaggctccccatcccgccgttcacgaagttgaaattcacaaagcccgaatcttcaaaagccgtaagtccggcatggttgaaatcggcaaagcgagcctggatattgcagatatccccgaaaagccagtacataatgtcgatgaaatgggagaactgggtaaaaagcgtccctccgtccaaaacggcatcgccatgccagccaccgggtttataatagcgctcgtcacggttccaataacaattcaactggaccatatagattttgcctaacctacccgaatccaccatctccttgatccagacggaaggaggagaataacggttttgcatgacgcagaacacctgtttacggtatttcagcgaagcatagaccaccttctcggcatcggcaagcgtcagtgccatcggcttctcgatcacgacgttgcaaccggtttcgacagcctgaatggccattgctgcatgcaagccgttcggggtacaaacatttacgacatctatggaaattccgctctgcaatagctccgtcagggaagagaaaaacgggacatcgtatgcctcaatacccaattcctcacgaggacgaatatcacaaagggccaccaattcggctcccggatcgcgtgtcaccatctcggcatgacgtttgccgatatggccacaaccgataactgcaaattttatctttttatccataagcattcgatgggggtgtgtcaaaatctccttgtccccgcgcttgacgcggagccgcaaaaggacagaccttatcaatcagatttttatagggtcggttttaatgctatcccgcgtcaagtgcgggaacaggatagtttcgacacacccccttttttagagtttctgttatatattgctgttgtccgagggacatttccgtatgaataggcagggaaaggacggattcgcacaaacgggtggagacgtccaaattaccagatacacgggagatatgccggtaagcttcctgatgatgcactggtacaggataatagatcatggaagggattccctgttctttcaacaggcattgaaggacattccgcctgccatcttttacctggaccgtatattggtgatagacatgagtcgaaaatatcgatctcgcagggagaaccaacgaatcgcaggaggacaaagcttcatcgtaccgagaggcaacttgccgacgggtttccgtgaactcctccagatgcttcaacttcacatccagcacagcagcttgcaacgtgtccagacgggagttgcatccgatccgcctatggtggtatttgcattcctggccatgattggcaatcatgcggatacgggtagccaacgcctcgtcggaagtcatcaacgcccccccatcgccatagcaggctaacggcttggatggaaaaaaagatgtcgtcccgatatgtccgatcgtcccggcctttcgtacccgcccgtcggaaaagatataatcggcaccaacggattgggcgttatcttccactacatacagatgatagacatctgccaaagtcataatcggctccatatcgcaggcttgtccgaacaggtggacggccacgaccgcctttgtccgttccgaaacagccgcttctattttccggggatcgatattaaaggtacagggatcgacatccaccaacacgggcgtcaaccctaacaaagcgacaacctcggctgccgctatataagtaaatgccggtagaatcacctcatcgccaggctgaagctccaatgccatcagagcaatctgcaaagcgtccgtcccgttagcacaaggaatcacgtatggaacctgaagataatcagccaaatgcccggcaaaggttttcacctgcggaccattgataaaagcacaactgtcgatcaccacctgcatggcctcatcaatctcctctttgaaccggagatattgtccatgcaagtcgaccatctgtatctgttcttccaacat

SEQ ID NO: 60 - DNA, 6211 bp, unidentified
  source 1..6211: mol_type = unassigned DNA
ctactcatcctcatgctcttcccagaaagaaggatcttcctttaaagaaaccctgttctgttccaccgcttctaaatagagcgacagccgcacatactgctcccggatgtcacgctctgccccatagtccaccgcctccgcaaactgctttaacaataccctgatattttcgcggacaactccgctgctctcctcaaacagacgctttgcgcgctccacaagcagccggtttctctccctgcccgccggataaagcgctgtctgattcattttttcaatgcacttgtctaattcttcccctgacatccggatattcttattgagtatgacctttcgaacctcattcgtggcacttttaatatggatatccaaaatcccgttgatatcatataaaaaagtcaccaaaaccccagtctctctcgccggagcttccggcaggtccgtaatatcaagttccccaagcaaaagattctcttttgcgttcaaatgttctccctgataaattttaaaatgcattgtcgtctggttgtccgctgtcgtcacataataacgcgatctgctgcacgggagcgaatcattccgttcaatgatcgtcgaaaatgttccatcatagatttctgttcccaaagaaaacggacagatatcggcaaggatcatgtctttccattccacagaccgctccttgatcgccacagtcagacctaccccgatggcaacacattcatccggcctgtcatccatcacaacttctgtttcagaaatactttccacataacgcctgacgaccggcatcttagaggatccacccgcaagaatgatgcggtcaatatcctcccattgcataccggcatcatccatcaccctctttaacgggacagacatcctctgaaacaatcctgccgctatcctgatcagcttctgattgtcaagccgcatcacatattctttttctccgagcagaacggttctttctgccgtatcctcttttgagagctgcttctttaaaagttctgcctcccgcaaaacgatcccgtgttccttttcgcccagagaagacggatcaatcccacagtttttcagaaaatcctccgctatgacctcattaaaatccttaccgcccagatggttatcgcccgcaaccgcccggatctcgaccatattgtcaaacgcttccaccaaagacacgtctaatgttccacctccaaaatcaaagataatgaaagtctccatctccttttcccgcacctgatggcgcagggcaaccgcagacggctcattgacgatccgttccacataaagtcctgccagttttccggcatttttcgttgcgtaacgcctgtcgtcatcaaaatatgctgggacactgatgaccgcctcggtaaccggctcaccgagaaacttctccgcatcctcttttaattttttcaggacaaacgcagacagttcctctgcccggtactcctgcccgcatgcccgaaaaatccgatccgtccccatatcgcgcttgaactccgcaaaagtctgctttggtcttgtgatctgcatttcctttgcgatctttccgacatagacctccccctgatctccaaaactcacaacggacggcgtcaggtaatcaccgttcggatttggcaccagttcgatctttccgtccctgcataccgcacagagactgttggtcgtgccaagatcaatccctatcactgccatctgctatctcctttcgccgctttttaccgctgtctgattccgctttatcatcacatggtcaagatacatctgtaaaaaactctcatatccggcatactgcttacttaccgcaaacagtttctttccctttttcccataaaatgtgactctctcaaaaaattctttttttgacacgacctcatcccacgtaaagatcctgcacctgcccagtgttcccgtttttgttccaattttgtgcgcgcctgccgccacctcggtcagtgtacttttccgcacccagcacaaaaataaaataagcgccagcgtcataacaagcaccggaagatcttttatgatctcctgcatccctgccttatgataatccgaaacacacaatacaatatcacagaccagcatgacaccgacgatcccgtacaaaaacatcatcatctgcgccagaaacgggtttggttcaacgatacagaaaatatcttccccaagccttgctttccatttttttatttttttgtagattttgtttttcatcccaattccctccccctgcgttccattgtagcatatcatatttgtaaaagatacctgtttttgacaataaaaaaattgccaatataccatctgacatactgacaacttccgggttgggctgtttatctctttcgaaataacagtgagtagctcgtaggggaatcgaacccctgtttccgccgtgagagggcggcgtcttaaccgcttgaccaacgggccataagtatttgttcatctctgttataaaaacagagtagctcgtaggggaatcgaacccctgtttccgccgtgagagggcggcgtcttaaccgcttgaccaacgggccataagtatttgttcatctctgttataaaaacagagtagctcgtaggggaatcgaacccctgtttccgccgtgagagggcggcgtcttaaccgcttgaccaacgagccgaactgatacttattatagcattcttttttttatttgcaagcctttttttgaagtttttttatttttttaaaaatatgaacaatttacacaatttcattctgcttttcccaccattttcatggcatttttacctctttttcatacatcagatcctctattacttcacgcaccgtcgaaatccgatctatttttccaacattcgaaccgcaaaatacaagtccgttttcaacgtctccatgcacagcacggatcaacgcctgtgtgatgcagtacggaatctgcgccggtttacagtttttaatgcagtgataacagcgttccacgctctccggcgcccgttctgtcttttggataaaagcattgtttaacgcacgccccggcatgccgaccggacttttgatgatttttacatcagtttcttttgcattcacatatgcttttttatatcctgaggaagcatcacactcttttgtcgcaacaaatcttgtcgctgcctgaactccgtctgctccgagtgcttcgatccgctttgcatcggatgcatcccagatcccgcctgctgcaaaaacaggtatctgctttccatacttctcctcgtactttttcttttcctccatgatccccgtaagctcttcctcaaaacggatctttgaaatatcatctaactgctccctcgaaaatccaagatgtccgcccgcctccggcccctctgtgacaataaagtctgctgtcctgccgtattttttatcccaggtttttaaaagcagcgccgccgcgcgccttgacgatacgatcggtgcaatctttgcttttcctgcttctaccagctccggcagatccactggaagcccggctccgcagattaccgcatccgccccggcacgcaccgcctctttaacatgctccctgtattgctgtaatgccaccatgacgttgactgctatcattccttttccagatgccagttcttttgcacgcacgatatgctttcggatactgcgcagattgcacgcttcttcatttcccacaaaatccggttcctcaaatccgatctgtgccgtggagatcacgcccatgcctccctccgatgcaaccgcgccagccaggccgcttaaactcacaccaactcccatgccgccctggatcagcggcagactcagattccatccttcaaaacgattcattgaaaaaattttcttcattgcattctcctctattatatatagtttttattactacatataatggtatcattcaatatataatatgtcaacaataaccatattattatttgtaaagaaaaacgactgtaaattttttacgtttacagtcgtttttcgtgtttttatcatttataaattatttattcctgcgcaaagacatcgacctcttctatcgtaagtcctacaccgtctgcaatctcttcctttgacaactttctctgtttcagctatgcagatcaatcgtcatatccgttcggattgttcttctgccatctccaggaatcttcgcacatctctttgataccatactgtgccttccagccaagctcacgctctgccttcgaaggatcacagtaacaggttgcaatatcacctgcacgtctcggtttgatggaataaggaatcttcacgccggttgcagcttcgaagtttttgacaatgtcaagcacactgtaaccatgacctgttccaaggttatagattgcaagtccgcatttctcatcgatcttctttaatgcttttacatgaccgagcgcaaggtcaactacatgaatgtaatctctgacacctgttccgtccggcgtgtcataatcgtcaccaaatacgccaagttcttttaatttgccgactgccacctgtgtaatgtatggcatcaggttgttcgggataccgttcggattctctcccatggttccactcttatgagcaccgatcgggttaaagtaacggagtaagatcacgttccactccggatctgctttctggatatccatcagtacctgctctaacatggattttgtccatccataaggattggtgcactgacccttcgggcagttctctgtgatcgggatttctgccggatcaccgtatacggttgctgaagatgagaaaataatgttcttgcagttatgctgacgcattacatccaccagagtcaatgttcctgaaatattgttgttgtaatattcccaaggtttctgcacagactcaccaacagcctttaatcctgcgaaatggatacagctatcaattttttctttttcaaaaatctcatttaaaattgtgcggtctaagatatcgcctttataaaaagtcacttcttttcctgtgattgcttttacacgctctaatgatttttcagatgcgtttaccagattgtcaagtacaacaacctcataacccgcatttaacagttctacgcatgtgtgacttccaatgaatccggcaccgccggtaactaaaattgccatagttttttccacctttccataacaaatctttttgttttccttcaacgttatgggtacatcttaccccattctttggaaaatgtatagcaaaaaatgtgtatattatatgtaaaaatgttgcatgttgactgagtggccggtataattatttagtgcagagccgtggggttgtggccgtcaggccgtgtgaagccgctggcagtggattaccagagaataatggaggattaccatgtacgaaaaatataaaaattcttacaaagtaacagagaaagaactggtttcactttccgtctataacgtgggatttcagagatgtgactcgctttatcagtggggaccgggaatccgggatcattatctgatccattatattatttcggggaaaggtttttacaagattggaaaaagaacttatgaattacaggctggggattcttttttggtgtatccaaatacagaggttgtctattacgctgcagagactgacccgtgggagtatgcatgggtgggttttacgggcagtgacgcttccatgatcttaaaggcaacggatttttcgccggaaaaaccgatcatacgggagacaccgcacggaagtgatatccaccgccagatactccatatttacgatgccagaggaaatgaatttgagcatgccgtggaaatgaccggacggctctatacgatgcttgccatgtttttacacggcgcctcccatacgacggagcaaaattccgccaacagttatgtgcagaaaggcatcgagtatatctcttccaattattcttatgcaattactgtggaggatatcgcagactatgtcggcgtcagccgcagccacctgttccgttcttttgaatcggtgcttggtcagtcgccaaaggaatatctgactgattttcgcatgaaacaggcgtgttatctgttagaacattccagcctgtccatcaccgcgattgcaaattcactgggttttgacaacagcttatatttttccaaaacgtttcacaaacaaaaacaaatgtccccaaaagaataccggacacattcccgtacttcttaa

SEQ ID NO: 61 - DNA, 14990 bp, unidentified
  source 1..14990: mol_type = unassigned DNA
ctagttaacaagaatctcctctgtctccttatcgaagatatgaatcttgcttaagtcaaatgcgaactgaactgtatcaccaggtctagctgttgtacgagcatttactcttgctgtgatatcgaactggtcgattgtgaagtataagtaaacctcagcaccaagcatctcatagatgttgattctagcatcgattacgctctctggtgatgactcgatgaagagctgctcatcatgaatatcctctggacggataccaagaacaacttccttatcaattgcatcaagtgcgatgagtctctcagccttgctgtctggaaccttgattgagtgtgaaccaaacataaggaggacgtcagcgcctgacttaacaaccttacaatcgatgaagttcataggtggcatacccatgaatcctgcaacgaagagattacatggcttgtcgtagaggttctgaggagtatctacctgctggatgataccatccttcataactacgattcttgtaccaagtgtcatagcctctgtctggtcatgtgtaacgtagatgatagttgtctgaagtctctgatgaagctttgaaatctcaacacgcatctgaacacgaagctttgcatcaaggtttgaaagaggctcgtccataaggaatacctttggctcacggacaattgcacgtcccatagcaactcgctgtctctgtccacctgataaagcctttggctttctgtcaagaagatgctcgatatcaagaatcttagctgcctcatgtacagccttgtcgatcttctcctttggaacctttcttaacttaagtccaaatgccatgttatcatatactgacatatgtgggtacagagcgtagttctggaataccatcgcaatatctctgtcctttggctctacatcgtttacgagcttgtcgccgatccataactcacctgagctgatatcctcaagtcctgctatcattctaagagttgttgactttccacatcctgatggtccaacaaagatgatgaactccttgtcttcgatctcaaggttgaagtccttaactgcgttgaatccgttaggatataccttgtaaatgttcttaagtgataaacttgccatttgaaattacctccgtagtgtatataatcttgtttttgttcaccctaaaaactattgttattctacatcatccacatttttcattctatgtgattattgctcaaaaaaatctttgaacttttgtctaaaatgtatacgttcgcattttttacaacattttgacgattttctaggctttttgataggctttgcactttgttttttgtgaaaccttcaccaatagctcacaattttcaccgttttttagtaaggttttcagtatattttataacttttgcctattcaatttaaccatatatatacttgacaaaaattgtttctcttttaccactgcttcaaatttttgttattttgtcttaattacgactttttttatcctgcgttgatttcaatttgatttttaccatttcaaaatatgcagtatttttactacagtcaaaaaaatccttcgtaccgatgaaccaccatcagtacaaaggacttcataatattctagttatttgctgcgttgtcaacaccgatgacaacaacaatatccgcatcacttatatctacatctgccatagaatcatctatgtcagttctggcacttgtggaagcagatccgagaatcgctgtaagtgaacttacatcgtatgaatcagatgtatataccgtcgtggaagactgtgtatctccctgatatgttcctatatccaccgatgtgtaaccatcagctgtaagtgttgtctgccatgtagctgcaactcctgatactcctgatgcgttgagtactaccatttttgcgttctttgcacttgatgagcttgtatcctctgaaggatcctgcgaattctcgccgtctgatgaagcatctgttgtttcatcagcatctccgtctcctccaaatgtaggatccgatggatcattctcctctgtaactatacttgacacctctttcttgcttgtagtgtcgttcttcttactcttgctcatcgtctttgcgaggagcaccagcattgccactatcgcaaccgctagtattataaccgcagctctgagcatggtatctaaaaacaatttcataactttcttacccattatacagcctccatattctttatgcatttcaatatttgatcagtatctttaaatccaatttaagtctcatcagtttatcaacaaaaacaactagagtataccaaagtgcttttttattttcaacatgtaattcacatgatataataattttcacgaggaggacccactctgtgggagagtccttgtgaagcacgcaggcacctcgcgcagcgacttttcatgtgcctgctccacttttcacgaggagaacccgcttacgggagagtccttgtgaagcacgcaggcacctcgcgtagcgacttttcatgtgcctgttccacatttatggcaaggaggtgtcattttttggatactgcaataataatcggagcttctaccggtatcggaagggccactgctttaaagcttgctgactcatataacaatatcgcgatcacttctttcagacacagagacgagctcatgtctctcaaaaaagaacttgatgcaaagggatgtcactgtctggcaatgagcggggatgccggggatatggatttcatggagaattttatacgaaccatcacagacacattcggtgatgatatagatctgctggtgaacaacgccggaatatcctacgtagggcttctcaccgacatgaccatcaaagattttgacagaaccatgaaatccaacatatactcagtgtttaacagctgcaacagagttgttccttatatggtacgcgctcacaaaggccatatcataaatgtctcatctgtgtggggatgctgcggagcttcctgtgaggttgcctactcagcctccaaaggcgctgtaaactcattttcaaaagctctcggcaaagagctcgccccaagcggcatagcggtcaatgcaatagcctttggcgcagtggatacgaccatgaacggtcatctctcgcctgatgaacgtcagatgctggaggatgagattcctgcaggacgcatggcaacgccacaggaagccgctgagttcatatgccgcatagccggctgtggaaactatctgaacggccaggtcatcacctttgacggtgcatggcagtagccacatattttattgaacattttcaaccaaaacattgtgtaacttaccaaattcctattgcctatttgtacatattgctttagaataaactatatatgttatagaaacaggggttataaaatgggatttggatttgggaaaaagaaaaaaagcaaacctgctgaggataccacattgaccgatatgcagaccactcttgatgaaaacggtaatgtcgagattgtttccaaaaatttcaaaatgaaaccgactcagaagacttcagagggcaccaccgaaacaggtgacacatggatatgctggggatgcggacagcccacaagtcaggatgtgtgtccagtttgcggtaaaaaacgaatcaaatagcacacacaagcaaaaggagattgtattttcacaatctcctttttgttgtcttgtctaaactattaaaatgttattcctgccgcatttatgagaagtccccacataagtcccgctgcatagagcaccgctgctattctaatattctcagctggtctgtgtctgttcattctgaacaaaacaacaagtcccaccccggcactcacgagaagtccggacatcatggctccggcactgagtatcccctgaagataaagctctgttatgatcactgaagccgcacagttaggtatgagtcccaccagagcagccgaagcctcaccaagaactggcacatcattgaatatccttgctatggtatcctccccaaccaactctataactatatttattatcagggtaaaaatgaatatgaatatcgcaatctttgcagtgtgtaccaatgccgatctcagcacgccgccctcgcagtcacagtgttcctgttcacacacctcatgtatatttttctctccataatgtccgtgatcgtggctgtgctcatgaacgtaatcatgcacgtgtccgccattgtttttctcaccctttatattgttgtaaactatgttctggggatactgtgtattttctgccgcagcttcgccatgcatatgcccatgttgatcctgatgtacatgaccgtgtccgtgttctatcctcttcacttccactggttttctgagcctgtccagcacaaatcccactaaatagcccgttataactgctataacagcctttgtcacaagaatctttgctatagttccggcacttatggcatcatttgagagcattatcgggagcatctcatccgatgttgacataaatactgctatgagcacacctgcgcctattactcccccactgtacaggtttgatgccatgagcgaaaatccacactgtggcactatacccagcactccgccaagcaaaggcccaagtttttctgcctttttcaacacatttgcctgtctgcccgcagtctttctctcaagccattccatgatcacgtaggtgatgaacagaaacgggatgagtttgaccgtatcaaacaatgcatccttaaatgaatctattaacaatccaaacatatccctaacactccttgccatcagaactcatatacattgtatccgcaattgtcctgactaaattcaaaatactcctcgttggtcatatccctaaaataactgcatatcacgcggcatattccattgtggcatacaaacagcaccgacgaatccggatatcgcttcttcgtctctatgatgagatcgtacgtcctcctggctatatccatcatggattctccacctgggtatctataggcaaacatcctcttattattgaggaaatcctcatcatctctaggaaccccctcatacacaccgtaatcctgctctatgagcctgtcgtccgtaacgacctgcaaatgttttctctgagcaaccgcctgggccgtcttctgcgctctcgaaagcggagatgctattatcacatcaatagggcagtcatccaacttgtctgcaaggagctgtgcctgtctgagtcctgtatctgtaagaggggagtccgtcctgccacagaccttgttcagtctattccattctgtctctccatgtctcgcaacatataacctcatctgtacactccttccgactttatcagatgtcacatctttataatattaagcatttttgcaaataaatcaactgttttggataataaagtatctggaattttattctggaattttattttatatgcttatactttctgtatttttaagcgtttctgtggactgagtgctgttatcttgcccaccgttctgtctcttatctgagttctgtgaatttccagcgtctgaaccgtcgcctgtgctgtctggtctctgcataccgccgttgcctgtgctgtctggtctctgcatgccgccgttgcctgtgctgtctggtctttgcatgccgccgttgcctgtgctgtctggtctctgcatgccgccgttgtctgggtctccacctggtccctgcatgctgctaggaccttcgctgtatgtcacatcctccattgcaaatgtgctcgtctgatctcccgcagtcaaagtgtatgtctcaccctgtttcatatctgaagtacttatcaaaactgagtcaaacttcttgtcagccttgtaagttaggagcttattaccattggaatcagttagggtgatcgtctctccggcatctatccactcatcaaaattgacaagtgcagaacattgtgtggactcatctccaaattcctgttccatgcctgaaccgcccacagccaccatctcaccgccggtgatagtcgcatagattccgtaatccagcgcaccatttccattgtttgaagggccgagtacatacacgctgccacccgcgatgccaagataaccatttgaatctattccatcgccgtcagcattgatattgatgattccgccagttattagaatatatgcgtcataatcagtatccatgcctgcgcccatgccagatccgccaggtgtgtctgagtctcccggccggtctcctttttccggaagttctggtctgttcgtttctgtgtcatttgtccttctctggaacgaatccgtctgcctctgatcatcctcggttgattgtgtgccatcgctctgtccgttgctgtcgggtcttgccgcattgaaaccgtcatcgttggctaccacgtctatatcgccaccagtcaccagtatcttataaccctcgataccctcatagctcttggaaatgtctatatctccaccggttataatcaaaaggccttccgcgtgcatcgcatcgtctccaaccgatatatcaatgtctccaccttctatatatatgtagctatcctgctgatcgtcgtttccggcatgtattccatcttcatcacaggtgagggtaaatgttccatccgcaattcttacgctatatttgccgttcaggcagtgatcctgactatctatcgtataggttccacccgttaccaccagatcatccttggacacgattccatgtccggtggtatccttgaccgtaagacttccactgccgcccagcgtgagatcacatttggcaaatatgacagcgtccacattgttgtcatcagtctgtacatagtcgcctgacactgtaagagtgttctcagtcccctctgtcaatgtcacaaataccttgtctgcgttctttgcatatatcgccgcatagtctgcagccgtgatcgacacgccatcaaatacaagctgcaccttgtcatcatcaccggcatccactacgacggttccgtctgtgagtgtccctgacagaacgtatacacctgccgccttgatcgtcaccacaccatcttctatatgtacatttgagctgtcacatgtggctgtctttcccgataatgttatctttacagcctcgctctcatcataggttcccgccagatcccgcttcgtgaacatatctgttatatctatagccgcattgctcatggcttcatctatagccgcctgcatttcctccacagtcatctctgtctttgtacttgtgttctgtgcatccgctgcatctgtgtcagcatctgtggctgtgctcacttcacttgccaactcagtatctgaagtcgaacctgtgctctggccggtcgaacatccggcaagcattgccatgcacatggccgctgtcagccccaccgccaaacacttgcgtattcccgctctatgtctcatatatttattcttcctcatgcgatcatctccttactaagcatttgccaaccgatctaaatttctgctctgctttatatcatcaacatcatctcatacatttgtcatcatctataatgtcatatcccccgaatccacctgtgtcagcatgatctctaagttgccatttctcaccctgagtctatctatcatatccttctgatttgtatctttcttaagttttaccgcatatgtaagcttgaacagacttcccatgttggtcgttttcacatttgtcagtctgtaactgtctgtacagtcggcaagtacctcgccaaatgcctctgtatagtcaagattttcaggcacagtgatcttcagggctctctcttcatcccttccgccgccaaatcccgtaagactgcaagcgaacattgctccgccaagtattatcgcaaataataccgcgtatccgataaatcccattccggtcacaagacctgctcccatcgcaagaaatatcgcacatatctcctttgccgagccgggcactgatctgaatctcaccagactaaaagctcctgccaccgcaacgccagcgccaacattaccatttaccatcattatcaccacgcacacgactgctggtatgagtgccagtgtcaccaaaaagctctgtgtatatttactcctaaacgcgtacacccctgcaaggaatacgcctatcacaagagataccgctatgcagattagaaactcctgcaccgttatcgttgtcgctgtaccaaatacactgtcaaataatcctgtcatcttctatatcctcctgcttatgtttgcccttgacttatgtcaaccaaccatctgtttatatgcctctccatactttgaaaatgatgttctgtatacattgtattttgtgagcagatgtgacagccacaatggaaatccgcctgccatcttgatctccatcaacaccttatattcaggtatgaccttgtgcccatacggctctttctgcagtgtaagatcatcgttctgccagagtatgtcgtagtcaaatgtaatccttagtctcggattgtctatgcctttgtaagaatcacgctcatatgagagaaccactgcaggctccagatctttgtacacctgcatgaaataatctatctctcttcctatctggcaatcttcgtgcagtggctgaccgcccaccagataatccatcgcctcctgttcaggcacctccagcctccttttgtacacaacagatttgtatttcttcttgagctcaataaaaacctctgaatcatcatctggtactccatagcttctgagcctgagcttttctttgtaaaccggcttttctatggagtccctgatgagtctgtgggaaggggtatcgaaatatatgttaatgatctggctatgtgcgaaccggtccggctgcatataccttatcatttcactcattatctgctcgtactgttctctatctaacatgtacttaagttcatatcttttaaacgtgttgtctgccataagcatcatcctttctttacattatctcctcttgatgatgctataatagcctaccaagcttaaacgaactttaaatataaaaaattgtcttcggtgactcctattggtgtgtattctctacgttgtatatccaatcggtagtgccggcgaccgagctttgacgcttctgtgccgccgcagagagctaggcgcccttatcgtgcttggcgtggcgtgcacgatggaagcaaagtcaaagtgagggtagacaaacgtgattggatatacaacatagagattacaccagcaggaatcaccgaagacaaccacaacgcaaaaacgcccatctgcggatcactccacagatggacgtctatagtcttatattataatcttatgtctagttgatttgaagataaggctcccgccaaatgcttaggattagcaaacgccctgagcaagcatagcgtcaacaaccttctcgaagccggcgatgttagcacctgcaacatagtctgcgtttccgccaactgtcatgttgtatctctttgctgcatctgagatgttagcgtagattgtctccatgattcccttgagcttgccgtcaacttcctcgaatgtccatgaaagtctctcgctgttctggctcatctcaagagctgatgtagcaacaccacctgcatttgcagccttaccaccaacgaagagaacaccattctcctgaaggtacttagtagcctcaagagttgtaggcatgttagcgccctctgttactgagataacgccatttgcaacaagcatcttagcatcgtcaaggttaagctcgttctgtgtagcacatggaagagcaaggtcacacttgattgaccatacgccgtgatcatttgcatccttctttacatggtactcagctgatggtctagcagcagcataagcatcaagacgtgctctcttaacttccttaacttccttaagaagtgcaacatcgattccttctggatcgtagatccaacctgtagaatctgaacatgtaacacacttagcacctaactgatgtgccttctggattgcgtagattgcaacattaccagcacctgatactgcacaagtcttgcctgcgatatcaatgtcatgatcctttaacagtgcgtttgtaaggtaaagcagtccgtaaccagtagcctctgtacgagcaagtgatccaccatatgtaagtcccttacctgtgagaactccctcgtatgatccacggattctcttgaactgaccgaacatgaaaccgatctctctagcgcctgttccgatatctccagctggaacatcgacatcagcaccgatatacttgcaaagctctgtcatgaagctctggcagaatgccatgatctctctgtctgacttacccttagggtcgaagtctgaaccacccttaccaccaccgattggaagtgttgtaagtgagttcttgaaaacctgctcgaaaccaaggaacttgatgataccaaggtttactgatggatgaagtctgagacctcccttgtatggtccaatggcattgttgaactgtacacggaaacctctgttgacctgtacctgtccgttgtcatctacccatggtactctaaacatgagctgtctatctggctctgtgattctctcgaggatagcattctttctgtaaagctcctcatttgcctcgatacaaggtctgagtgaatcaagaacctctgttactgcctgtaagaactcaggctgatctgcattcttcttctgtactatctcgagtacttcatcaacatatgacatagtaaaaatcctcctaaactgattatatatcgtgacctgttaattatttcctgaccacgctccctattatagtatagggaattaagattgtaaagaaaaaacttgtgaaatctaagtatttttttgtttttgcttaattttcccctgtatttatcaattacgcttatcatttgtaaacattattactggttatgaccgttgtcacggaagataatccgagatatttttccactgatctcagcttctactacttgtcatcgtcatggtgaagatcattcttccagtatctgcatctgtgctttacatttgtggaaaatacgatctgagtcttggtcttgccaaatctctgaagctctcctacaaaatgatcgagatctgccgttgtcttaaaacgtacctctatgagcattgagtaatctcctgtcacgcagttgcactccacaacatttaacacgctgtctatatatggatagaactcagccttctgctcaggtgaaacctccagattgataaatgccttgatataatgacccatagcctcaggattcagcttggtcgtaaatccctcaagcacgccctcggcaagcatcctgtctattcttgttccaaccgctgtaggtgacatggacacctcagcgcctatatctttgagtgatacacgtgcattgtcctgaagcatggcaagtatcttctcatccacctcgtccagtctgtagtatatcatttctttcttttccataagatgtcttctccttctcactttctaaggcaattacaatattatcctacataaccgcaattgtcctttttcctattcaagcaccttatctcgcggtgcaacttgtgtttcacaatcatattagcatatttacttaagattataaatgtgtagtgtcattatataccctgctctgcgcaaattacaacctgatttttatgtatatttgttgttgttgtgttgttatacgcaacctgatttttactcataatgttttcgtcattttacggtataattatcctcaagccagtgcgccaccccatcctcatcatttgatgatataacagatgtggcataccttttaagctgttcatcagcattttgcactgcgtagctttcgtcagcaagttcaaacatatctatatcattcctgccatctccaaaagcaaccaccctatcgcatcccagaagtttctgcaactgttttatcgcatttgccttggatgccgcaagcggcatgatctctagccattgttcatccgtataaatgtctttctgatatacacagtgaaatgtttctttatatttatcgtacattggctttagcttttccggactatcaatacaggtgatgtagaaaatgtttcccactttcagattctccgcagactttactatattcgtcctgacatccccctgcctgctgagcaggaacttcttcataccatctgtacacagctccgggacatacgaaaatttctccctgccatctattcgcgcatacactatcggaaatatctgattaccgaatagatcgtcaagaactgatcctaccgattcatcaaagtaattcgcagcaaggacttcaccggtaagattgtctactataaacgcaccattgtacacgatcagcggaatttctgcccgcagtccacttgtcactttcttcgctgtgataagtgagcgcgccgtcgcataagagaatatcatccctctgtctgtcagattattgattacactgtttgtatactcggatgtggtctcattactgcgaagaagcgtaccgtccagatctgatacatataaagttttcatgttgtcacccacctatctcaatttttctgcaatatatgctatttttctacaactcacacattttcatacaacgtacactattcctataacgctttcgttttcccacaattcactcgattttcaattttctactacatactattttccataacattctatcttctgtacaggatctccacatccccatccacgaatccggcggcaacagcctcatacttcttcagctcatcggcatattttccctctgtgagatactttctgatcatctcacaggaaatatcaagtatctcctcccagccggtatcctgctgccatccgtacagatcttcccctgtcgtgaactcctcgtaacaattccagtcctcatcctcctcgtcaaaataagttgcacttatcaactggatcgaccagtgcagatcaacttcttcgtatatattgaaattgatagccactcccggcagcggcatattctcgtccaatatccggtctaaccattttgcaaattcatcgtacatatctatttcccctgttcgtcacgttttttcctacaagtctttactgttatttctatgttcaaccttctaatccttctcatatataaatgtcgtatctcctatggtgcatttcagatattttccatctatcgtacccgttgaaaagctaagagtatccgtcatcttaaagttgtactgattatcccccgtctgttccacctgcagattgatagtcttatcccccatcgccttaccggaatagtaaaatgttgcagtatcaccacttatttcatagatctcttttgtgtcctcactcttgaccttatacgtcttgccatctgatgtctcactttttacaagcacccattttccatccagcgtctcagtcttaccacacgctgtaaacgcaaacacacataccactaccagtatcactgatatcattttctttatattccccattttatttcctcccttttgaatatctgtcatctaagttattttatcaaaaaaggctgatgtgaagtattccctatacacatcagcctcgttttatgactctatatgattattacttgttgttcttgatgtactcatcaattccctttgcaccagctctaccagcttccattgcaagtataactgttgcagcacctgttacagcatcaccaccggcatatacgccttccttggtggtctgtccgtttgcctcttctgcaacgatacacttccacttatttgtctcaagtccctctgttgtcgatgagataagtgggtttggtgaagttccaagtgacatgatgactgtgtcaacgtccattgtgaactctgaatcaggaatctcaacaggtcttcttctgccggatgcatcaggctcgccaagctccatcttcacgcacttcataccacaaacccagccattctcatcctcaaggatctctgttgggtttgtgaggagatcaaatatgattccctcttccttagcgtggtgaacttcctcaactctggctgggagctcctcctctgaacgtctgtacacgatatgtgtctcagcgccaagtctgagtgctgttcttgctgcatccattgcaacatttccaccaccgacaacggcaaccttcttgcctctcatgataggtgtatttgaattctcgtcaaatgccttcatgaggttgcttcttgtgaggtactcatttgctgagaatacgccgttggcattctcacctgggatacccatgaacttaggaagtcctgcacctgatccgatgaacactgcgtcaaatccctcatcctcaaggagtgagtcgatggtgactgactttcctactactacatttgtctctatcttgacaccaagtgacttgatgttctcgatctccttggcaactaccttctcctttggaagacggaactctgggattccgtatacgagaactccacccggctggtgaagtgcctcgaatatagttacatcgtaacccatctttgcaagatctccggctgctgtcacacctgaagggcctgatccgatgactgccaccttgtgaccattcatctcctttgcaggctctggcttgattccgttctcacgggcccagtcagcaacaaatctctcaagcttaccgatggatatcgcctcgcccttgattcctctgatacacttctgctcacactgtgtctcctgtggacatacacggccacatacagcaggaagtgctgatgactcgctgatgatcttgaatgcctcagcgaagttgccttccttgacctgagctataaatccaggaatattgatagatacaggacagccattcatacatggggcattcttacatcctatacatcttgaagcctcagccatagcctcctcttcattatatccgtaacaaacctcttcaaaattctttgcacgtacctgtggctcctgctcgcgaaccggcactctcttccaaacatctacttctatagccat

SEQ ID NO: 62 - DNA, 7374 bp, unidentified
  source 1..7374: mol_type = unassigned DNA
  misc_difference 1368: note = a, c, g, or t
  misc_difference 1369: note = a, c, g, or t
  misc_difference 1370: note = a, c, g, or t
  misc_difference 1371: note = a, c, g, or t
  misc_difference 1372: note = a, c, g, or t
  misc_difference 1373: note = a, c, g, or t
  misc_difference 1374: note = a, c, g, or t
  misc_difference 1375: note = a, c, g, or t
  misc_difference 1376: note = a, c, g, or t
  misc_difference 1377: note = a, c, g, or t
cacagtgacagcgccgccgtgcagggcggctattttttgtgccatggcaaggcccaagccgttgccctgcgtccggtggctggtgtccccctgatagaactgctcaaagatatggcggcaggtttcggcgtccataccgcagccatggtccgtgacagccacaaccggtctgccctgctcgcagtgcagtgttacgcttatggttccgttctcctggctgaacttggcggcattatccagcagattcagccagatttcctttaccagcgcttcgctgccgtggtaggtgcagggggccagcgcggcctcaaactgcagcggcttatcgcgccacttttgccgggtcacaaggatgcactggcgcagctgctcatccagcgaaaagtctgtgcagtcggtcagaatggtctgtgcctcgatacgattcaatagcagcacactgccggaaagctgtgccagccgcctgctctcatcgcggatgatttgcagatactcgcgctgttcctccggggtgacatcctcgtccagcagcaggtcggcaaagccgctgatgctgacgatgggcgtcttgaactcatgggaaaagttattcacaaaatccttgcgcagcagctccgtgccggaaagctcctccgccgctttgttgaaggctgctttaaactcccggatctcggtgggctcatacccgtgggcagcaggctgcaggcgcacggtgaagtcccctgccgccagccggttcatcgcctgcatgatgtttttgataggctttattaacacaaggcgaatcgcaaccacaaggctgacggccatcaaaatacagctggcgtacaaaataaccagcgcaccgccgatgctgacgctgccgtcttgaataaaaaagccgtggtcagcctccaatacaaccagcaccgtcacaacggtcagattcagtgtaacgatgaaaaacaggttcagcaccagcagcatcgtcaaatttacggtgcgtatgcagtcgcgcagcttatttacaaattgcgccatatcacaccttctttatagcacggtagccgatgccgcgaatagtctgtatctcaaactccggccaatcgtaaaagcgggtgcgcagccgattgatatgaacatttaccgttttgtcgtcactttcgctgtccatgccccagatctcatccagcagctccagccgggtaaaggtcctttccgggtaagccagcagcttgtataggaggttgaactccttgggcggcagcacctgcgcatcgtggccgcgccgcacggtgtgggtgtcgtagtccagctcgacatcccctatcgtgattttgtgttcatccacgatgcgggcgcggcgcagcagcgccttgatgcgcagcnnnnnnnnnncctgccggtccggcggttttgtcatataatcatcggtaccaacgataaagcccgtgtgcttgtcctgcggcatatccttggccgtcagcatcaaaatgggcagcatgctgccgctttcgcggatagcctttgtcagcgcaaagccgtccatccggggcatcatcacatcgcagagcagcaggtctatctggttgtggtcgagcagttccagcgcttgcacaccgtcggcagcaatcagcggctcatagcccgctcgctttacgatggcgcaaagcagacgtgctgtgctggggtcatcctcggcaatcaaaatacgaaacatccgtgtatcctccttagttctattatagtacagcgcaaagataaacggaagataaaccttcccgtttaccaaaggtttattttggcggtgtatccttaggagcatcgaaacaaaaaacaacctacgggaaaacggaggatacagctatgaaaaccatctatcttgtcaccggtgctgccggatttatgggcactaatgtctgcgcacagcttttggagcgcggtgatgccgtgcgcgcttttgtgctgaagggcgaccccgctgtaaaatttatgccgaaggccgtcgaaatttttgagggtgacctctgcagtgccgaggactgcgagaaattctttgtcgtggagccgggcgtccagactgtctgcatccactgcgcgagcatggtgacgatcaacccgaattatagtgaaaagctgatcgccgtcaatgtgggcggcaccgaaaacatgctgaacgccgccaaaaatcacccggagtgcaaaaagttcgtctatgtttccagcaccggcgccatccctgagctgcctaagggcgagagcatccgcgaggtatacagctttgttccctacgatgatgatcgcgtggtcggctggtacagccgcagcaaggcaatggcgacccagaaggtactggacgccgccgcggacgggctgaatgcctgcgtggtgcatcccagcggtattcttggccccaacgaccccgccatcgggcagacgacccgcacgctgatccagattttgaacggtgagatgcccatcggtatgcagggctcgttcaaccttgtcgatgtgcgcgatctggccgccggtacgattgccgccgctgaccgcgggcgcaagggagagtgctacatcctttccaatgacgaggtttcgctgaaggagctgtgtgagatgctcaaggctgataccggctgccgcggctgcctgttttatctgccgctgtcttttgcgcattttgccgccaagcagatggaggcccgcgccgccaagaccggtaagcctgctgtgctgaccgagtttgccgtttacaatctggagcgcaacaaccattttgactgctccaaggcaaaaaatgagcttggctttgccccgcgtccctacaaggaaacactgcatgatctcgcagtatggctcaagcaggagggaaaaatcgcatgaagaagctgtatgaatctatctgcaagcttatgcaaatgaatgaccagcagtgggagtgctatctccacgcactggattccctgcactgacacaaagaaaagggaggtgcctattatgaaaaaggtttgcgttatcacaggcggcggcagcgggatgggacttgccacggcgaagcttgtctgtgaagaagggtattacacgattttggtggggcgcacggcatccaagctggaaaaggcagtcaccgacctgcgcagtgcaggcggcgaggctgaggcgttcagctgtgatgtttccgaccgtgaaagctgctttgcgctggccaaacacgccgccgaatgcggcgaagtaaaagcggtattgcacattgcgggcctcagccctcacatgggcgatgctgaaaagattttgcgcagcaatgcgctgggcacggtgaatatcaacgatgccttttatgaggtcatggcgccgggcggctgtgtgatcgacacctccagcatgagcgcctaccttgccccgcagtttgtcatgcccaagggtgcgtacaagctggcgcgcaccgaccgtgaaaaattcatcaaaaagctggtggcgcgggcaggcatcgcccctaaggacgcccgcccgggtctggcctacgccatcagcaagcattttgtaatttggtttgctaagaccgatgccgcacgctttggcgagaaaaatgtgcgttgcctgagtgtgacacccggcaactttgacacgccgatgggcgcactggaaagcgggcaggcggatgtattcaaaaaatactctgctctcaagcgcaacggaaagccggaagaaatcgccgctttgtttgcgcttcttctggatgagcggctgggtttcctgaccggagcagacattcttatggacggcggcgttgtggcaagcggcaccagcggattgagcaaataaaaaagggcagcaaagtaaaccccgattttagcttttggggtctgctttgctgccttttggattttgtgctttcgcttggctgtactttagtgcagctcgctttcgcagcggtccagcacggcggcgatgacctgatccatgtcgtaatacttgtactcacccaggcgtccgccgaagatgaccttcggctcggcgtcggccagcttcttgtactcggcatacagcgcgccgtttttagcatcattgacggggtaatacggctcgtcaccgggcttccactcagaggaatactcgcggctgatgatcgttttgggcaggtcgttgccgttctcgtccttgccgaactcgaaccatttgtgctcgatgatacgggtccacggcgtctcgcggtccgtatagttgacggcggcgttgccctggaagctgggcttgtcgagcagctcgttctcaaaccgaacggagcggtactccaacgtgccgagtttgtagtcaaaataagcgtcaatcggaccagtgtagacgattttgtcagccagtgcgtccagcgcggccttgttttcgaggtaatcggtgttcagccgcacctcgatgccgtccagaagattggcgatcatcttggtgtagccgccgatgggaatgccctgatacagcgcgttgaaatagttgttgtcaaaggtcagccgcacaggcaggcgcttgatgataaatgccggcaggtccttgcaatcgcggccccactgcttttcggtgtagcccttgatgagtttttcataaatgtcgcggcctacaagggagatggcctgctcctcgaggttctgcggctcgtgggtgatctcgcggcgctgctcctcaattttggcggctgcctcctccggtgtgacgacgccccacattttattaaaggtatacatgttgaagggcagcgaatacagctcacccttatagttggcaacgggagagtttgtaaagcggttgaactcggcaaaccgggtgatatagttccagacctttttgttgttggtgtggaagatgtgcgcaccatacttatggacgttaataccctcgatgttctcggtataaatgttgcccgcgatgttggggcgcttatccacgaccagcacggatttgccgtgggccttggcctcatgggcgaagatggcaccgtacagaccggagccgactaccagataatcatatttcatataacaggtgttcctctctttaaaagtcacagggatattgtgcggtaatggcattgagagccttactccgccgtcaaaaagcggctgaaaggcggttcagtctctgccgaacagatcccttgtgtagaccttgtcctgcacatcgtctaggcaggcatcgtagcggttggccagaatggcctgactctgccgcttgaatttgtccagatcgttgaccaccaccgagccgaagaaggtcttgccgctctccagcgtaggctcatagataatgacctgtgcgcccttggccttgatgcgcttcatgacgccctgaattgagctttgacggaagttgtcgctgttgctcttcatcgtcaggcggtagacgccgatcgtgacgggcttttcacggctttcgtcaaactcattttcctgatcatagccgtagtacccggccagcttcagcacgcggtcggcgatgaagtccttgcgggtgcggttggactccacaatggcctcaatgagattttccggcacatcggcgtagtttgccagcagctgcttcgtgtccttgggcaggcagtagccgccgtagccgaagctggggttattgtaatggctgccgatgcgcgggtcaagacatacgccgtcaatgatctgcttcgtgttcaggcccttgctctccgcgtaggtatccagctcattgaaataggcaacgcgcagcgccagataggtgttggcgaacagcttgacggcctcggcctcggtaaagcccatgaagagcgtatcaatgttctccttgatggcaccctcctgcagcagtgccgcaaattcgtgggcggctgcgacaaggtgcgcatcctccgggtcggtgccgacgatgatgcgggacgggtagaggttgtcatacagggccttggactcccgcagaaattccgggctgaacaggatgttccggctgccgagcctttcccgcaccgacaccgtgtagcccacgggaatcgtcgatttgatgaccatgacggcgtttgggttgacctccgtgacaaggcggatgactgcctccactgcagaggtgtcaaagtgctgggtctggctgtcgtagttggtgggtgcagcaatgaccacaaagtccgcatcggcgtaggctgcctttgcgtccagcgtagcggtcagatccagctccttctctgccagatatttctcgatatagtcatcccggatcggcgatttacgcgcgttgatcaatgcgaccttttccggcagaatatctaccgccgtcacatgatggtgctgggaaagcagcgtggcaatcgaaagccccacatagccggtcccggccaccgcgatcttatattttttcatagcagtttatactccgcagctgcgaattttccgtaaggcagcggtcaaaattgcgccgtgccggcttaccgtatgtgggtttattatagcacgtcaccggccacaattcaatatagccgcttccctcagaattgtttgaacaataatccagtattgaaaacaatcgtctctactcagtctttgctgtatctgctaagatagaatcacggtactggcgtggtgtcagaccggtttgtttacggaaaacacgataaaagtaattgtcatccaggaatccgatctgctggcagatctgtgcattggacagattcgtatcgcaaagaagcttcatcgctttttggatgcgcaggtgcgtgatctgctcgttgatgccgcagccatagagctgccgggaaagatagtacagcccggtacggcttagcgaaagatcacggcagatcgtttcgtttgtcaatgtctcatccagatgttccgccaggtagcggctcagtttttcctgcgcactgcccgctgccagccgcgtcagccccttttggtacaatgcagccgccgccaaagccagcagatccgctgctgatttcagcaccggatagggcgtgtgcggcaaggcattataggctttttgcagtgccgttttatcaattgcgtaagccgagcagcatttttgcgcatagctccactcgctctgctcatcggccccctgtacaatgtggctcaacagcaaaaagcccacaacagcaccatcgatttggaccggcgtgatcacttcgatcaaccccgcatggcaggggtagatgatcgtctgcttttgccgcgttgccttgcggcaagccgcctggtcacacaggtaacagccggtcttgccatcaggcacactgcggatcaagcggcaataagctggcagttccggcggataggcaagcacttcgattccatacgaatcaaaaacggcggagcgcagccccgtaaggcagtgaaaatcctgcaagagaaccaaaagctcctttttattgaaaacggttcccat

SEQ ID NO: 63 - DNA, 7949 bp, unidentified
  source 1..7949: mol_type = unassigned DNA
tcagccctgataggctttgtttattacttccttgaacttgtcaattccaactctttcaagtgtaaagcggaatctttctcccggattagcattctcattaaagaaattaattgcagcatctgtaactctgaaaagctgctcctttgatgtaacaaccggtataagctcctcgcctctatgtatcttattaccaaataatccgccaaatgacacgatatatccgttttcacccttccatgcatctgttggacaggctttctcacatcttccacaatagttacacttatctgtatcaagcttaagttcaccattttcttctgtgattgcaccctctctgcaggcctttaaacagacaccacacatgatgcaggcatccttatcccaggaaacaattgatgcacccttgattccaacatcattttcctctgccttaagacagttgttttggcatcctgtaacaccaaatttgaacttatgtggaagctcctttgcataatatcttttgtctatttccttagcaatgtcatatgaatcaatgtttccgcttggacagacctgattaccctgacatgcagttactgttctaacacgtggtccgcatactcccggttttacaccaccttctgcaagcaaatccttaacctcatctatattatcaagcttaataaatggaatttccacactctgtcttgaagtaagatgaacatgtccatcaccgtatttctcagcaacctctgctattttcttaagattctcagctgtaagattacctcctaccacctgaagtcttaatgaaaaattgtttttctgtttctggcgcatgaatccaccttttttaagtgttgcataatcaactgccatatttttttcctcctaactaatgataacgtcttttattggttgttgttaatggcattatcaaaatcttttataaggtcttctatgtcttcaattccaacacttattcgtataagatcgccatatacatccgcatcttccttttcctttggtgtactgtgtacgctaagtgttgattccggatgaacaattaaagtctttgtatcacctatattggatacaataagaggaattgtaagacgatccattatatcaaatgctttttccttacttccaactctgatggtaagaatagttccatatccatttttaagaaccttatctgctttttcatgccatttgcttgattccaatccaggatagtttactataattccatctatactgtctatatatttagcaagattcatcgcattttcacaggctctctccattctaagccccagtgtttccattccaatgaggttataaaatgcagtctgtggagacaaacatgcacctgtatttctgaaaagaccattacgaagctttgctgtataggcaaatttgccaaacttcttataatccttcattaatggatatttttcaacatcatatttgaattttccactgtcagttatcacaccacttattgcattgctgtgaccatttataaattttgaagtagaattaacaactatgtctgctccaagctctaatggttttacaagatatgctgttgccactgtattgtctataacaagaggcacctggtattcatgtgcaagctctgacaatgcttcaatatcaattacatcaagcttaggatttccaattgtctctgcaaatattactcttgttttatcatttactgccgctcttacagcatcaaggtcattgccatcaacgaaatttgtctttattccgaaggcctccatatcgtgaaataaatctattgttccaccataaaggcttgtaccggcaacaatttcttctccggatcttacgatattaagaagggcatttgttatagctgccattcctgaggcacatgctactgatgcgattcctccctctaatacagtcattctctgttcaaatgctgctattgtcggattatttattcttgtatatgaaaatccgtccgccttgttattaaataatttctcatgctgttttgcagaaggctgataaaatgcactggactggtatacaggtgtaagtgttgcacctgtaaccttatcccctgttgcagcctggtgtaaaagtgatgtgttaaatcccatattttcctgcctccaagcttttgtaattaatcccatgtttcatctctgaatactattcttctgtatgtttcaaacttaagccatttattgaaaaatgcgctgtctgcgttatatgatacctttttaagctctgcaaagaattcatttgccgaagccttgtcacttacaagaacctcaaatcctctaccgtttataacaggagcattgtcgtattcatacttgtcaaatggaacaatctccttaattactctgtctcttaccttaacggcaacacggtcacgaagtactactacgtcaaagctgtcaggataattatagctttctccctcaaccggaatagtatcattcaatgtgtaggtcttgccctctggtcttaccttggtaattgccattgtttcaaggttgtaataatattcttcgaatatatctccctttgccttaagatttccatatgcaaatgcacatttaagatctgttctgtcgtctacctcagagttttcaacaacaccacatgctgatgtcatatttgttactctgtctataagaataagctctccaagtgttttatgctttgtaaatctgtcaagtacgatttcttcctgaagagatatatcgcatacagcaatctcatttttcttaagaactgatgctggtatgtattcacctgtattgacatctatcttgtactgtatatttttaagaacacctggaatctgctttgttccaacctttacaaggtattcctttcctgctgtaagctctccatcgtccatccagagtattgtggctgtaaatgatttgcttacaggaagctttgttgcctttgaaagaacgcatcctcttgatacatcaacttccttgtcaagctggatagtaacaggtcttcctgtttctgctgttttgctttccttatcaccaataagaattgactttacatgtgcgtgctcattacttggaagtgttatgacctcatctccaactgatacgcttcctgactcaatctgtccctggaaacctctgaaggtatggtctggacggcacactctctgtaccggcatgtagaaaccttcctctgtctttttctcagttacatcaatatcctcaaggtatgataagagtgccccacccttgtaccagggaatgttatctgatttcctggtaacgttgtcaccttctgttgctgatactggaattattttgatgctttcaagtgaaagttcttccttaagctcaagtatctgctcctttatttcttcaaatctcttctcatcgtatccaacaaggtccatcttgttaactgcaaatacaaaatatttaattcccattaatgcacatattcttgcatgtcttcttgtctgtactaaaacaccctgttttgcatctataagaattacggcgaggtcagcaaatgatgcgcctacagccatgtttcttgtatattcctcatgacctggtgtatcagctacaatgaagctcctcttatctgtagtaaaataacgatacgctacatcgattgttattccctgctcacgttcagccataagtccatcaagaagaagtgaatagtcaattgctcctcctctgcttcccactttgctgtcaagctcaagggccttttcctgatctgcatataaaagctttgaatcgtataaaatatgtcctataagtgttgatttaccatcatctacacttccgcatgttataaatttaagtaatccgctcatactagaaatacccctctctctttcttctttccatactgcctgctgcctcgttatcaataactctggttgttctctcagaagatactgctgaaagtgtttcatcaataatctctggaagtgttgtggctgttgactcgcatccaccggtaagaggataacatccaagggttctgaatcttacgctcttcatctcgattttttctcccggtcttaacttcatacggtcatcatccaccatgattatgttgccatccctgtatacaaccggtctttctttggcaaaataaagtggaactatatcaatattctctctctgaatgtacttccatatatctgtttcagtccagttagagattgggaatactcgtatgctctctcccttatgaatcttggaattgtaaagcttccacatctcaggtctctggtttttagggtcccaggcatggttctcattacggaatgaaaagattctttccttggctcttgacttctcctcatctcgtcttccaccaccaaatgcagctgtaaagccccatttgttaagggcctgcttaagggcctgcgttttcataatatctgtataagctgaaccgtgatcaaatggattgatgcctctcttaactccgtcttcgttaatgtattcaagcatctctattccatatttctcagctgtcttatctctgaattcaatcatttccttaaatttccatgttgtgttaacatgtaagaaaggaaatggtggcttctcaggatagaatgctttaagtgccagatgaagcattactgaactgtcctttccgattgagtacagcattacaggcttttcgcattctgctgccacttcccttataatatatattgcttctgcttcaagttcatcaagatgtgataatccgctcatattaaacctcctgtgttgcctcattttctaatacttattggcttcttttttattgattgctattgtctttacagttccatcattcaaggttacattccagttaagaatgtctcccttattctcaactctcataaggcttccattgcctcctgaatcagctccgatatataaagcaatagctccaaacctgcattccttaatacatgatgagcatccccagcagtccttaggatacttcatatatgccttacctgactcatcagctgatatcagtgttcccggacagaccttttcacacctgccgcaagccctgcacttatctttgtcaattgctatgctcatatatttcaccccttcttacaagagctctgtctaatataactatctttccatcctccattctggaattaatgtacttaagatagttatcatccttgtcaggataatcaagattttcatcaaaacagtgccatcttgtttcttttctagctttcaaatgtgctataagcaccttacagactgtaagtctttccctaatctcatatacaaacatcaattcatgcatatcttctgcccctgcattcttagcaagtttctcaattctgtcaatcttatcttctgcaaggcaaagctgcttttcattgaactgataatggcttccgattcctcctgcgtaggaatccataaccttctgcatggcttcctctaactgctccacaccatataagctgtttttattattaagaattttgttatattcttcaattttcttatcaaataaactgttgaaatattcatcatctttatctgccttaggatctgattctctgtcaagctcttcaatcatatgaagcgctgcaatctcaccctcaaccattgctccggttacatatttctgtggacatcctcctgccacatctccggctgcgtaaaggcccttaactgtagtctgtctgttagtatcaacccagtatccactagctgtatgaccacctactatgtaaggctctgttccttctatctcaacattttcctcacttggattcctgccttcttcaatccacttaagtgtctggcttggtgccatattcaaataagcttttttaagggattcgtccttgtcttcgcttataccctttgttctaaggtaacatggccctcttccttcaatattctccttaactgttccataaagacgttctgaagttgtaagaccatatttatcttcataaacctctccaagtgaattgatctgctttgctccaactccctgggctattgttcctgtaggtgctatagtatccttacaccttaaggctatgaatctcatctcaaaggttgtcatctctgcaccggcccttatacccattgcatatcctgcaccggtattaaatggcgggtaccacattttatgtcttgagaaacccggattgttaggcttgtaaagacctgcggctcctcctgtggcacataaaactttttttgccctgatctcataggctgtgccatcttcgattgaaaaaccaaatgctccttcgatttttccatcatttataatataatctgtaatatttaccctgtttaaaatacttatatccttaagatttcttgtagcttctgcaagaagtggtttaatattctctccgttgatcttaatgtttctgttacctcttgaaacatattcgccattctcatccttaagaattacaagaccaagcttttccatcttctcagttacttcgttaagtctttctgacattgtaagcaaaaggtcttctcttacaattccgtcagcatccttcactgcataatccacataatcttctggctttcttccattaattatgtaagcattaattgcattaactccggctgccaggcatccgcttctctctatgttggctttttcagcaattacaatactgtaatcagaatgttctcttatagtaagtgcagcaaagcatcctgctgttccgcctccaattataagaatatctgtatctataacttttttattattaatgttcatatttttcatccctcacattcggagtatgttttgaagtttttgtatttccttcaacctgttggcattatattacacctcaattcccactatgtcaataggaataatataaattaaatataaaatacatcgttttcctgcatttccttattttccatgaaataagtcctgttctcatcaaataagtacaatctgtatataagtacgtgaaccttttcccctacatttacagcatccttttctaaggatctttcaccaacaatgcttattccgttaacgttaacggtaacatcaaccctgttacccctgaagcatacatcctcaacaatgccttcctccgcagcactcatatatctgtcaagctttccgcttttggatatcttcacaaattcaggtcgcaaaaccgctctctcggcattagatattttgtcgaagcccttcagtctgtcataatcttctacaactgttgaattaccaacgaactgtgcaacaaacggagtctgtggctctttatatatttcaaaaggagaacccttttgttcaattcttccatgattaacaattattatctcatcggcaacttccactgcctcatcctgatcgtgggtaacaaatatacttgtaattcctaatttgctaaccatttccttaagccagcttctaagatcttttctaacctttgcatcaattgccgcaaatggctcatcaagaagcagcactcccggattaggcgccagggctctggcaaatgctaccctctgcctctggccacctgacagctcatttggatatcttttctcaagaccttcaagaccggtaagttccaaaagctccttaactctttcctttattttgttctttggcattttctggagctttaatccaaatgcaatgttatcaaatactgtcatgtacctgaaaagtgcataattctgaaacacaaagcctatacccctttttgcggcaggtatatcatttattcgcttgccgtctatgtatatatctcctgaattaggattttccaatcccgcaatcattcgaaggagtgttgtttttccacttccggaaggaccaagaagtgcaactaattttcccttttctattccaaagctcacatcatccgatgcaagaaagcttccgtattgcttgtatatattcttcatttcaacatacat

SEQ ID NO: 64 - DNA, 12493 bp, unidentified
  source 1..12493: mol_type = unassigned DNA
ttatttgttgtcccgtaagtcttttaccctgacggcttttccttcgctctgcggcaaggaacctttctttaccaaccgtaacttcggagttaccagaatctcgtctttcagctggcgggtaatggctttgctaatcttttgcagctcgatataattgtcagtagagaggtcgctaagttcaacttccacaatcatctcatcctggttattgaccgtttcgagcgtgatgaggtaattgctgcccaattcggggaattgtaccagcaccttttccacctgcatggggaagatattgactcccttgatgatgaacatatcgtcgctacggcctttgatgcggtctatacggatgtgggtacgtccgcaagggcacttgccgggcaggatgcgggtaaggtcgcgtgtacggtagcggatgaggggcatcatctctctgtccagcgttgtcagtaccagttcgccgatttcaccttccggtacgggttcgccggtttccgggttaatgatttcgaccaggtagcaatcttcccagaagtgcatgccgtcttgttcggtgcactcgaaggctacgccgggaccgttcatttcagtcataccaaagctgttataggctttgacgccaagcatgcgttcaatctttctgcgttgctcgtctgtgtggggttcggcaccgataacaagcgttttcagacttgtgccggcggggtccatcccttcttcctggaatacctctgccaagcggatggcatagctgggaatggcatgcagggcagtggtcttgaagtcggtgatgaactttatctgacgcttgctgtttccggcagcggcaggaacagtcagcgcacccaggcgttcggctccatactgaaagcccagtcctccggtgaacatgccgtaaccggagctgttttggaaaacatccgtcttacggatacctaccatatagaggcagcgtgccactaagttagcccaagagtccaaatcgtgttgggagtgtacgatgaccgtcggcgtgcccgtagtgccactggaagaatggatacgtactccgtcctcacgcatatcgcctgctactaatccaaaaggataattggcgcgcatatcggccttggtagtaaacggtatcttacgtatgtcttctatagaccggatgctgtcggcagtgatgccatgctcttggaatacctttttataataaggagagttggcggcaatgctgacagtcttttttaaccgttgcagttgcagttcgcgcaactgctcacggggcatcgtttcaatctcttcttcccagtatttgttattcatggtatgttgaaatttagagtcaattatagtttacatcagtttttcagcaatctctttgccggcagccaacgctttgaggttcagctctacaatggcgtcgcccttgcgttggaagatttcgcggatgctgtcttgcacctttgcgtagtcgatgccgaggaaggggatggtggcgcccagcagtacgatgttcgctacgcggggagagccgacttcttttgccacttcgtttacgttcagcatgattttatgcggcagcttgttgatttcggtcttgatgtcttcttctgccggatagttgggaatgttgatgaagggggcttcattggtcaccagccaaccttcggggctgaggtaggggaggtagcgcagtgcttccatcggttccagggagatgatgaggtcgcattttcctgtgggaatgaggtccgaagcgataggttggtcgctgatgcgcaggttggactgcacgtcgccgcctcgctggctcatgccgtgtacttctgcctgcttcatgtagagtccgtccttgagggctgctttgccgattacggtggcgatggagaggataccttgtcctcctacgccggaaagtatgatgtcttttttcatggctttacttgtttctttttttgcgtgctaatgtttggatacattctctgcgggggatgatgacggatacgccgtggtgctcgatttcttcccggatgatttgcttcatctcttcgtagtttttcttcaagggcactacgacgcggatgtgttcgggagctacaccgatgccggcgcagatggcttccagacgtccggtgccggcagaatcttgtcctccggtcatggcggtggtttcgttgtcggagatgacgatggtgacgtcggcgttttcgttgacgcaatccagcagtcccgtcatgcccgagtgggtgaaggtggagtcgccgatgacggctacggcaggatgcaggccggcatctgaagcacccttcgccatggtgatggaggcgcccatatccacacaagagttaatggcgttgaatggggcattggctcccagcgtgtagcaaccaatgtcgctgaacaccttataagtgggatattcttctttcaatacttgggtcagcaccgtgtacatgtcgcgatggccgcaaccctcgcacaaagcgggcgggcgcatctctaccagagaaggaacgctgaattcagccttgttctccttgcctacggcacgtgccacgctgtccgggttcagctctccgtcttgtgaaagagtgccgtccaaacggccttttactttgatgccgatgcccagatagcctttcagttgtttttctacgaacggttgtccgtcttccagtaccagaatctcgtcacatgcttctaccagctgcatcagctgtttcttgggcaacgggtattgtccgattttcagtaccggatattcgcaaccttcgggatagttttccattaggtagttgtagccgatgccgcatgccacgatacccagctttttgttggggccgtcggtatatttgttgtaagcggagttttcagaagctttgataaattcgtcctggcgttgcagcaatgctttgtagcgtttgcgtgcattacccggcaggaggatgaactgacgcgggtcttcgctgaaggaaatctcattctgcggttgttgctccttgcgctctacgccggaacgggagtgtgccaggcgcgtaaccatgcgcatcaggatgggttcgccggtctgttcggagaagttgaatccgttgtacaccatgtcgtatgcttcctgctggttgcttggttcgtacatcgggatgagggagaagtcgccatagaaacggctgtcctgctcgttctgagaggaatgcatgctggggtcgtcggcagcaatgattataagaccaccttttacgccggtaatggcagagttgatgaaacagtcggcagccacgttcatacccacgtgcttcatgcacaccagtgaacgcttgcctgcaaaggacatgcccagggcagcttccattgcagttttctcgttggagcaccagcggttatggatgttcttttcggcagtaatcggtgccatctgaatatattcggtgatttccgtagaaggagtgccgggataggcatatacacccgaaagtccggcgtctaatgcagcttgtgcaatggcttcatcgccaagtaagagttgcttgctcatatctgaatatttaagtgttagtcatggattaatatttgacgcaaatataggattttgcttttattttatcagcagattacttgaaaatctttctttcgtttaatgcattccaatattttcttgcatttttcatgtgctcggcataattggatgcaaagttatgggtgcccgagaagtcctctttggcacacatgtagaggtagttgtgtttcgtatggttcagcacagcatccagcccgatgggtgaggggatgcgtatgggaccgggaggtagtccggtgttgagataggtattgtagggggattctactgccagatgggcattcgtaattctccgcaagccgaagtcctgcaaggcaaatttgatggtagggtcggcttgcaggggcatgccggtgtgcaggcggttgatgtagagccctgccaccattggtttttcgggattgttgtttgtctcttcctcgacgatggcggcgagggtgcagacttccgtcggggtcattccgatggcggtggctttgtctaagcgttcctggttccagaacttctggtgctctttttgcattctttcgaagaactcttctgcactcatgtcccaatagacttggtaggtttcggggatgaagaggcagggcagggtctctttgttgtatcccagtttttgttggaatgcggagtcgttcatcaatccggctatttcggcggagtctatcatgagctgtttgcctacgctgcgtgccagccggtccagtgtgcgtacgctgccgacggtgagattcgtaggttcttgatatccgcggtacagacggctgaatacgtgatatacgttttcccccggccggatggtgtagcgtccggtgtgtatattttcggaatatttcttgtattgggccatccagcggaagccggtgaagcttcgaggatggccttgttgttccaccttattatatatggagtcggcggtgtcgtcgcggtctatatagatatagactgtctttttcggatggaattgcggggcaaacagatagtagtatactgttcctgcacaagctgctccaataagaatcagtgcgacgaatgttccgataatgattttcttcttttccattttgttttactgcatctttagtcgggcaaagttagtaaaaaatggagtgaaaaccatcaagtcatatcagttaattcgatagctgacgaaggctatgcgtttgctgtccggtgcccatgagttgacattgatggtgccttgtccaccgaaaagctttaacaatgtcttgggttctccaccgtttgcgggcattaggcgcagctctacgttcttgtttgccaggtgttctcccggttccaggtcacctttgtagtaggtgatgaatacaacggattttccgtcaggggagatgtgggggaaccaggagttacgggtttcgtcaaaggtcatctgggtctgttcggagccgtctgccttcatgcgccagacttgcatgagtccggtgcgtacggaattgaaccagatgtattgtccgcagggggaatattccggtccgtcatccagaccttcggcagtggtcaggcgggtttcttcacctccttccgccgggatggtatagacgtcatagttgccgtttcgttcggcgcaataggcaagctctttgccgtcggggctccagccgtggaggtagctgggagccataggtgttattaaacggggagtgccgcccgtgatgggaagtgtataaatgcgcgatttatagtcttcttttgtcccgtggctgatggctatctgctgtccgtcggccgagaggacgtggtcgttgttgcagttttgggcaaatccggtgtttatcagttccggttcggcaggcgaggtgggggaaaggcggtaaagctttccgtcgttgttgtatagcagccattgcccgtcgggcgtccaattgggagcttcaatccggtagggaaattcttttacgacggtccggttaccgttagttacatccagtatttcgaggacgctggtaatctcgtttttttgttgagcggttgcggtcagtgcaacagttgcaaagaaggggattagatagggtttcatgttcatatcgtatttaataaatctccgcaagatacattttttattggaaactacatagtcggagcatgcttttttcagagagaatctgtagtgatggtcgaatgcgtagtgcttatcatatgaatagtctccgggattcttgaaatagttgtccacatactgccagttgtcggtgtcgagcggcgtgtgcgaagtcatgtacgatagggagcttttatctctactatctcgctgtccagactaatcaggtctttgcccaagcggacaatgcgggcatcttcgggcatgtagtcggtgccgacttccccctttccgcctccgccgaatgacaacccatcctgtaccttcgtcatctatcacggcacccgggtcgaaaggagccctgcagtggcctaatccttgggtgaactggttcaccagcatacgtcttaccgtccgattccactcgcgatacgatggatggtgcccatgaggctataccccatggcgaaaggacctttacctcaatcagtccgtgataagtccagtttaccatgtcatcggtggacagcatgaccagtgaatggatgtattggtatgtgtttttgccgtcttttcccacactgtccagttgctgggtgtcattggttccatacacatagagccttccgttgtattccaccgatgtcgggtcggccacaaaaatgaaatccaacagcgggttggcgtttccactgaagaattggggtgattttaccggacgcgtgtctttctttcttgaatcggaaagcgcccacacatcgtttcctgcggatatagccgccagcagcaaagccgctgtaaataacttgattcttttcatttttttatagtatgttataggaatctatggtagccttttgattttggcttgtgttcttcaatcacctcaatcctttatttaagattgaaaaattgggttattgaaaagttgccgcaaatattggggattactatgtataatataaggtgtattatgcttttaataatgtacctatatgtttcaagttatcattgtaatcggatggtgctgttttaaactagctttacttgctttgggataattatgcggctatggattaaactgtttggaagggcattgtgttttatgcaaatatattggtagaagagcgtttttttattctaacgattcttgaaaagaaaaagcactgattattccagataatcagtgcttgaatatcgagccgctagccagacttgaactggcgacctacgcgttacgaatgcgttgctctaccaactgagctatagcggcaataagcttttgtttacggggtgcaaaggtacatctttatttgaaaaggcaaaaagaatctctgtttttttagaaatattttagtgggataattttctatttgaatgtcctgaactttattgccataaaaattggataataaaacgaaaagaagcatctttgtcgtaggtcctatagcaaataagtctgatactgattatgaatttaagaatctattataaatatctttcttcacgcatagcgtccaaatggacggtgctgttggtagatgtaattatcgttgtgatttccatgctttctgcatgttttttgcaatataggctttcgtccgtatcttatgaaatttctttgtatgtatggctgaccattttggctgtcttgtgtaatgtctgtttctttcatattctccgtacttatgtgggtgttatccgtttttcctcttttgtggatatttatcgtgtgttttggagtcttacgataagctatgttgtactgtttttagggaattgctgttggtctgtttcggggcttggagaaactttgccgaacagcattctgtttatggcatatatgttcaccttctctctgatggcttgtatgcgcattgctgtgaagatgctttatgaagctattgcttttgatgcacgtcattgtgtgaatgtttttatttatggattccatgggactggagtcaatgttgcaaaatccttgagagttagtcgtaataatcattatcgcctgcgtggctttatttcggacgaacctgatatgataggtaaacatacgatgggatgcagggtatatcccaatgatgagcagctgtttgaccgtctaaagaaaaagaaagtggatacaatcattatctctccaagcaaggtgtcggatttggaaaattccggaatgctggataaactgttctctcatgatattcatgtaatgaccgttcctcccttaagcgattgtatggacgatggactgataaaggatattcaaatagaagattggctccgtagagaaccggtacaagttgacgtgcgtaaaattacggcccatattgaggggcgtagagtaatggttacgggagcggcgggagctgtaggaagggaaatcgtccgccagttggctacactgaatccttatcagttgattctggtagatcaggcagaatccccattgtatgatgtacagttggaattgtctgatcattggaagaatctggaggtccgtgtattggttgcagatgttgctaaccgtacgcgtatggaggctatatttgaagaaacacgtcctcaacttgtttttcattctgctgcgtataagcatgtacaactgatggatgattttgtatcggaggcaattcaaacgaatatatcggggacagtgaatattgcggacctggcggcaaagtatagagtgtcccgtatggttatgatatctgctgctaatgcacgtcatccggagaatgctatggaatatagtaagcgtgtggcggaaatatatgtgcaatcatctgattgcaggttgaaacgcgacacaggggaaactgatatgttcatagtacgtttgggtgaggtgtatccgacgaatactcattgtttgattaccttgtctgaagcttgtatgctcaccctggaagtgggagtcatgggggatgggggagaagtgtacattgtgggagggcctggggatggacttttggattctgtaatcggtgaaaagataaagcgtgaaaaggcatctgttgatgattatgaacatgtgcgggaagaagtgctggccttggtgcaacatagttatactgaaaaaaaggctattttgattggactaatgaaaaaaatagtgccaatttttccgctttcttctacccgatgaaaagacgtgaaagtgacagttttttaatgctttttctgaaacttagaggtggaataaatgtatattataaaaataatatattacctttgtgcccgatttatatttattacaagaactcaaaagattaatcagaatatcttatgcgtagattaataacactattctttttggtatttactttgtcaggggtagcttttgctcagcagatgtcagatgatcaggttgttcagtatgtaaaaagcgctcagcagatgggcaaaaatcaaaagcagattactactgaattaatgcggcggggagtgacaaaggaacaagttgaaagaattcagaaaaagtatgaaaattctaaatctggaagtccgcagagcaatacccaagatgagaaacgttctcgtcaacgtggtgaaatgagtggcgtagtcaaagggttgcgtacaacttcggaaatgtattctgccaggcaaacggatgttgcaggggattctttacaaatgatggataatcgttccttgtctcaagagaaaggggcgggggatccgacttcgcaaatttatggtcataatatttttactaacgataatttgactttcgaacctaatgtgaatgttgctactcccgagaattatcgtctgggacctggtgatgaggtgattattgatgtgtggggagcttctgaaacaacaatccgacaaacaatatctccggaaggaagtattcttgtgaataatttaggaccggtttatctgagtggtaaaacagtaagtgaagccaataattatttgaaacaagaatttgccagaatatattctggagtaactggaaatgttccctctacccaagttaaattgacattaggagaaatacgttctattcaagtaaacgttatgggtgaagttatggtgcccggaacttataccctctcatcatttgcttccgtattccatgctttatatcgtgcaggtggtgtgaatccgattggtagtttacgcagtattaaagtgattcgcaatggaaatacaatagcggatttggatgtttacgatttacttatgaaaggaaaaatgaaagatgacatccgtctgcaggatggtgatgtaattcttgtggatccttaccagtcattggtacagatattgggtaaggtaaaacgtccgatgttttatgaaatgaaacccactgaaaccgtaggtacattattgaagtattcaggtggttttacgggtgatgcttataagaaagcattacgtataatccgtaaaagtggacgtgagcatcaaatttataatgtggatgagatggattattccgtattccgcgtagatgacggtgataagataacggttgattccgttttacagcgttttgagaatcgtgtggaaatccgcggtgctgtatatcgtgaaggtttgtatcagttggacggtacgatgaatacagtgaagcagctgattaagaaagcggaaggacttcgcggagatgcattcttaaaccgtgctataatcgatcgtgaacttgaagacttgtcgcatgaggttatacaagtagatgtgaaaggtttgctgaacgggacggctgcagatattcctttgcagaagaatgacattttatatattccaagtattcatgacttgaaggaagaagctacacttaccattcatggtgaagttgccaatccgggtacatatctttattctgataaaatgacagtagaggatttggtgttgcaggctggtggcttgttggaggcggcggctacaacaaaggttgaagttgcacggcgcatgaaagatccgaagagtacatctttcagtactacagtaggccagaatttctcttttgatttgaaagatggcttattggtgggagaaggaagccaggatttccatcttgagccttttgatgaaatttatgttcgtaagagtccgtcctattttaaacaacagaatgttatggtgggtggagaagtcctttttagcggtaattatgcactatcgaaaaagaatgaacgtttgagtgacttgatagctaaggctggtggagtaactcccgatgcttatataaaaggagcgcgtcttatacgtaggatgaccgaagaagaattccgccgtaaggaagatgctctgcgtatggcgcaagcgggaggcggagattccatatctgtaaaaagattggatttgtccgatacctattctgtaggtataaatctgggagaggccttgaaaaatcctggttcagatgctgatatggtgcttcgcgagggagatgtattatttgttccggagtacgtaagtacagtgaaaatcaacggtgctgtaatgtatccgaatacagttttatataaaaagggtgaaagcttgaaatattatatcaaccaggctggtggttttggtaatgacgccaagaaacgcaaggcctatgtaatatacatgaatggtacagtttctcgtttaagagcaggaaacaagaaagccattgaaccaggttgtgaaataattgttccaagtaaagaacagaaaaggaagatgactaccactgaaattctgggaatgggaagtacgacagcttctattgcagcgatgattgcgactatggttaatctctttaagtaatttgaattatgagcgaagaaaaaatacaaaacataacctctccacaacctgaggaacaagaaatagatttgatagaactggcccagaaagtatgggctagtcgcaaattggtttttaaggcgtgtggtatcgctgcccttgttggactggttgttgcatttagtattcctaaggagtattctacaagtgtgacgttggctccggagagtggtggtaaatctggtggcggaagtatgggagcccttgcagccatggcgggtatcaatttgggtacttcttctggtgaagatgctttgtcacccgaactttatcctgatattgtaagttctactccttttctgattgaactgttcgatgttaaagtcaaggatcagaaagcaaaagtagacacaactctgtatgcttatttgaaagaggaacagcgttctccttggtggagtgcaattttctccgctccttttaaggtgttaggatggacattgtctttgtttaaggatgaaccggaagagggggatgcaaagctggatccttttcgtcttactagagatgagtctgccattgcagatgctttaagtaaacgtatctctgtttccgtagacaaaaagacaggtgtgacaaccttgtctgttactatgcaggatcctttgatatctgcttcgctgacggataccgtgatgcattgcctgcagaactacatcacagattatcggactaataaggctcgtcatgatttggcatttaccgaaaaactttatggagaagcaaaggccagttatgagtctgcccagaagaaatacgcaaattttgtagatgcaaaccagaatataatattgctgagttatcgcgcagagcaagagcgtttacagaatgaaatgaatttagcctatcaagtatatacacaagtgtctcgacaattgcagatggcaagagctaaggtgcaggagattacaccggtatatacggttgtccagccggctacggtacctttgaagcctgcaaagcccaataaattgatgattttgatcggcttcatgttcttggcaggtgtcggcagtgtgggatggatattatttgtaaaagatttattaaagggatggaaaaagcaaacaatatga

SEQ ID NO: 65 - DNA, 9166 bp, unidentified
  source 1..9166: mol_type = unassigned DNA
ttacttattgttcttcttctcattctcaagcttcttcatagctcttaccttaagtgaaagaccgaagaggttgatgaatccgtcagcatcatgatgatcatacatatcacctgtcttgaatgatgcaattgactcgttgtaaagtgaatatggagatgttgttccagccttgatgatgttacccttgtaaagtctgaacttaacttcacctgttacatattcctgagtcttctcaacgaatgcctgaagtgcttcacgaagaggtgtctcccactttccttcgtaaacaacctgtgcaaacttgtttccaacatccatcttgaatgttgttgtatctctgtcgagaactaattcctcaagctgctgatgagcttcgtaaagaattgttccaccaggagtctcatatacaccacgggacttcataccaacaacacggttctcaacgatatcaatgataccgataccatgcttggcaccaagtctgttaagctctctgataatatcagaaaccttcatagccttgccattaactgactttggaacacctttttcaaatgtcatagtaacatattctggttcatccggagcttcctcaggagtgcatccaagaactaataaatgcttgtagttaggctcattagctggatcttcaagctcaagaccttcatggctgatatgccagatgttacggtcacggctgtagctgcagtctgtgctgaatggaagatgaataccatgctgtctgcagtattcaatctcatcctcacgagactgaagcttccagttagaatctctccaaggagcgataatcttgatatctggagctaaagccttgattgtaagctcgaatctgatctggtcattacccttaccagtagcaccgtggcagatagcaacagcaccttccttacgggcaatctcaacaagtctcttagcgataagaggtcttgccattgaagtaccaagtaaatatttattttcataaacagcgtgtgcctgaacacatggaacgatgtagttgtcgcagaactcatcagtgatatcttctatatataacttagcagcaccgcatgagagagctctctgctcaagtccgtccaactcctcttcctgaccacagtctgcacatacgcagacaacatcatagttgtatgtttcctttaaccaagggatgatggcagttgtgtcaagtccgccagaataagcaagaataactttttctttcattatatattcctccgtatattattaagtttacatagtaaaacacatatgctatgcatctgcagattataataaactactttatttaaaaatgcaacaacaaattatgcatattatacattaatatacaacaaaaatgtataaatataaaatttcttcaaaatatcctttacataagaaaaaaagttgctataatgtaggttatcaatttacattttgcgttattttatgcataaatgttgaatatatgcattttgcttcgcaaaacaaggaggagttatgattaaagtaggcattatcggtgcgacaggttacgcaggtaacgagcttgtcagattattattaggacataaggatgcagagattgtatggcttggttcgagaagttacatagatcagaattattcagatgtatatagaaacatgtttaagcttgtagatgcaaaatgtatggacgacaatatggagcagcttgctaacgaggttgatgttatatttacagcaacaccacagggcttatgtgcgtcacttgttaatgatgagatactttcaaagactaagattattgatttgagtgcagatttcagacttaaggatgttaatgtatatgagcagtggtataagcttgagcataaagcaccacagtatattgatgaagctgtttatggcttatgtgagattaacagagataaggtaagcaaagacacaagaatcattgctaacccgggctgttatacaacaacatcaattcttacactttacccaatggttaaggaaggaataatcaatccggatacaattataattgatgctaagagtggaacttcaggtgcaggacgtggcgctaaggttgccaatcttttctgcgaagttaatgaaagcatgaaggcatatggcgtaggaactcacagacatacacctgagattgaggaacagttaggttatgcatgtggaagagatgatttaaagcttatcttcacaccacatttggttccaatgaacagaggaattcttgtaacagcatacgccaaccttgccaaagatgttacatatgaagatgttaaggcagcatatgacaagtactatgataaggaatatttcgtaagagtacttcctaaagatgtatgccctgaaacacgctgggttgagggaagcaactttgttgatataggatttaagattgagccaagaactaacagacttataatgatgggtgcgttagataatcttgttaagggtgcagcaggtcaggcagtacagaatatgaaccttctcttcggacttccagagaatgagggattacagcttgcaccaatgtttccataataaatgtagcgtaaattcagaatttacacgacgaaatatgcacaatgacagagtatatgtgatggtacaataggaggatgttatgaatataattaaaggcggtgttacagcagctaaaggattcaaggctgccggatgtgaagcacagattaaatataagaacggaaagaaagatatggcacttgtatacagtgagaagccatgtgttacagcaggaacatttacaactaacaaagtatttgcagctcctgttaaatgggacagaaacattgtatataatgaagactttgcacaggctgtagttgtaaacagcggtgttgccaacgcatgtacaggcgttgaaggagataacgcatgtgcagaagaagcaaaggcagttgcaaaggttcttaatgtaccggagaatgcagtacttatcggttcaacaggtgttatcggaatgcagcttcctgttgacagaatatgtgcaggaattgaaaaccttgctccaatgcttgatgattcattagaagcaggaacacaggcagcagaggcaattatgactacagatacaagaagcaagcaggttgctgtagaagtagaagttgcaggtactaaggtaacaatcggtggtatgtgcaagggcgcaggaatgattcatcctaacatggcaacaatgctctgctacataacaacagactgtgatatcgacaaggcacttcttcagaagatgacaagtgcaattgttgatgattcatttaacatgatatcagttgatggagatacatcaactaatgatacagctcttgttcttgctaacggaatggctggcaacaagaagattacagaagagggtgctgattataatgctttctatgaaggcttaagctatgtatttacagagctttccaagatgattgcaggtgacggcgaaggctgcacatgtcttttcgaggttcaggtaaagggtgcaacaactaaggcagaagccaagacactcgctaagtcaattgttacatcaagtcttaccaaggcagcaatattcggacatgacgctaactggggaagaattctctgtgcaatgggatattctggtgctgactttgaccctgaaaaggttgatatattctttaagagtgaagcaggtgagcttcagattgttaaagatggaactgctacagattacagcgaggagaaagcaacggaaatactttcacagaatcctgtaattgctattgcggatgttaagcagggcgatgcaagcgctacagcatggggctgtgaccttacatttgattatgtcaagataaatgctgattacagaagctaatctgacacagcattttaaagcaaatagatatctgaataaatatgaaatggagattattatgagcgcaaaagatatgacagaggaacttatgaaggcacaggtgcttgttgaggcacttccttatatccagaaatttaacagaaagataattgtagttaagtacggcggaagtgccatggtagatgaagaacttaagagaaaagttattcaggacgtagttcttcttaaacttgttggttttaagccaatcatcgttcacggcggtggcaaggaaatcagcaaatgggttgaaaagtcaggcatgacacctgaattcaagaatggtttaagagttacagacgagccaacaatggagattgccgagatggttcttaataaggttaataagagtcttgtttcaatgattgagcagcttggtgtcaaggcatgtggtatcagtggtaaggatggcggcatgttaaaggttgagaagaagtattctaagggtgaggatataggatatgttggtgaagtgacagatgttgatacaacacttcttgattcattgcttaaggacgatttcctcccagtaatatgtcctatcggatatgatgatgattttcatgcatacaatattaatgcagatgacgcagcatgtgcaattgcaagagctgtcaatgctgagaagcttgcattcttaacagatatcgaaggtgtatataaggattttgacgataaggattcacttatatctgagctttctacttcagaggcgagaacacttttagagagcggaacaatcggtggcggtatgcttcctaagcttaataactgtatagatgctattgagcatggtgtatcaagagtacatattcttgatggaagaattccacactgccttcttcttgaaatatttactaacaagggtgttggtacagctattctttcagacgatgcagaaaaattctttgattcagataaataattgcgaaccttaagctttgaggttataatattatattggctcatgtgaaaatgtgtgctcataagaataggaaagtgagagtaataatgaatacacagcagattatagaaacagcagaagagaagctgattcatacatacaaccgttaccagatagtacttgataagggtgacggagtaagactttacgatacagatggtaaagaatatcttgattttggagcaggtatagcagtatttgcacttggttataacaataaggaatataacgatgcattaaaggcacagattgataagcttatacacacatctaattatttctataatgaaccggctgtagaggctgcaacagcacttacaaaggcttcaggaatggacagagtattctttactaacagtggtacagaggctattgaaggtgcagtcaagcttgcaaagaaatattattatgtcaagaacggaaaggctgatgcagagattattgcaatgcagcattcattccatggaagaagtatgggagcacttgctgtaactggtaataagcattatcaggaagcatttggacctatgataccgggaattaagtttgcacagtataacgaccttgacagtgtaaaggaacttgttaatgataaaacttgtgctataatatttgagacagtacagggtgaaggtggaatttatcctgctactaaagaatttattgaaggtgtaagaaagctatgtgatgagaagggaatccttcttatacttgatgagattcagtgcggaatgggaagaacaggaagtatgtttgcattccagcagtatggcgttaagcctgatatccttacagttgccaaggctcttggctgtggtgttcctgtaggtgcatttgcagcgacagaggaagttgcgaaggcattagttccaggagaccatggaacaacatacggtggtaatccacttgcatgtgcagcagcaaccaaggtgttcgaactttttgagaagcagcatgtattagataatgtcagggaagtatctgcttactttgaagaaaagcttgatgagcttgttgagacaatagatgttgttgtcgagagacgaggaatgggacttatgcagggacttgagttatcagttaatcctaaggatgtaattgcgagagcacttgataacggacttattctgttctcagcaggaactaatgttataagatttgttccaccacttgtaattactaaggcagatgtagatgaatgcatagctaagcttaagaaatccttctagaatcaggagtttactttatgaaattaagaagatttatcagtatgatgctgattgttaccatgctgacagtctttgcaggctgtggtaataaagatgacaggacacaggctgcgaagaagcttaatcttagtggacctattacagttaatgtctggtataatgacagtgcatatgagtcttatcttgaattcgttgccagacaatttaagaaatctaatgaactggtgactgttaagccagtatatattgaggcggattcatatattaattatatatatgacgaatcggtaaggaataacaatgcatgtgatatatattttctgacatctgaagagatggagaaggcttatctttcaggtcttacctctgagaatgatatgtatcctgaagtctataatgagaatgtgtatggtaaggctgcaatgactgcatgttcgtatggtggtaagttatatggttacccggtgtcgttcaacacttcatttcttgtatataataagaaatatgcagaagcagttgatactatagaccagattcgtaatataagtgataattatcagattacagatgagaatcaggatgtttcaatggtgtttgaatgggatcctgattcaatgttccttaattatgcagcagcaggagcctatattaatataggcggagttaatgcagagaacagggctgaggtatctcttaatgaggaaaagattaagaaggttcttactaagtacgctcagttaaaagatgcatttggtattgacagaaatacagtaagtcttaaagactgtgcagatctgttttctactggaaatatgctctatactgtgcttgatgcagacagtcttgcagagattaatgttacagatgtagattatggaatatgtgagtatccttcaatgggagatgaccttgattctaaggcaatgtctgttactacgatggcagtagttaatccgtacactaagaatgtagatgcatccaaggctgttgcaagagcaatttcttatgattatgcagattatcttggaagcatggctaagaaaagctgtgcaagggcggatttaaaggttaagagagcagaaagctatcagaagttacaccagatttattctgactctgttgtaaaagctaaatatatcggagtaggagaagtatacatgagatatgagattatgcttcatcaggtatatgatggtggaaatgttgatacagcttacagtacatttgcaacaacaatagaaaaaacaactaaaaataataatgaaaacagtacgcagaatactaaataacattatgaataaatatcctgttattaactaataattattctatgcagattaatggggaggttagttaatggcaggatttttgattgcaataatatcaggtgcacttatgagtttacagggcgcatttaatacaaatgttacaaaagcaagcagtgtgtgggttacggcaatgtttgtgcagttgacagcactggcgacttgtgcgattatgtgggtaattgacggaagacctgatatcatgaagctgtttaaggttgataacaagattacacttcttggaggtgtgataggtgcatttataacatttacagttataaaaagtataagtggtcttggaattgctaaagcggaggttacgattgtagttgcgcagataattgtttcgtatctgctgggacttttcgggctgtttggaagtgagaagactacattttcatggattaagctcgtgtcgcttcttattacggttgcaggagtatgtatgttttattttcttggtaatccgtcaacgaattaatatattatgaataattatgataaatgtcagaaaaatctggcaggaaggaacagaatggaagatttattcagcgtatgcggaaagatacgattaagaaaaggtgaaggaagaacattaaaggcaggcggtgcctggatatatgataatgaaattgaatggatgtctgacggaataattgacggacatcttgttaaggtgcttgattttgatgattatttcatgggaatcggatttattaacagaaaatccaagattacagtaagaatgcttgcaagacacactgatgttgttgatgaggcatttattgaggagagagtaagggctgcgattgaatacagatttgacacagtagatacctctgcctgccgtcttatattcggggaggcagattttctgccggggcttgttatagataagtactcagatgtgcttgttgtggaatcgcttgctttaggtattgacagatttaagtcacttattgtcgaaaaagtgaaggaaatccttcatgaaaaaggcattgatatccgtggagtatatgaaagaagcgatgccaaagtccgtactcttgaagggatggagagagttaagggctttattggtgatgaatttgacactaatgttgagatagttgagaatggtgtccactacatgatagatgttgtgaatggacagaaaaccgggttctttcttgatcagaagtacaacagacttgcaatgcagaagctgtgcaaggacaagcgggtattagactgttttacccatatgggtacatttgcattaaatgcaggaattgcaggtgctaaggaagttactggacttgatatatcagaatatgctgttgaacaggcgagagccaatgccaagcttaacggacttgagaatacagtacattttaaatgtgcaaatgtattggatgagctgccaaagcttaacgaagcaggtgagaaatatgacgttgtaatacttgacccgccggcatttaccaaatcgagggaagctacaaagaacgcaatcaagggctacagggaaatcaatatgaagggacttaagcttgtcaaagacggcggctatcttgcaagctgttcatgctcacacttcatgacacaggagcttcttaccaagactattaaggaagccgctaaagctgtacataaaagactccgtcaggtcgagttcaggacacagtcacctgaccacccaatactgtgggaggcgcaggagagctattatctgaaattctacatcttccaggttgttgatgaaaaatga

SEQ ID NO: 66 - DNA, 19686 bp, unidentified
  source 1..19686: mol_type = unassigned DNA
ttcccggaaatggctaccctggattgtggcacctgtaatttcggagatgaggtatttgaaaataccatgcctatgatgagggatttcggtaaaagaatgctggaaaaccggatcaaaccggaatacgaatgtttcgagatgggacatctcgaaaccgtattgaatatggcaaagaaaggtcaggtaccgggagctcctatgcagtttaattttgtactcggtgtccccgggtgtacgcctgcaacagttcctaatctttgctggcttgtaaatgctattccggcaggttctacctggactgcaaccggtatcggacgccatgcctttactttggctgctcctgctattgctatgggaggaaatgtcagagtggggttcgaagataatctgtatctcgaaaaaggggtattggctaaatccaatggcgagttggtagctaaggtcgttcgtatcgctaaggaattgggacgcgaaatcgctacctcggccgaagcacggaagatattgaatttgaaagctagaggctaaaaagctagaagctaaaggctaaaaggtataaagtgaaagaagtttaaagtaaatattaaaaaataaaacattatgaaaaaaggaaataaatacggaacgcatagagtaatttcaccgaaaggagtattgccacaaccagctgacaaactggataacaatatggacgaaatctatgataacgagattttgatcgatgtgcaaactctgaatatcgattcggctagttttactcagattgaagaacaagccggaggggataaagctaaaattgccgagatcatgctgggaattgtagagaaacaaggaaaacaccgtaatccggtaaccggttccggtggtatgttactggggacggtggaaaaaatcggagatgctttggttggaaagaccgatctgaaagtgggagataaaatcgctactttggtgtctttgtcactgactccgcttcgtatcgataaaattaaagaaatccgggcagatgtcgatcaggtagatatcgatggtaaagctattttgtttgaaagtggtatttatgcgaagattccggcagatctgcctgagaagttggctttgtcggctctcgatgtagccggtgctccggctcaaaccgctaaattggtgaaaccgggagatacggtattgattatcggtgccggtggtaaatcgggtatgttgtgttgctatgaagcaaagaaacgggctggtgttaccggtaaagtaatcggtttgtgccatagccagagaagtaccgaacggcttcagaaattaggcttctgtgattatgtattctctgccgatgcaacccagccggttccggttatggagaaaattgccgaactgacgaatggtgaaatgtgtgatattacgatcaataatgtgaatattacggataccgagatgaccagcatcttgtgtactaaaaatgacggattggtttatttcttctctatggcgactagttttacgaaggctgctttgggagcggaaggtgtcggtagcgatgtgactatgatcgttggaaatgggtataccaaaggacatgctgagattacattgcaggaacttcgtgaaagcgaggcattacggaagatatttacagagttgtatgcctgaatagtcgggattacaaaatcccgatgaactaaaaatatatttttatggctagcagaagaaaagagtttttccctgaagtgaccgatgaacaatggaacgattggcattggcaggtgaagaataggattgaaaccttggatcaactgaagaaatacatccggctgacaccagatgaggaagagggtatccgtgagtcactgaagacattgcggatggcgatcacgccttattatctgagtctgatcgatcccgataatccttattgtccgatccgtaaacaatcggtaccgaccattgaagaattacatcggtcgccggctgatctggaagatcccttgcatgaagacggtgattcacccgtaccgggattgacccatcgttatcctgaccgggtgttgttcctgatcaccgatatgtgttcgatgtattgccggcattgtacccggcgccgctttgccggacatcacgattgtgccactccattggaaagaatcgataaatgtatcgaatatatcgctaatactccccaggtgagagatgtccttttatcgggtggagatgctttgttggtcagtgacgaacgattggaatatatcatcaaacggttgcgtgaaatccctcatgtcgagattatccgtatcgggtcgagaacaccggtggtgttaccacagcgcattacgccggaattggtaaatatgctccggaaatatcatccgatttggctgaatactcatttcaaccatccgaacgaaattaccgaagagtcggcggcagcttgtgcccggctggccgatgcgggtatacctttgggaaatcagtctgtcctgctccgtggtatcaacgattgtacacatgtcatgaaaaaattggtacacgagttggtcaagatccgggtacgtccttattacatctatatctgtgatctttctgtgggtatcggccatttccgtactcctgtgtcgaagggaatcgagattatcgagaacttgcggggacatacttccggttatgccgtacctactttcgtcgtggatgctcccggtggaggcggaaaaattccggtgatgccgacctatctgatttctcagggccccaatcgggtggtgttgcgtaattttgaaggcgtggtgactacgtataccgaaccgacggattacagagatgaatgccactgtgaagagtgtgagaagcgccgtaaaacagaaggagtggctgagttgctgagcggagaacgcttatctctcgaaccggcgaatctggatcgtaagacacgtaatctattggcgaaaggataaattatttgtgattttggatttaccgtttcatgcgattgaaaggataagtccggtatcataaattaaaatgctgaacagatgggttttgttgatgacatatccgattacaggagtctggcaattgtcggattggagaaaaatacagggaaaacagaatgcctgaattacatccttcgcaggataaaagattcggcagatcggttcgctctgacttcgatcggaattgacggagaaaaccgggatcaggtatgtcaaaccccgaaacccgagattaccgtgccggaaggaatgatattcgttacttcggagaaacattaccgggagaggaagttggtggctgaaatcatggaaatcgatgatcatcggactgctttgggacgattggtcatcgccagggctaaaacttcgggaaaagtactgctttcagggcctgcggatactgccgggttgaaaagtctgatccggcatatgaaagatttcggggtacaaacgaccttggtcgacggggctttgtcccgtttaagcctggcgtctcccaccgttacggaggcgatggtcttagcgacaggggccgctgtttccgggaatattcgggaagtggtgagacgtacccgttatgtttgtgatttgatcgatctggaagaggtggacgaagttttacaagagagattggatgctattcaacaaggtgtatgggcggtcgggccggagggagaatgtattgatctgaaattgccttctgtgtttatgctggagaaaagtggaacagatctgctaaaatatgggcatcggatttttattgccggtgctgtgagtgataaagtatttcagtttttacgcgtacagaaacagaccgtagaattgatcgtccgtgattttacccgtgtttttgccgcacctgagtctttttatgcctttttacgtaagggcggaagagtacaggtgcttcatcgtagccggcttttggccgttacgatcaatcctcaggctccgggaggattacttttggattcgttgcgtttgcagcaagcattggaagaaagcttgcaaattccggtgtatgatgtaaaaaaaatagaaaaagtcggtaaaaaccgttgaggatatgattttaagggaagcgataagacaagtcaggggattccgttatatgatcgaacaattggatatctgttcggccgtaggccgtagggtattgtatgatctgccctggctcgattcgaaacctcggttggaggccgaatttgaacgcgttcaaaagatcatggtgctttttgaacaacctgaaaatgaatcccgtctggaacgtttgactggtaagctgatgcaggtgagagatatacgggggacgatcgggcggatggcgatggagcaagtgttggatgatcttgaattgttcgaattgaaaacttttgctttgtgttcggaagaaatcaggggacttgtcgaagaatggcggatcgttttactcccggaactggagccggttgtacgtttgttggatccggaagggaatcggattcctcatttttatatttatgatacttattcggctgagctggccaggctgagagctgaaataaaacaaaagagctttcaaggggcagaagaacgggaattagaagcgttgtatgtacaaagtgtggttttggaagacaaggtacgcgaagagttgtctgtgcagttgagaccttatcacgacgatttgaaacaggctttggaagcggtcggattgctggatgtcgtattggcaaaagccagacaagcaataaaaggacaattgactttaccgcaaattccggaagagggggaaatggtgttcgaaggtcttttccatcctcagatccgggagattttagaacaggaaggaagagcgtttcagactgtagatttgaaattggaaaagggagcgacggtgattaccggagccaatatggccggaaagacagtgttgttgaaaagtgtgcaactggcgcaatacctgatgcagttcggtttttatgtacctgcccggcgggcgggtatgccgctcgtggaacaagtcttgaccagtatcggggatgatcaggatgaattgaacggtctctcttcttatgcggctgagatgttgcgggtggatgaaatgatccggcaagtcaggcagcgaagtaaaattttggtgctgatagacgaattggcccggacgaccaatcccgtcgagggacgggcaattgtgaatggggtagtggattttttgactactcaccgggtgatggctatggtcactacccattatagcggaataacggccgagtgccgtaaattgagagtgcggggattcgtagagaatcggattgaagggaatataaccctgaaaaatatcaatgagtttatcgattattcactcgaagaagacagcggaaaagaagtcccccaggaggcgatgcgtattgcctggatgctgggggtcgaccgtggagtgttggaacgggtggaaaattatttgcaggaagaaaatcctgatcggaaaaagacagtacagtagaaaggaaatatatatgaaaagtaaattaggaatagattttgataaagtcggacatgcccgtgaaatagcccgtaagattgctgaccaggtgcaggattttgtggatggctatacgacagtggctgtcgaaaggacattgtgtcgtttgctgggtatcgacggagtggatgttcatgctgtccctctgccgaacatcctggtagacgagctgaaagaaaagaacgtgttgggagaaggaattttattctttctgggtaatgtaatggtggaaaccggaatgactccgcaggaaatagccgaacaagtagctgccgggaaagtagatgtcacccgggtaccggtatgtactcccggccagcgggaaaaagcgctgcaaccctatatcgaggccagtatccggcggatttccgacaaccggaaacggcgtgagaattatatcgcaacgatcggagagggagcaaagccttatctttatgtaattgtcgctaccggtaatatttacgaagacgtggtacaggcacaggcggctgcccggcaaggggcggatgtcattgctgtgatccgtacaacagggcaaagtttgttggattatgtaccctatggggctacgacagaaggattcggcggaacttttgccacccaggaaaattttcggattatgcggaaagctttggatgaggtcggagaagaagtcggtcgttatatccggttgtgtaactattgttccggtttatgtatgccggagattgctgtgatgggagctctggaagggctggatgtgatgttgaacgatgcattgtatggcattttattccgggatatcaatatgcagcggacgttggtcgaccagtttatgtcgcgggtgatcaacggctttgccggagtgattatcaacacaggcgaagataactacctgactactgccgacgctgttgaagaagcacatactgttttggcttccgatctgatcaatgaacaattggctttgttggccggactaccggaagaacaaatgggcttgggacatgcttttgaaatggatcccatgctggaaaacggctttttgtacgaattggctcaggcccagatgacccgggaaatttttccgaaggctactttgaaatatatgcctccgacgaaatttatgaccggaaatattttccgcggacatattcaggatgctcttttcaatatgatcggaatctggacttcacaaggtattcaactattgggaatgccgaccgaagccatacatactccatttatgtcggatcgttatctgtcgatcgagaatgcccgttatatttttaataatatgaaaaatatcggagatgaagtagtctttaaagaaaacgggattatacaaaacagggcgaaagaagtgttggataaagctaccgttctcttggaaaagattgaacgggaaggactttttacagccttggaaaaaggaatttttgccgatatcaagcgtcccaaaaacggaggaaaaggattggacggcgtttgtgccaagggaaagaactatagcaatccttttgtagagatcatgatgaacagataacaaaaatcgtaaatcaaataaagattatgagcggaggtttatattcaacagaagggagagatttcgatcaaaccctcgatctgaaaaagataaaaccctacggggatacgatgaatgacggaaagacacagctgagtttcactttacctgtacctgccggagatgaagcgatagaggctgctaaacagttgatgaaaaaaatgggatttgaaaatcctcaggtggtgtttcatcaggaactgacgaaaggatatactttttttaattgttatggaagttgtgtacacacggtagattatagtaatatctatgtgccgaaagtggaatcgaccaagtgggatatgggagagaccgatcagtttgtccgggaacatatcggtcggaaaattgtggtgatcggagctagtaccgggacagatgcccatacggtgggaatcgacgctattatgaatatgaaaggttttgccggacattatggtttggaacggtatgaaatgttcgaagccttgaatatgggtagccaggtgaccaacgaggaatttatcgctaaggctatcgaattgaaagccgatgctttattggtttcgcagaccgtgactcagaaagatattcatattaaaaatctgacggaacttgtggagatgttggaagccgaaggattacgggacaaagtgatcctggcttgtggtggtccccggatttcacatgagttggcgaaagaattggggtacgatgccggcttcgggatgaatacctatgccgacgatgtcgcctcgtttattgcgcaggaattggatcgaagaatgaatcattgaaaatatacaagctatggaaaaagaacaaatcagggaagtgattgccaggagagtggcaatggaactccacgatggagacgtggtgaatctgggtatcggtttgccgactttagtgccgaattatctgcctgaaggtgtcgaggttatcttacaaacggagaatggattgatcggtatggggccaactcctgctccgggagaagaagatccggacttgatcaatgccggcggtggagcgataacggctctgcccggagcggccagcttcgatagtgctacttcgttcggtattatccggggcggacacgtagatgtcagtatcctgggggccttgcaagtagatgaaaaaggagatttagccaactggatgataccggggaaaaaaacaccgggaatgggaggagcgatggacctgctgatgggagccggtaaggtgatcctggccatggaacatacggcaaaaggaaatccgaaaatcctgaaaaaatgtactttacctttgacagccaagggacaggtgaatatgatcgttacagaaatgggagttatggagatcacatccgggggaattgtactgaaagagatacatcctgagtttacggtagaacaggtgcaggcagctacagaagcaactctgatcgttgccccggatttaaaaaagatgtgctgaacgacgaaagcgtattgaaggaaatcacgatggaggatggatggtggatacctctagcccgaatcgtaaactataaattaaaaaaggtatggatttttcattatcaaaaaaagagatattgtttcagcagatgatcagagcatttgctgagaaagaagtaaaaccgctggcggcagaagtggacgaagaagagagattccctgtcgaaacggtagaaaaaatggcgaaactggggattatgggtattcctttcccggtggaatatggtggagccggtggtgataacgtattgtattctatggctgtagaggaattgtcccgggtatgtgcgacgaccggagttattgtttctgcccatacctctttgtgtgcttctccgatctatgaattcggaaatgaagaacaacggaaaaaatatttacctaaattatgttcgggagaatggataggagcttttggtttgaccgaaccgaatgcaggtaccgatgcctctgcccagcagacgatggctgttgctgaagaggatcactatgtgcttaacgggtccaaaatatttattacgaatgcagcttatgcacacgtttacatcgttatggcgatgaccgataagtcgcagggtacacgaggaatctctgcttttatcgttgaacgggatttcccgggattttccatcggtaaaaaagagaaaaagatggggatccggggatctgcaacctgtgagttgatttttgaaaattgtattgtgcctaaagaaaatatgctgggtaaaccgggtgaaggatttaaaattgcgatgaagacgctcgatggcggacgtatgggaattgcttcacaggccttgggaattgctcagggagccatggatgagacaataaaatatgtgaaagaacggaaacagttcggacgctctatcggacaatttcagaatacccaatttcagttggccgatttaaatgccaagatcgaagctgcccgtttgttggtgcggacggctgcctggaagaaagacaggaaaatcccttattctgtcgattcggcacgggctaagttatttgctgctgaaacagcgatggaagtgacgacaaaagccgtacagttccacggggggtatggatatacccgtgagtatccggtcgaacggatgatgagagatgccaagattacggagatttatgagggaacctctgaagtacagcggatggtgattgctgctgctctattgaaataataatgttttccgcattgaacttataaaaagagaacacatgaaaatagtagtttgtataaaacaagtacctgatacgacagagatcaaactcgatccggtaacaggaacaatgatacgggatggtgtacctagtattatgaatcccgacgataaaggaggattagaaatggctttggccttgaaagataaatatggtgcacatgtaaccgttattacgatgggaccgcctcaggccgacgacattttgcgtgaagcttttgccatgggagccgaccgggcgattcatttgagcgaccgtaagtttgccggtgcagatacattggctacgtctaatgctattgccggtgctttacggatgctggatttcgacctggtcattaccggccggcaggcgatcgatggagatacggcgcaggtaggacctcagattgccgagcatctcgatttgccacaagtgacgtatgtcgagcatctggaattcgatggtgacaagttgtttacgatccgtaaatctaccgaagaaggatatcaaaccgtacaggtggaatctccctgtgtcgttactgttctggctacggcaaacaaggcgcgctatatgtctgtgcggggaatcgtagaggcatacgatcgggaagtggaaatctggaattttaataatatcagtgtggatgaagctaaattgggattgaacggttcgccgacgcgggtatggaagtcttttaccaaaggagctaaagcagctggaaaagttttcgaagtggaaccgaccgaaggggtagatattattatcgaaaaattgaaagagaaatttattatttaatacatgattttagaggaaaaccgggaataatccggtgaaatctaaagtttaaaatctgatgaaaatggataaatctcaatataaagacgtttatgtattcgtagagcaacgggaaggagttattcagaaagttgccatcgaattattggggaaagcccgggagttggccgatagcctgaatgaaaaagtggtggcgatgttgttgggttatgaagtggcggatcaggcacaggaattgatcgcttatggggccgatgtcgtattgtgtgctgacgaacgggagctggtacaatataataccgagccttacgctcaggcgattacacagattgtacatgagcgtaaacccagtatcgtactgattggtgcgacgacgatcggccgggatttgggccctcgtttatccgcccgtttagagactgggttgacagccgattgtacaggcctcgctatctcggatgaacgggatttgctgatgacccgtcctgcattcggaggaaatctgatggcgacgattatttgtaaagaacaccggccgcaaatgtcgaccgtacgtccgggagtgatgcgcacgaaaccgaaagatgaacaacgtgccggaacggtagagaaggtgaatattcatttcgataagtcgaaatttaaagtgcggattctcgagacggtgaaagagcaaaagaaccgtatcgatataacagaagcgaagattctcgtatccggaggccgtggtgttggtaatacggagggatttgagatgctcggaaaattagcggaaacgctgaatgccgaggtttcttcttcacgtgccatggtggatgccggggttatgcctcatgaccgtcaggttggccaaaccgggaaaaccgttcgtcccgatctgtatttcgctatgggtatttccggagctattcagcatttggccggaatggaggaatcggaatttatcgttgccgtgaacaaggataaatatgctccgatttttaacgttgccgacctgggaattgtcggggatgtgaagcagatcgttccgttgctgaccgagaggttggcaaacatccggaaaactgacaaataaaagcccggacatggagtatcaaaaattaatgctggaaaaacaagatcgtgtttgtctggtaaagatcaatcatccggaggcattgaatgcattgaatacggtgatcttgcaggaattggaccgggcattcgatgaaattgcagccgatccggaaaccgatgtggttattctgacaggcgaaggacgttcgtttgttgcgggagccgatattgctgaaatgagtgtgatgaaggccgaagaaggccggcgtttcggtgagttaggagctgctgttttccggaaaatcgaactgatggctaagccggttattgctgccgtgaatggatttgctttagggggaggatgtgaactggcgatggcttgtgatatccgtatcgcctcggctaaggcgaagttcggtcagccggaagtgggacttgggattacgccgggattttccggtacccagcgtttaccgcgtttagtcggattaggtaaagccaaagagttgatttatacggctgcggttatccatgccgaggaagcttgccggatcggactggtgaacaaagtggtggaaccggaagaattgatgaacgagtgtatggctatggcaaagactattgctgctaaagcgccgttggcggtccgttatgccaaagaagccatcaaccggggagtggaaacggatatggataccggtatcgtcatcgaaaacggtttgttcgggttgtgtttcgcaacgaccgaccagaaggaaggcatggaagcttttttatggaaacgtaaacccgaatttaaaaggaattaaaatctttgtaatttaaatttatcgattatgaaaatatgcattgttggaacagggactatgggacatggtattgcccaggtatttgcccaggccggacatgaggtattgttaaaaggtcgttctgaagcttctttggcaaaagctcacaaagctatggataaaaatctttccagaatggtggaaaaaggtaaattggaagccggggttaaagatcaggtattggccagaattaaagatacgatgaaatatgaggattgtgccgatgctgatttggtgatcgaagcgattgctgaagatatggctaccaagcatgagatattcaaattgttggacggaatttgtaaaccggaagcgatattggcaaccaatacttcttcgctttctataacggaagtggccgctgtgactaaccgtccggaaaaggtgatcggtatgcatttcttcaatcctgttccggctatgaaactggtggaagtgatcaaaggtcggctgacttcggcagaggtacatgatcaggtatttgctttatcgcaggaaatcgggaaagtgcccgtcagtgtcgaggaagctcctggatttatagtcaaccggattctgatccctctggtgaacgaaggcatcggtatattagctgacggagtggcgaaaaaagaggaaatcgatgccgctatgaaattaggggctaaccatcctatgggaccattggagctgggtgatttgatcggattggatgtttgtctggctattatggaagtgttgtaccgggaattcggtgactccaaataccggcctcatcctttgttgcggaaaatggttcgtgctaacttattgggacggaagaccggagtcgggttttatgattatcggaaataatgaggagagtcttctttaccgggatacgatgctggggaatatttccccagcatttttactttttccccactttctacaacctacgattcttaatttgttgtgtgtgatatattgataattagagtattatgttggatttgtgcttgtggcatcggatttgtcctgtttaaggataaaatctaactctaaaaaataatagtatgaaaaagatcgtcattttaggaatcggagcttctatgttcttcctgggtagttgcgtagagagttctcagaaatataagtctttacaagcccgtctggattctttgagtacagtacatattatgcagaattccgaaatggagagtatgctggctgatttgaatgatatttctgccggaatgcaatcgttgcgggatgccgaacgtttattgactttggaaacaattaatgaaaataaagccaatagtaaatccaaacagcaattgaatcagctgaaaaaagacatacaggctgttaccgaagcgatcgcttcttataaaggacagatttccaaactcgaaggtaagaataaaagccagtcggccgagtttaagagattgattgccggcttaaatgcggaattggatcaacgtacacagaaactcaatgaaattactaagcaattggctgagaagaatcagcaattgacagtgaagaccgaggaagtcgctaatctgaccgagaatgtggaagctttggataaagccaataaaagtcagcaaatgacgatcaatgaacaggatatggctattcatcagggacactatttgattggaaaccgcaaggagctgaaagaagctgaggtaatttccagacaagggattttctgtccgccgatcgtatcgtcacaagcacaaaaagccaactttaccgatttggatatccgtgagatgaaggtgatcccgttgaatagtaagaaagcgaaattactttctgtccatccggctgattcctatactttggagaccggtgaagatggtaatatgaccctgaaaatcaatgacgaaaataatttctggaaacaaactaaatacttggttgtgatgattggataaaagcgggaataattttaactgaaagaggcatacccatcgggtatgtctcttttcttttttcacaacgattattcttgttgagagagaaaataatgaagtttctttgatttaaagacagttcgtttagaaaactagccgaagatcatcaggatttttaaaagtgtatccgatgagaaaatcgctttcaatttgtcgatgcttttgtatttcagtgttttaacactgcttactgagatgttcatttcctgtgctatttgctgattgtcgaggccttgaaaagcgagctgcatgacttgtttactacggggaggtaatttttcgatttccttgatgatctgtaaagctacatctgtttcgactataacattgaaaatgtccacttctttgagcgaacggctgttcacgaatttttcctgcaatttcagttttcttaaccattcgagagaaaggttatgtaccaacatgtacatataattatcgatgctttcgattttcttctctttggacactaattcccaaagccgtgcaaaagcctcctggacaatgtcctctgatgccgatttatcgttcaaaaaccggttggctgcaaaacataaaggagcatacaaccgattcattgtactggcaaattcatttggagaagaatttttaatcccttgttttgctgttgatttcatctttatttaacctgaaagtcgaaaacaaaggtaaaaaattgtaagaatcattcatctttttggtggacttattagtctttaatataaagtgtaattcgatataaaacaaattatgtgtcttgtacaagatcgtcaaaaattgattttgttgttgcaaaaagcttatttcgggcaactctctgaagaagaagccgggctgttggctgagtggcgtagtcggtcttcggaacatgaggtattgtatcgacggatcatgagcggagaaagcctggccgaactgcttgagtggcaaaatcatttcgatccggaacaagcgaatcggtcgattttgcatcgggttgaaaaacgtagatctgttcggatgaggaaaataggtttgcgggtagctgctatagttctcctgttgctgggaataggaacgatatggattataaatcgtcagggcgatgatagacggcaacaggaattggcttttacatcgattcacccaggaactccccaagctattcttactttggcggatggaaggcaagtggtattggataagaagccggtaaccttgaaattaaatgaaaaacaatttttgaccggagatagtgctatattgaattatgcggttaatctaccgaatggttgggaaaataatggacagcaaacattaatgcataaggtggaagttccggttggtggtgaatatcggttagtgcttgccgatggtactaaagtctggatcaatgctgaaagttctttacaatatccgggagagtttactgctgaacggcgaacagtaattttacaaggtgaagcctattttgaagtcgtttcggatacgctgaaaccttttatggtgaaaacgcctgccggtttggaagtgaaagttaccggtacgcatttcaatgtagaggcatatgccgatcgtagaacatggaaaaccactttagtagaaggaggggtggaagtccggcttggaaaatatcaagcccatctgcgaccgaatgaacaattcagttttgatcaggaaaccaatcagggaagcttgaaaaaagtaaatgtcagggaggttatcgcctggaaaaatggctggttcgtttttgataatactcctttggaagaaatcatggagacaatacgacgatggtataatatcgaagtagaatatcgggatgctgagacgaaacaattgtgcttcacgggtgatctgagtaaatatgattcttttgaaacggtgatccgtatgtttgaagatactaagaaagttaagttaaaagtgcaagccggccggttgatcatagaaaaatactaattcataggaataaattataaaatatacctaaaaatagggatttctcaacttcgggtatcccgttatttttggacctgctaaaagggtcgattcattttgcggatttccgcgaaaacaacggacaggtggtgattgaaaataaacaattattaactaaaacagtaaacatgaaagtgatgtgttatttcaaacaaggaaccatatcccggatgttattcagagggatgttgtttgcattgttggctgtatgttacccggaatattcccgggctgttattgctgaggatcatcaggcgaatcggttgattacgctttctatgaagaatatctctgtggctgatattatcggacaaatccggaaaacgacagattatcgtttcttatttcaggtcgatgacctgaagggagtccggaaagaggttttcgaggtttctgaagcgactatccgggaagcgatggataaattggtggcaggaacatcactgacttatactttacgtcaggacggagtggtcgttttatctcaaacacaacctcaatccagggaatttaccgtttcggggtttgtactcgaggctgaaacccggaaaccgataccttatgccactgtttttattccggatttactgatcggtacttctgcccgggaagacggggcattcacgctcaatcaggtacgcccgggaaaattgaaacttgaagttcgttatatggggcggatcagtctggatacggttattcaggtgaatgcgaatgtaagggatctccgtttttatttgcaggaagaaaatttcagattgaatgaagtacacattacggcggagaacagcaaagccggacaagctacctcctctaagatttcccgtttggccatggatcatatgcaggcaagcagcctgggggatgtgatgcagttattgccgggtgggttagcgaccaatccgaacctagggtatgcttctcaattgaatctccgtatgatttccgagaatgcttccggcataccgggattgacggatggagaagaggaagctgccaatatgaatagtttagggactctgattatccgggatggggctcctgtttccaataatgccaatctacagactgtaagtcctgctatcacaggtgccgggaccgctttgggcggaacatcttcaccggccggaggtgtcgatgtccgggctatctcgacagacaatatcgaatccatcgaggtgattcggggaataccttctgtcgaatacggagatttgacttcgggagctgtcattatcaattcgaaagccggccgggaacccttccgcttacggtttaaaaccaacgaaaacatttatcaggtatcggctggaaaggggtttaatctgggagggaagaaaggaagcctgaatatcagtggggattacgcctataatgtgacggatcctatgcaatcctatgtttattatcagaggggagctgcaaaagtgatgtattcgaatatattcctacatgatgttctccgttccaatacttcggtagagttgatatatggggataataaacggaaacaaaatccggatgatgaacggcttcaactgaagagcaacggacgggatatcggtatttcgttcaatacaaacggaatttttgacctggattacggctggctgaaaaatcttcgctatacattggcagtaaattatatgaataagaagagttatgaacaaagattattgacgaatgcaacgtatcaatattcgatgacgacgaccgacggtgcaattctgagcaatcggcccggtgtcgatttgtatgacgatcagggaaataaactgaccaatattcctgtcggcgaagagacgctttatgccaatatgttacccaacgattatcttacccgttatgatatcgaagggaaagagttgaatgtgtttgctaaagtgatggccaattttgtcaagcaaggcaaccggatcaataaccggatattagtcggagcggattttaaaagcgatggaaacaatggagatggaaagactttcgatccggcgacacctccataccgggtaaataccagtctgtattcttctttccgcccgcggaaatacagtgatattccgtttataaaccaactgggagtatatgcggaggaaaatttcagactgaattttgccaggcggaacctgaatatacaattcggtgtacggtatgataaattgttcggacaccaggacatctggacgccccgtttgaatgcttctttagacatattaccaaagatatttacgttgagaggaggatacggagaaacagctaaaatgcctactgtactttatttacatccggagaaggcctatttcgagatggtcaactttttgagtctgacggatgacaagattcccgaagctcaacggttgatgatgacgacaacccgggttttcgatacggaaaacaaagacctggaaattgctaaaaaccggaaagcagaagtcgggttcgatttgaatatcaaaggagtgaggctggcagtcaccgcttttcaggaacacatgaataacggttattcgatggcttacttgccgactacttttaaatccgttgaaaacaaacaatacaaaagcggggaattacctgccgatggagtgactgctcctgcgctgatcgaaaaggggacttaccgggtattgatgaaatatatgactcctcagaataacattacaatcaatacgcggggactggaattcgatctgaatctcggacggttcgatgcgattcgtaccgctttttcggtcaatggcgcctggttacggacagaacggttcaataatggttatacctattatgaaaaaggctccgaagatccggccaaagctcctcatgtggggatttatgaagccgctatgcggaaaaattattcagaaagaatggcgacgactttccgggtgacccacaatattcctgatatcgggtttgtggtgacattgtctgctcaggtattgtggaaagaggccaactggagtcgtttcggaaatgattcgatcccagttagttatatctcgaaagaagacgggcaggtatatcctttcgatccggcgaaaaaagaggatgctgagttttccgctatcatgaggacagttaaccagaaagaccgaatccgggaatccatgcctccgacactctgtatgaatttgtatctgacgaaggaaatcaaagactacctaagggtatcgttttttgcgaacaacatgttcagcagtcgtccgctatacaaacaaaaacggacgatcggttcctatgaaagaagaaatattccgttattcttcgggttggaactatcggctatcatcaattag

SEQ ID NO: 67 - DNA, 16518 bp, unidentified
  source 1..16518: mol_type = unassigned DNA
gtgaataagacggctatctatagatgggatgatgctgccggcacgagccttcatcctagagaagatacgtgcagagaaaggatggtacacaatggacgcattaacatgtattgaaacaagaagaagtatcagaaagtatcaggagaagccaattcctcatgaagtgatggaagaaatcgttaaagaagcttctttcgcaccatcatggaagaactcccaggtagtcagatatgttgtagttgagaatcctgaattaaagtccaagattgctaatgatgcagttcttggcttcacttacaatacaggaacaatcgagcatgccgcagcactggtagtcgttacaatgatccagggcagaagcggatatgagagagacggttcctttactaccagcaaggaagaccgctgggaaatgttcgatgcaggtatcgcaacacagactttctgtctggcagcgcatgagaaaggcatcggttccgttatcatgggaatctttgatgaagctaaggttggcgaacttatcaacatcgaagaaggaagaaaagtagcagcgctggttgctgtaggttatcccgcagagacaccggaagcacctaagagaaaaacggtagaagatttggtgcgtttcatgtaattgtgcatttttcataattcaaaatgataattatgcataaaaatacaaaagaacagaaacaggtattgacatatgccggcaaagtgaatatagttataccataaaaacacagaacagaaactaatgaccgagaggagtacatggtctgaacggattcacagagagccgcaggtggtgggattgcagcagtctaaggaacatggaatggactcgggaaggtgggagcaaagagcatatgcttgagtaatgcccaacgggatttccgcccgttaccaagggaagacgtatgatagtacgtttatggagagggtgtatttttatacatcaatttaggtggtaccgcagaagtatattcaagagcttttgtcctaagcagttaggatagaagctctttttttgcgcgaataagcaagcgaagcttgcgagtctgcttattcacagaggtgatagtaaggaggtcagctcatgataataccgacatatgaacaggcgaagcaatatgaaaaagattacacatacattccagtgtgcagggagattctggcagatgatgtcaccccaatcctgatgctgcgtaagctggcagcgctggatggacagtatttcctgctggagagcgtggagggcggcaatcttggaagatattcttttctgggatatcatccgaagctgtctgtatcctgtaagaatggtgtggtgaaggtaaaagagaatggcatggtccgtattcttcccggtaaacccaaggaagccctgcagagcctgctggaacagtatcgctccccacagatagaaggtcttccgacctttacaggaggtctggttggatactttgcttatgagacgattcaatatgcagaacccaagttacatatcaagcagagtgatgtaaatgattttgaattgatgatgttcgataagcttttggcttttgaccaggtaatgcataagctgtgtatcatcgtcaatgcaaggactgctgatggtgaagcaggatacaacaaagcagtagaagagatagatgcctttatcgagactcttcgtattacagaaccgattccttatgaaaagcctcagaaagcactggagtttacctgtaatctcagcaaagaagagtattgcagcatggtagagaaaacaaagcattacatcaaagagggcgatattttccagggtgttatctccagaagatttgaagcggattatgaaggaagccttctcaatgcatacagagtacttcgaaccaccaatccttctccgtatatgtactacatgcagatcaaggatatgcagattgcaggtacttcaccagagaccatggtgaagctgaccaatggtagactgatgactttcccggtagcaggaaccagacaaagaggcaagagcatagaagaagatcaggcattggagaaggaactgctggcagacgaaaaggaatgtgcagaacataacatgctggtagatttggcgagaaatgatcttggaagaattgcagaatatggttccgtcaaagtggcagattacatggcaatccaccgtttctccaaggttatgcatatcgcaagtacagtggtaggtgagctggcaaagggtaagacctgtgcagatactatagaagcgctgcttccggcgggaacactctctggagcacccaagttcagggcttgtgagatcatagatgagctggaaccggaagccagaggtgtatatggtggggcaatcggatatatggactttagcggcaatctggatgtatgtattgcaatcagaacagcagtgaaaaaaggcaggaaggtatacgtacaggctggtgctggtatcgtggcagattccatacctgagaatgaatatcaggaatgtgcaaataaagcaggcgcggtaatagaagcaatccgactgacagaggaggtgtgtaaggcatgattttactgattgataattatgacagcttttcttttaaccttgtgcagctgataggagagcttgcagctggcagggaagaactgcgagtgattcgaaatgatgaattgtcagtagaagagatcatgaagctggaaccctcacacattgtattgtcaccaggaccgggaagaccagctgatgcaggggtgtgtgaggctctgatcagagcggtgctggagcatccgataccgcttcttggtgtgtgtctgggacatcaggcaatctgtgagacactgggaggaaagattacatatgcgccacagctgatgcatggtaagcagagcattgtaaaaacagatgacacaagtgtcatttttaaagggcttccaaaggagcttgcggtagcaagatatcattcactggtagcagataagaatatgatacctgagacattgatggtcactgcagtggatgagaagggtgaggtcatggcagtacagcacagaacattaccaatctatggtgtgcagttccatccggaatccattatgaccccacagggcgcagacatgatacgaaatttcctgtagcgatacaatgaacgatagacagacacaaggtcaggtatccatataaatgcctgaagtacagaatggaggattcgatgatgatagtagaggcaaccaagaaggtagtagagagacaggatttaacagcagcagaagcagagcaggtcatggatgagatcatgagtggtgaggcagaagctgtgaatatggcagctttcctgacagcacttcgtatgaagggggagacagtcgaagagattacggcttttgcaaagggcatgagaaagcatggaattaaagttcctgtacagggagacgtactggaaatcgtgggaaccggtggcgatgaagccaattccatcaacatcagtacaacagccagcatccttgttgcagcagcaggctataaggtagccaaacatggtaatcgaagcgtatccagtaagagtggtgcggcagattgcctggaagcccttggtgtaaagctggatttggagccggagcagaatgccaaagtcctggaagagagcaatatctgttttatgttcgcacaaaaatatcattcagcaatgcgcttcgtaggacctgtccgtaaggcgcttggaatcaggacagtattcaatatccttggacctcttgctaatccggcagaagctgatgtggagctgcttggtgtctacagcgaagagctggtagagcctatggcacatgtactggataaactgggcgtgaagcgtgcattggtcgtatatggacaggacagactagatgagatatcactaagcgcaccgaccactgttatggaagtgaaccagggtactttcaccagatatgaactgaccccagaacagtttagcatgaagagatgtgataaaagtgagctggtaggcggtgatggcgcacagaatgcccaaattacagagagcattctaaaaggagaatgtacagatgccaaggcagaagcagtgattctcaacgcaggggctggcatttatctgatgggtggagctgattccattgcagctggcatccagaaagcaagagagacaatcgcaaacggcaaagcatatgagaagctacagcagtttgttgcacttaccaatgcgtaggaaatgagggaaaatatgattttagataatctggcggcagctacgcgggcgagagttgagagaaaaaaggcacagataccactggaaacagtgaaagaacaggcattgaacctggcagcaaaggaaggcacatttacttttccctttgagaaggcggttgccaaagacggtattagttttatctgtgaggtgaaaaaggcatccccatcaaaaggaatcatagcagaggatttcccttatctggagattgctagagaatatgaaaaggcaggggctgactgcatctccgtactgacagagacagactacttcaagggtgaagacagattcttacgggaaatcaatgatgcagtacagattccaacgatcagaaaagacttcatcattgatgaatatatgatctatgaagccaaattgctgggggcttcctgtgtattgctgattgcagcactgcttgatacagagaccatcagacaatacaaggcaatctgtgatcagcttggcttgtccgcactggtggaagcccatgatgaagcagaagcagccagcgctctggcagcaggagcaagaatggttggcgtcaataaccgtaatctgaaggatttcacagtagatatccacaacagcacaaggcttcgtgaactggttccccgtaatgtattgttcgtagcagagagtggaattaagacagcggaagatattgcagagttagtcagcgctggcgtgaatggtgtactgataggagagacattgatgcgcagccctgataaagcccggatgctggatgaacttcgcagtaggatataagtagtgaggtgtaatatgcccaaggtaaagatatgtggattgaagacattagaagatgtagagattgtgaataaatatctgccggaatatgtagggtttgtctttgcaccaacgaagagattcgtaaccgatgaacaggcgttgatgatgaagcaggcattggcgccacagattcaggcagtaggggtatttgtcaatgaacccatagagcatgtgctgtcgttgtgcagccgaggaatcattgatgtgatacagctgcatggagacgagactccagaatatatcacaaaaatcaaaaacagaactgacacgcctgtcataaaagcggtcagagtacagagcagtgaacaggtaagcagtatggtgacacctttggcagagtatatgctttttgatacatataaaaaagacgcttatggtggaagcggggaacgttttccattagagattctacagaaaagcttaaaagagctggaaaaccaaggcgtgtcaatacagccgtttttcctggcgggcggactgacacctaggaatattgaggaagtacttggaacacaggattgttattgcatagatgtcagtaccggagtggagaccgacggacataaggaggaagcgaaagtacgagaactgatagagaagattcgcagatatcagaaagagaggagtaatcaaatggaacagaagaaaggacgatacgggttatacggtggacagtatattcctgagacattaattcccgcagtcaatgaagtggagaaagcatacgaatactataagaatgacccacaattcaagcaggaattacatgatctgctgacgaaatatgcaggaagaccatcattgctttattatgcagagaaaatgacaaaagatctgggtggagcaaagatctatctcaaacgtgaggatctgaatcataccggttcccataagatcaacaatgtattggggcaagtgctgcttgccaagaagatgggtaagaccagagtcattgcagagacaggagcaggtcagcatggtgtggccacagccacagcggcagcactgatggatatggaatgtgagattttcatgggaaaagaagatacagacagacaggtgctcaactgctatagaatggagcttctgggagcaaaagtacatcccgttacttcaggaacaatgacactgaaagacgctgtcaatgagaccatgcgtgaatgggcttccagaatggatgatacattgtatgtacttggttctgttatgggacctcatccttttccgatgattgtccgtgatttccagaagattatcggagaggaaatcaaagagcagctgcaggaagcagaaggcagattaccggatgctgtaattgcctgtgtaggtggtggcagcaatgcaatgggcgctttttatgaatttattcctgacacgagtgtcagattaatcggatgcgaagcggcaggacttggtgtgaacaatccaaagaatgcggcaactatcgcaaatggaagtattggtattttccacggtatgaagtcttacttctgccagaatgaatatggacagatcgcaccggtatattctatctctgccggactggattatccgggaatcggaccagagcatgctaatctttacgaaacaggcagagcacagtatgttccgattacggatgaagaagcggtagaggcttttgaatatttgtcaagaacagagggcatcattcctgcaatcgagagtgcccatgcagtagcatatggtaagaagcttgcaccgaccatggataaagaccagatcattgtaattaacatttcaggacgcggagataaggatgtagccgcaatcgccagatacaggggggtagagatctttgactagaatacagaaagcatttgataatcagaaggcattcattgcctttgtaacagggggagaccctgatgtggaaaccacaaagaagctgataccggagatggcaaaagccggagcagacctgatagagataggaattcctttttcagatcctattgcagagggcgtggtaatccaggaagcagatgtgcgtgcattaagcgcaggtactacgacagatgatttatttgatatggtaaaagaagtccgcaaggagacagatgtccctcttgtattcatgacttacatgaatccggtgtatacctatggaacagagcgttttatgaagaaatgtgcggagtgtggaattgatggcgtgatcattcctgatgtgccttttgaggaaaatgatgaagtcagtggcgcatgcgaggcagcaggcgtagatctgatatccatgatcgccccgacttccaaagagcgtatccatatgattgcaaagcaggcaaaaggtttcctgtattgcgtatcttcattgggcgtaacgggtgtgagaagccagattacaacagatattcatgctatggttgagcaggtgaaacaggtatcagacatcccctgtgccattggctttggtatttccacaccacagcaggcatatgaaatggcagctaaggcagatggagctattgtaggcagtgccattgtaaagcttgttgccaggtatggtaaagactgtattgctcctgtgtgtgaatacattaaagagatgaaagcagcagtcagcagggcagaaaattaaaaaaggttgtaatttacctgatatatagtaaaatataactagcctatatatggatttatgatgtataatctgtatacagtacactggttatttgtttatgaggagcttactatatgttggaaaataaagaaaaaattgacctgaaaaataaatgcgtttttattaccggtgtggcgggatttatcggttccaatctggctaagcgccttttgaaagaagtagagggtgtaaaagttatcggtctggataacatgagtgcctattatgatgtatctttaaaagaagccagactggcagaactgaatcagtatgaacagttttattttataaaaggcaatctggcagacagggctgcgattgattcaatttttggtcaataccagccacagatcgttgtaaatctgggagcacaggcgggggtccgctattccattacgaatccagatgcctatatagaagcaaatctgattggcttttatcatattctggaggcttgcagacattcctatgatgaagggaatactcctgtagagcacctggtatatgcctccagttcttccgtatacggctctaataagaaagtgccatacagcacggaggataaggtggataacccggtcagtctctatgctgcaacgaagaaatctaatgaactgatggcacatgcctattccaagctctataatattccatccacgggacttcgtttctttacggtatatggacctgcaggaagaccggatatggcatatttcggctttacgaataagctgttaaaaggtgaaaaaatacagatttttaattacggaaactgtaagagagattttacctatattgacgatattgtagagggtgtggtccgtgtcatgcagggagcaccaaaacgtgagaatggagaagatggcttgccgattccaccttatgcagtctacaatatcggtaatcagaatccggagaatctgttggattttgtacagatattgcaggaagaactgatacgggcaggcgtgctgccggaggattatgattttgaagcacataaggaacttgtacccatgcaggcaggagatgtgcccgtgacgtatgcagacacatcagcattggaacgtgattatggctacagaccatccacaagcctgcgtgaaggactaagacattttgcagagtggtatgcaaggttttataaataagaaggagaacaccatgagagaatttaaagacttgaaaattgcagttgccggtactggctatgtaggactttctattgcgacactgttgagccagcatcatcaggtaacagcagtagacattattcctgagaaggtagagatgcttaacaaaagaaagtctccaattcaggatgaatatattgagaaatatctggcagagaaggagctggatctgaaagcaacactggatgccaaggaagcttattctgatgcagactttgttgtgattgcagcaccgaccaattatgacagtaagaagaatttctttgatacctctgttgtagaagcagttatcaagctggtaatcgaatacaatccagaagcgattatggtcatcaaatccacgattccagttggatttactgcatctgtccgtgagaaataccactgtgacaatattattttcagcccggaatttctgcgtgagagcaaggctttatatgataacctgtatccaagccgtatcattgtcggtacagacgtggagaacgcaagactggtaaaggctgcacatacctttgcagaattacttcaggagggcgcaatcaaagaggatattgatacgttattcatgggatttacagaagcagaagcagtgaagctttttgccaatacgtatctggcattacgtgtcagctatttcaatgagctggatacctatgcagaaatgaagggactgaatacgaagcagatcatagacggtgtatgccttgaccctcgtatcggaacacactacaacaatccaagcttcggctatggcggttactgcctgccaaaggacacgaagcagttacttgccaattatgcagatgttcctgagaatctgatcgaagcaatcgtagattccaaccgtacccgtaaggactttatcgcagacagagtattggagattgcaggcgcatatggtgcaaatgacagctgggaagaaggaaaagagaaagaagtagtagtgggcgtatatcgtctgactatgaagagtaacagtgacaacttccgccaaagctccattcagggtattatgaagcgtatcaaggcaaagggcgctacggtcattatctatgagccaaccttgaaagacggagagaccttctttggcagcagggttgtgaatgacctggaggagttcaagaagcagagccaggcaatcattgccaaccgatatgacaagtgtctggatgatgtagaagataaggtatatacaagagatattttccagagggattaagggataacttaaaagggtataaggcgtttttcatgccttatacccctttactttaagtgacgccgtgcatagttaacaattcaccgcaggcacactctcgttgctcatcgctggcagcggtacataagcggctaaaatacagccgctaagtaccgaccgctctgaagcacctgcttgtgaaattgttaattatgcacggctgttacttttaaagtttagtttcgtaagtactttatttagaacaagcccctgatatcatatattctgccgtcggtggcatggaagcgatagatatttggggatgcattttcgtgtatcatgtagtaggaaccgtcgaagtacgatatgaaatagggggtaccgttgttgccgaaaaggtgatagaggttttcaaagctgcctgtggtgaagtcctccagtgttcttgcacgtaatacggtggaagcggataggtcatattggagattggtggacactgtaagaaagaaatatccgtctacaatactgatctgtaccattcctgcgatatcgggcgagaccggataggtctggagaacctcgaaggtggacttatcgaccatcatgatactgctcagctccacggccgggaacaggattacatcgcctgctattgtgaaagaacgcacatagcaatgcgccagctcagggattgcctttatctccagaagctgcagggacagggagtcaccgattcgctgataaatatacatttcacctgtcatagagctccatgcgtagaacagtttatcaacgggatcatagctgacataatgaggacggacaccgacattttcaaaggtctgaaggagtctgaagctgtcatagccctttgcaaatgtaagaatccggtcattttccgtatcggtgaccatgtaaatgtcgccatcactgcataaggcatgaggctccttcaactttctggtcatgacattccagtcgcgaagctctctggagagatcatcggaataaatgatttgattatgattggaatctacaatataataggtattgttgattttggtaatctgtgtaggcatcaacagataggaataaccgttggaggcagcagatacctgcaatgccggctggctgcacagaaccggcagaagaaccaatgccgttagtttttgcaatatattctttatacgatacataacccacctcgtaaatatattatgatacataaatgatagcatagagaaagagtcaggtaaataaatactttaaatcataccaggaggaaaaaacaatgaaatgcaggaaaccaaagaaaaataccgggatgctggtgttacttggcatactgacagtagtactgctgattctggttgtcatgactttcagattgagcaggaagtcccccatacaggagtcacaggaaacgacagagagctcagaagaggaaagcacacaggctgctgtcgaaacgacaacggctgagacaacccaagaggaaacggagtcagagacaagagaagaagcaaagcaggacggatatattatcataggtgacagccatgtcgttgtgacggatgggcttggctatggtgtatatggctctgctgtggagggcgttgtctataatgagaatttattctttgtccacacaggtcttgaccctgtcatgggaacctttgaatggcttaagggagatggtacggcgcagatacagactattatagaagagcatccgcagataggggactggaatattatcagtatacatggaacgagcatggttaccatgccggatatagccgtccagtatatagataattatgagaagtggataaatgacaccttcagccgatatcatgtgtatatggtatccattccgccattggatgagaaagcatggaaagaaaatcatcctgatgtacctcgtgataacaagagtatacaggcatttaatgagcagataaaggaagccttcccggatcattattttgattactatgactggtttctggagcatgatgattttcaggatgaaatccattatacaggcaagacgtattgtatgctttttgatgaaatcataaataaaatcaaaacgcaatcttaaatttttctaaacttaaacacttgtatggtaaaaacaacaatgttattatatatacaagtgctattttcagaattgtcagttaatgacatgtgagaaagctcattcagttttacacctgaattgaggataaataaagaaatgtacaattatgaggaggaattatggcttcattaaaagaatccctttctaagggaattaccacaattaatgtaaagaccaacagttttatggaggagtcaaaatgtaaaacttatatttcgactctggaaaaagaaattcagatcttaaaacagaacattggagagactgtatatgctaaatctgtggctggtgagagctatgaagaggaagtagccgggatgatcgggcagattcggggcaagtatgaggagatcgagcagcagaaggcagcgattgaacagcttgcagttcaggagaagcagatactgggtaatcagtccatgacagtaaatatcagatattgtgcaaattgcggtgcccagaatgcggcaaattataagttctgcagtaaatgcggaagcccgctgaactaatcattacgctacatatgtaacgctgctgtgataaagcagaaaacagcagcagttaattatgagaaatagagaaaacaaggagagaaagttatgcagtttgatcccatgacaggagaaccaatcgaggaacagcagaatgaagaaaatgtgcagtttgaccctatgacaggagagccaatcagccagacagctcaggaagaacagcctacaggcggctttgaccctatgacaggagagccaatcggccagacagctcaggaagaacagcccacaggcggctttgaccctatgacaggagagccaatcggccagacagctcaggaagaacagcccacaggcggctttgatcctatgacaggagaaccaatcggccagacaacacagcaggcgggcagttttgaccctatgacaggagcgcctgtaacacagaagccaaagagcaaggttccggttgtcgtgggagcagtagcaggcgtcgttgtacttgtagttcttctggtatttggcggaattaagtcaggacttttccttggcaaatcaggcaaggttcttctggcagcaaacaatacattaaagaagatgcctcatttcgtagagacacttgagccaatgcttggtctggtagaggacgaattcacagtagagttcagtgcgaaagcagaaggcgtaaagataggtggttcttttattaatgcaagcaagcagaagcaggtaacagccaagcttgaatatggcggagagtctatagaaggtctggcaggtgttgattccaactctttgaaattccaggttcctgatctttccaagaagctttttgtatacaattataaaaaggaaaattccggatatatcgtagatctgatcggtgacgaatatattgatacgctcaattcttcactggagcagctcgtttccggcagcaaggatactgacaaggcacagaaggacgtgaccaatgttgtaatgaaggaattaaagagcctgaaattccagtctgctgccaaggaagaattcactgtaaacgacaaagatgttatgtgcaaaggctacacgacaacaattaccggtgctaacatatggaatatcattgatggaagttatcaggcaatgcttgataattatcagtccgtaggagaagcagtagatgtattagacagctatggcgaaatcgaatcagagttatcctatctggaagatgaactggataatatggaagatatagttgttaccttctatatctataagaatcagcttgcagctatcgtcgtagaagatgaggattttgaggatgatctccagctgtgctttgaaggtggagactacagattacagaatatcacatttaagagcggttcctacagaatctccatgaaaggctctgatgatggaacaaaagagaaattcaagcttagagagaaatatggaaccgatgcatatgatattggcagcttcgagtataactacgaaagcggcaagtataagattgaggtagatggcgaggtactcagcggtaagctgtacaaggaaggcaggacactgaatctgtctattgatggtcagtatgatatccctgatatggattttgcttttaccagaggtgctaagctgcagaagttctcaggagacgaattcgatatcggtaatgctgatgcagacgatctttacgatctggtagacgatattacagatgaattaagcgactttgattatttaattgatcttttttaaaaaaaatggcaggctatgtatgggagggaaatacttatatttccctcttatttatgaggagaaaaggatatgagtatacggttgttaaacagtggtgtgatcattgggggaaaatatcagatcactgccgcattgggaggaaatccggtaggaatcacctatgcaggtactgcagtgcagactgcacagaaggtgattatcagagaatttatgccgcaggattgctgtgaaagagcggcagatggaagtatcatcaatgcagcagacgtttttgaacaggagaagcagaaatatatcgcaggtgcaaagattcttcttgccaatccgggacaggcagtgacacaggtatatgaattacttgaagaaaatggcactgtgtatacaattatggaatatgtggagggaatcagtctggatgcatatctgacacagaataagaacagattcccggtaggaagaatacaggttttgatacagcctctcctcgctgattttgctcgtttacaggaaatgggctttatacatggtaatatttcaccggacaacctgattttcagtaatgccggaagtctgaagctgacaggctttgggtatgtacagggaaaggtatcgctaaagtctgatgcatatgcagctgccgagatgttccagacacagcagccagtcagtatgtcagcagatgtttatgctctgtgtgcaagtatatacagatgtattacaggtgcggctccacaggaggcttacaggagaatgagtcaggatatgcttcagaagccatctgctctgggagtagagataccgaccagcacagaaagtgcattgatgatgggtatgaagctttctgcaaaggaacgttttcaggcaatgaaggcttttgcaagagcctttggtcaggcacaggctgccacacctgaaaagaagaagggaggcaatggtggaacgatagcacttattatcgttggatgtgttcttataataggattggctgttgctgctttcatactgtttggacagatgtccggaaaagaggcggcttctgacaatgaccagacagaagctacgacagaggcttcttcagagagtacaacagaaacgacagaagaaggctcagaatacaatcagctgctttcagaaggacgatatgatgaagtgatcaatcagatcgttacgctttcagaaactgccgatctgccggatgcaatgaaggaacagtactcacagattctgcagcaggcattggaagcgcagtattctgattttgagagcaaggttgcagacagcaggaattccaatgattatgacgctgtattttcacagattgcagaagaagaggatatgtataaccagctgcagtccaacagtctggcgtcagcgtatatagatatgcagaagcttacagataaacgtgatgaaatgaagcatgctcatgcagaatatcttatgaatgatgcaatctccgctgcagctgccaggcttgatgaaagcggtttgaatgatgcagcagcgaagctgcaggagtatgcagatgagggaattatcacgccggaagagctggaaaagagcagagaaagtgcttattccacctttgtgatcgccaaaataacggcttttaataatgcaggaactgatgcggagactattctgcagtatatcaatacgaaccttgcaaatacaggcaataacagccaggtactggaattctgggattattacaatgcgctgcttggcagaaatgtcatggatgctacaatcagacatcaatccggaaacggatatattcttgagtacagtaattcaactgagctgacaagagcagatattgattatctttcacagtacgaagtgaaattagcagtatatgaaatttttgctagacatggcaagattttcagtgatcaggcattaaatgagtatttccaggcctttaactggtatcagccatcttctgacttcgacgacagcgttctgaatgaatatgagaagcacaacctggatttactggtcagctatcagagaagcatgggatacagataa

SEQ ID NO: 68 - DNA, 8610 bp, unidentified
  source 1..8610: mol_type = unassigned DNA
ccctgcggcaagctggccaaaaagctgtgcaagcgcaccggcatgagcaaggtgtttttcggaaattccggtgccgaggccaacgagggtgccatcaaggccgcccgcaagtacagctttgaccactacggcaagggccgcgatgttgtgatcacgctggtcaacagcttccatggccgcaccattgctaccctgaccgccaccggtcaggaggtgttccacaactactttggccccttcaacgagggctttgtctatacaaccgccggtgacatcgagggcctccgggaactggtggaccgccatacctgcgccattatgctggagctgatccagggcgagggcggcgtgatggcgctggaccctgagtatgtgcaggctgtgcgcgccctctgtgatgaaaaggaccttgtcctcatcgtggacgaggtgcagaccggcgtgggccgcaccggcaccttcctgtgctgtgagcactacaacctcaagcccgatatcgtcacgctggccaagggcctgggcggcggcctgcccatcggtgccgttctgctgaacgaaaagaccgccgagggcatgggccccggcagccacggttccacctttggcggcaacccggtggtctgcgccggtgccaacgtggtggtggatcggatggatcagagcttcctggccaatgtcagtgagcgggccgtccagctgcgtgctggtctggccaagctgcccatggtcaagaacctttccggcattggcctgatggtgggcatcgagttctttggcggcatccaggccgcggacgtgctggccgcctgccgcgaaaagggcctgctggtgctcacggccaagagccgcctgcgcctgctgcccccgctgaccctgaccgcccacgatgtggaaaaggctctgggcatcctgaacgaggtgctgaccgagatggagcagaaggctccaaaggagcaggcatgaaacatctgctgaaaatgagcgacctctcccccgctgagctccaccacatccttgatgtggcggaggagctcaaggcagagcagaaggccgggacgaccccggcgctgctcaagggcaggagcgtggcgctgatgttctccaaaaactctacccgcacccgcaccagctttgaggtgggtgtctaccagctgggtggtctgggcaattacatgaatgccgccaccgagctgcagtccggccggggcgagcccctcaaggacaccgcccgggtgctgggccgctactacgactgcgtggtctggcgcacctaccgtcagtgtgatctggaagagtttgccgagctggccggtgtgcccgtgatcaacggcctgaccgactacgcccatccctgccaggtgctggccgacctgatgaccatccgggaacgccggggcacgctggagggccagaagctctgcttcatcggcgatggctgcagcatggcaaacagcctcatcgtaggcggcctgctggcagggatgcgtgtgacctgtgtctgccccgagggctaccgccctgccgctgacgtgctgatgttcgcccacaagtatggcgaaaagtttcacctgctcaccgaccccgccgagggtgtgaaggatgccgatgtggtggtgaccgccgcatggaacacggcccccggtacccccgaaagtgagcgccgcctgcgggatttcgcgggctttcaggtgaccagcaggctgatggagggcgcaaagcccgatgccatgctcctccactgcctgcctgcgcaccggggcgaggagatctccaccgctgtctttgaagagcacgccgacgagatctttgacgaggccgagaaccgcctccatgtgcagaaagccgtgctggccatcctgctggcaggtctgtaaaaacgagaaagagccccggggctgcagaaaattgcagccccagggctcttattgtttctctcagggtctgcggctcaggccggggccctcatcagacaccagagtaggcggagaagccgccgtcaatgggcaggcagataccggtgatgaagccggcagcctcgttgttcagcaggaacagcagggcacccaccagatccttttcgctgtcgccgaagcggcccatgggggtggcagccaggatcttttcggtgcgggcggtgggggtgccgtcctcgttgtagaggagccgtgcgttctgctcgctggcaaagaagcccggggcaatggcgttgacccggatgcccaccttgctgaagtgcactgccagccactgggtgaagttggtgacagcagccttggagccggagtaggccgggatcttggtcaggggcaggtaggcattcatgctggagatgttcatgatgttgcagccggggcggcccaccatctgccgggcaaaggcctgcgtgggcagcagggtgccgatgaagttcaggttgaacaccatctccacgccgctctcgtccagatcgaagaaggtcacggtgtcatcgtccagatccgccatctcgaagaattccttgtcggtgttggcccgggggttgttgccgccggcaccgttcaccagaatgtcgcagggacccagatccgccatcacctcctctgccacctgcaggcagttggccttgttcataacattgcaggtgtagcccttggccacgccgccttctgcctcgatcgcattggccagctccttcagcttctccatgttgcggcccagcagagccactttggctcctgcccgggccagagccttggcgaaaatggaacaaagggtgccgctggcaccggtgaccacggcaaccttgccggacaggtcggtgttcagaacattcttttccacgaggatactccttttttgatcagatggttgtggtgatacggatgattattttcaggcggacaaagcatcagaccctgccagcgcccttgtccaggatcttattgaactggaggaagaaggtggtggcggtcacggtagcggcgatgatgtcactgacgggctcggcaaggaacacgccgaacacggggttcgcgaccacatggggcaggatgaagatgagagggatgagcaggatgagcttgcgcaggcaggccagcagcaggctgaccttggcctgacccagcgccataaagctctgctggcaggcgatctggacaccggtggagaagatgcccgccatgtagatgcgcatggcccaggtggtgtaatcgatcagggaggcatccgaggtgaagatgcccgccactgcaccgggaaccagcatcatcagcagccagaagatggtggtgtagctcaggcagagggtcagctggaagcggaatgcctgcttgacgcggtctttcttgcctgcgccgaagttgaagctcatcaccggctggccgccctggcagatgcccgagatgggcatggtgcacagctgggaggcgctggtgatcacggtcatggcacccacggccacgtcaccgccgtagcgggccaggctggagctgaagctgatggacagcaggctctcggtggagagcatgacgaaggtggaaatgcccagtgccagcacgggcatgatgatcttcccttccagcttcatgtcctctttgcggatcttgaggatggtcttggggccggtgaggaagcggatgacccagatggcacccactgcctggctcagcacggtggcaatggcagcaccctttacgcccatgcccagcccaaagatgaggatggggtccagcacgatgttgatgaccgcgccgataacggtggtcagcatactgatcttggcaaagccctgcgcagtgatgaaggtgttcatgccaagcacgatcagcacgcagatggtgcccagaatgtagatgcggctgtaagccagagcgtagggcagggtggtgtcactggcaccaaacagccgcagcagggtgggtgcggcggcgtaaaagacgatggtcaggacaatcgagaagagcagcagcatggtaaagctgttgctgacgatcttttctgcctgcttcttgtcgccctggcccatggcgatggcggtgcggggcgcgccgccggagccgatgagcatggcaaaggcgttcagaagcatcaggatgggggtaaacaggcccacgccggtcagagccgccgcgccgatccccgagatgtggccgatgtagatgcgatccacgatgttgtacagcaggttgaccacctgcgccacaacggcggggatcatcagctggagcaggagctttttcacgtcacccgtgcccatatcctgctgttttttctgcgtttgtgccatggaaagtgtctcctttggtttgagcgagacggagagggctgccctcagaacgtcaggccgaagttcatctcgtagtagttgcctgcggcatcacggtaggcgtaagccttgccgttctcgtccttcatgctgtcgggcatgtaggcatcctttgcaaagccgggcacgtcgttggggctgatgcagacaccgtccgcgttcacagccagcacctcgtcgcccttgggcagggtcaggggcagcttgccaacgggagcaaagcggccgaacatcacatccagcgttgcggaggggtaggtgtcaaagccgacggtcagagcgtcggagaccttctccacattgccgacctcccaggccagcgggcagttgatgttggaaacgaccttgccgccgtgggcgtggaccgcagcagcgataccggccagacggtttgcgcccaccagagtggtctccttgtgggtctcggtggtgggtttgccgctctcgtccacgttgcagacagtcttgtcctcgcagatgtccaactccaggtagcccggggtggcgttgaagtatgcaccggactgggggctgaccatcagcagggccacctgggcctcatcgggggtgtccaccagagtgacattgcccagcatctcgcgcagggccttggtggcggcctcaccggcctcggcactcttgccaaaggcctcagcgtagaccttggtgccgtccttcaggggcagggtgccgtcgttcttcagcaggacaacggactcgcggtgcacgcgggaagcttcctcccagtcggccttggtggcaacgacctcggcggccttcctggggtcggcgtaggtgtcctcgaacataccctgacggaacagctcggtcagggtgcggctgacagcgcggttcaggctggcatcggtcagcaccagattttccttcctgaagccggcgggcaccgcgtgggtgtcgtagtagtcgttggtgccgcgggcgtagctctcctcgcccagctcgttgtccagcaggccggagatcaggtccacgccgctctgggtgacagcatagccgatgcgctcgggctcgtccagcatgtcaacgccccagcacatgttgtggacgatgccggtgtcggagttgatgtagcccttgaagcccatctggccgcgcagcaggccgtcgatgaacaccttgttgtaggcaaatccgtagggctggagctcgatggggttgccgttgaagtcctcctgcggagcgctcttctcggcgctgggcttggagtagtagggcatgatggactcggcattgtggcggatggctgcgcggaatgccgggatgtggtacttctgcagggagccgggggtagcgtagatgttccactggcctgctgcatagtgggggtcaaagccgttctcacgggcaccgccgccggggaagtgcttcacagtcatggaaacaccctcgggggtaacgccgttgctgccgccctggatgccggggatcaggtggtcgaagatctcctcaatgagctcgggatcctcgccaaaggtgccgaaggtgcgctgccaacgggggtcggtgacgcagtcggccatgtacatgtagcccttcttcaggccgcaggcattccactcgcggcggatggtgtcagcaaacttgtcgatgatgtcgatgcgtgcagtgcccttgacggcagcagcaatgcccagggtgccgggataggtggcaaacacaccggtggcatcgttcatgccgaacacgacctcgccgttctcgttgcggctgttggacatgacctgcatgggaacaaagtgatcacaggtctcggtcaggtactgcagctggttcaggtaatctgccagatcctcgggcgtggggctctcgcgcaggatgacgtggcggttgaagctcttcttgaccatgtcagaggtgctgggcagggactgggagccgaagatgctgtcggagacgttcacgggtgcctcgtccagcaggccgctttcgtctgccacgggcttgtggccgttggctgccagacggggggaaggatacttggggcccatgcgccagtcggaggtgaagatctggccgatcttctcgctggtggtcagaaccttgacataggcctcggcgcgctcagccggggtcaagcgccagtcgttgactgcgctgacggtgccggtgccgtcgatgtccttgaaatacaggccgtcctgctcgatgaccttgcgctccacggtgctgatggtggggccgttggggttctggtagcgctttacacgctcggatgctttcactgccatagtgttttctccttttcttttgaacgcagcggcccatgccacagagccgcagatgctatacctattataataggccgccgcgcggaacaactagaaaattttttggatatttccgcactttccttgtattctttttttgtgcgcggttagaatacaagcccgttttgtggaatgtgctgtactagtatcttgcaatcatgtgcaaaatgacgaacgctgttttttaaaactgttgatttcgcccaaggagagtaaaattgtcctgttttcccacaaaattttactaacagaaatttgagggatagttcataatgtatacataaaaatcccccggttcgcgatgtggcagccgcagcccacgggggaccgaatgaaaggccggagtgagtggcagcacaccggccgcagaattgaaaggagagcttctctatggcaaaggtcaaacagccgcttgaagaaaacggcatccacagagcgaaaatgtgggagatcatgatgtacgctctgaacaacacctccaccaacacctacatgatggtggtcggttacatcagctacttcctgatcggtatcgtcggtctggcatccgtgctggccggttccattgttaccatcatgcgtatctgggacggtgtcaccgacccgtttgttggtatgatggtcgataagaccaacggcaagttcggcaaaaaccgtccgttcattgtcatcggtcagatcatcatgttcgtcaccaccttcgtgatgttcaacttcatccccaagatgggcactggtgtccgctttgttgcgttcatcatcatctacatgatctacatcctgggctacacctgccagtgcgttgtcaccaagtctgctcagacctgcctgaccaacgatcccaagcagcgccccatcttcgcaatgtgcgataccgtgtacaacatcatcctgatgaacattgtcatccctgtcatcgttaccgacagcctggttcccaagttcaccctgactgctgagaacaacgctgccgagatcgcttctctggtggcacagaaccccgctctggcaggcatcgtggagaagtccggcggcagcctgtccgctttctacaaccccggcctgttcaccaccatgcagctgatgttcggcggcctgtctgcagtgtttgcagtctgcgccatcattgctctgtggcgtaaggataactccaagtacttcggtctgggcaccgcccagaaggtcggcgtgaaggattacgttgacaccctggctcacaaccgcgccatccagatgctggtggtctccgcatctaccgataagctgttcatgtccaccatgagcaactccactgttatgatctgcctgttcggcatcatcttcggcaactatgccgcattctccagctactctcagatcacctctatccccatcgctctgatctccatcctgctgatgaacaagatcgcacgtcagatgggccagaaggcatccatgatgaccggtacctatggcggcattatcggttctatcatcatcaccctgttcctggtctttgtgaaccccaagggcgatgctaccaagtttgcgctgcctgcattccgtatcatccgtcctgacacctggggcaccctgttcaacggctggactgctaccggcctgatcttcatcctgctgatcatcgcatggcgcggtgtgcaggctctgtcctcctccatcgttatcaccatgaccgctgactgcgccgactacgaagtctaccgtaccggcaagtacgtccccggcctgatgggtaccctgttcagctttgtggataagctggtctcttctctggcaaccactctggtggccctgttctactccatggtcggcttcaaggacgctctgcccgacaccctgactccgtactctgacggcatcttctgggcaaccatcggctgctttgtcctgctgcccatcgttggctggctgtgcaacgttgttgccatgcacttctatcccctgaccaaggagaagatggaagagatccaggctgagatcggccgcatcaaggctgaggctgctgcaaagcaggcttaa

SEQ ID NO: 69 - DNA, 10488 bp, unidentified
  source 1..10488: mol_type = unassigned DNA
tcaacctcttacatccaaaaattgtgcctgtccgtgaagggtcagtatctcggaatccgccgggacaaagatgcagtcacctttatagaaagtgatgctgccgccgtcgtaggaaatggtcccgcagccgttgacacagagcagcacacggaacgcaataccatctgcccggtagtgtactttctgccgccgttcggtattgacgatcatgcggtagacctcaaaatacttgcagcgggtcagcagttccgaggcgactccctgccggtatttcagcacacgcagcggctggcggggttcggcgctgcttttcaggtttgccacatccagcgccttgtcgatgtgcagctcccgctttttgccgtccttgcccacacggtcataatcgtacaggcggtaggtcaggttggagttttcctggatctctgccaccagcgcacccgcaccgatggcatggactgttccggcctgaatgaagaacagatcatccttgtggatggggactttttgcagatatttcatcaccgtgccgtctgcgatcgccctgcgcatctcggcctttgtgcagttttgcttgagtccgtagaccagcttcgcatcgcgtccggcatccagcacataccacatctcggtcttgcccagctgtccgttttcattttcctgcgcatactcgtctgtaggatggacctgaacggacaaatctttctttgcgtcgatgaatttgatgaggatgggcagagtgttttcgcctttgtgccgttcgcccggatactccggatgcgctctcagcacctctgccagctcctgcctcccgaactcaccgctcaccacatagcttgggccgtccggatgggtcgaacactcccaggtctctgccagcgggtccatatcgatgttcttttcaaattcgtcattcaaacggctgccgccccagagataatccttgccggacggtcggagcaaaagaggcttattcttgttttgcatagacgcctcccacagcacctcagtattccagttcgaacttctgcttgtcgtggacgtcgatggcttcgccaagctgcacttcgatgagcttcagctcggtctcggcgatgatggtgtggcggcagcctgcggacatggtgatgacgtcgcccgccttcacattctgctccatgccgtccacgacggtcttgccctcgcctgcaatgaccgtccagacctcgtcccggtgctggtggctatggtagttcatccggtggcctgcattcagggtcactttgatggtcatggaagccttgtcgatgtcgatgaccttgaagctgccccaggatttttccgcgaacatgacccgatggtcgagcatgttgacaaagggcttgatgtagctggactgctccttatcggacaccagaatgccctccgggctggcagagaccaccacatccttcaggcccatgcagaggatgggaacgtccagttcattgaccacgtggacattctcgcacttctcattgagcattgcctcgcctacgacgtggctgtccatcgcctcggtcagggtgttccaggtgccaaggtctttccaagtgcctgcaaagcgcatgacctcgatctccggctcatgctcgaccaccgcgtagtcaaagctgattttattgagggtgtcatacttattgaacaggtcctcgtagtccacgaaatcgatcagctcatgggcgcggttcagcacatagcccagcttgaacgcaaacacgtcgccgttccagagagcaccctttgcaatgtagtcctttgccacttcctgcgtgggcttttccttgaacatggacaccttgctgacctgctccttgccgatggggatgatgtagccgtatttctcgctggggtaggtcggctcaatgcccatcaggaccagatttgcactgctgacagcggcacggtctcccagtgctttcagtgcctcaaagtagtcgttctccacataggggtctaccgggcagacgacaacggattcttcctcaccgacgccctgcacgtccttcagataggcagcagccagcgcaatagccggggaggtatcccggcggcaaggctccacactgatgcccacttcctcgcccagctgattgcggatggccgagacctgagacttggaggtcgcaatggtgaccgttgcatcggtatcgaccgtcttgatttgacgatatacgcgctggatcatagattccagctcaccgtcttctcggtggaagatcttgatgaactgtttggagcgaatatcgttggaaagcggccacagacgctgaccggaaccaccggacaataacaccagattcataattttttctcctgtcatctagcaaaaaaggccgtggccctgcacggacacacgaccctttcaaatcgtttattttaacgctctgcacgcatcgggttgttcaggaagtcctcataggacaagcgcaggccgtcttccagctcggtcttgtaggtccagcccagattggtggccttggacacgtccagcagcttgcggggcgtaccattgggcttggtgctatcccacttgatctcgccggtgtagcccacgaccttggcgaccagctcggtcagctccttgatggtcagctccttgccggtaccagcgttgaccgtctcgttgccggagtagttgttcatcaggaagacgcacaggtttgcaaggtcgtccacatataggaactcacgcagcggagaaccatcgccccagcaggtaacgctgggcagattctgctccttggcctcatggaaacgacggatgagcgccggcaccacatggctgtgggtgggatgatagttgtcgttggggccataaagattggtgggcatgacggagatatagtcagtgccgtactgacggttcaggaactcgcagtacttcaggccgctgatcttagccagtgcataggcttcgttggtcttttccagttcgctggtcagcaggcagctctcctgcatgggctgaggagccatgcggggatagatgcaggaggagcccagaaattccagcttcttgcagccgtttttccatgcagaatggatggcgttcatctccagcgtcatgttgtcatacatgaagtcggccagagcctcctgatttgccacgatgccgccgaccttggcagctgccaggaacacatactccggcttctcctgcgcgaagaactcttccacagcgtcctgacgggtcaggtccagctccttgtgagtgcgggtgatgatattggtgtagccctgacgctgcagctcacgaacgatagccgaaccgaccatgccgcgatgacctgcaacataaatcttagcattcttttccatcataataagattgccttctttccaaattacagaactgccttgagtgccttttcgcgctttgcacgctcacggtcgtgcttggccatgatctcgaccagctgctcgtagctggtcttctgcgggttccagcccagaacggtcttggccttggtggggtcgccccacaggttgtccacatcggtgggacggaaccactgaggattcacgcagaccagcatcttgccggtggcaacatcgtagcccttctcatcaatgccggtgccttcccagcggagggtgatgccgttggcggcaaaagccttctcggtgaagtcgcggacagtgtgctgcacgccggtagcgatgacgaagtcctcgggcttatcctgctgcatgatcagccacatgcactcgacataatccttagcgtaaccccagtcgcgcagagaatccatgttgcccagttccagatgatcctgcaggccctcggcgatacgacctgcagccagtgtgatcttgcgggtaacgaagttctcaccgcggcgctcggactcatggttgaacagaatgccgttgacagcgaacatgccataagcatcgcggtactccttgaccatccagaagccatactgctttgcaactgcatacggagaatagggatggaacggagtggtctcacgctggggaacttcctccaccttgccgtacagctcagaggtggaagcctgatacaccttgcaggtcttggtcaggccgcagacacggacggcctccagcacacgcagaacgcccaatgcatccacatcgccggagtattcgggtgcatcgaaggagacttgaacatggctctgtgcggccagattgtagatctcgtcgggcttgatctcgcctaccagacggatgaggccggaggaatcagacaggtcgccgtcatgcagatggatagcatttttctcgatcaggtggtcgatgcgggcggtgttggagatggatgcgcggcggacaatgccgtggacttcataccccttctccagcaggaactctgccagataggagccatcctgacccgtgatgccggtaatcagtgcttttttcatgtgttttattcctctctcaaaaaacgatttatcttttgatgtattgagtatatttttatcgtacaattatattttatagattttggtggcttacctgaaatgctaaagcagtgttctattagcacaatattggtttttgtcaatcagctggtcggattgcttcttagctcgtcctgtttcactggcacctcactttgaaaggccaactgcctttcaacaaccttttccttgatttcagcgtagcctattgctattttatcactttctagtttattcgcttcctgctctcgaatcgccttctcgtttgcaacaatgattgtgttgaaatgctgattctcaacatagtcatttatacagcccagaccatcatgccgccactgaaagtttgaggtagacattccaccacctctaattcgccggaaaaatagcaacagggtggagtataattttcatttttagtcttatgtaggtacattttcgatttttccgttcatttttaggcaaaaaggaaagagccaccgaccatcagatcagtagctccaagagattcatttttctatttaattttcaaaaagctcactttttcgcttataagtgattttattcacttttctgggttcataagtgattatgttcacttatttcgttttatgtaattatcatggggtgacagaaaaactcacttatttaccatttctatacaagtgattataatcacttttttattgagataagtgagaaaaatcacttattctcctgccccggcgtttcccttcctgctggctgcgtttccgtagccgactggattctaaccaagctggcagcttaatcccctgctctttgcctgccttgcccacacgcccctcagacagcccctctgttggcttttactgccgaactgggattgttttgcgatgggctggcttctgcctgacgtggggcaactgtggggcttacagccgcctccagtatttttccgttttctatcggaatcgcatccaaaatgggaaaactcacaaggttctgttccgggaataattttccgtccagtctgtatgatcttttcatattccaatgggcatcctgatagatcattctggaaaaggccacacacttgatctcacagctgttggtttcattcagtcttgtcactcgatgcgcccctgcattctctgccttacatgcctggactgcaatctgccccatcttccagttgtacaaaaatcggtaatacgttggccatccaagtgcctccagcatgctgcgaaagatagtgattcttccttcattcgcattgaatgtcactcccagcatcccggaataccatttttgttctctttcctgcaatcttctcacctccaaaaaagggcgtactttcccccttgatattataaaattattttttagtcaagcccggtatcggggactgtccttcctgtcaaaactcccattgatacataaccatccatctgtcggacttctgattctcttaggtgttcttctacaggcacgccaaaagtacccgcaatatcatccgggtaaaatcccttccgagtatccacaggcttagtctcctggtctgctggctgttctgctacagtttcttcctttcgcttttgcctctcatggaagatttctggcacaagcaggtcaaaaacgtacagagtttccccttcaaaagtaatcctgtaccccagcaccttatatctacattcactgtcccagtccatttccttatagaccgactccgcaaaaggcttgcaactcatctttcggctcttacgcttatccggctttgcaatacaccagcgcagagcatccttatcattttcatcgcagccacgcacaacaatgcgcttcaaatcattattgaacataacatgcacataaaccacatcctccagacctgtgatacaagccgtgttgaatgtgatactgtccttacggattacgatcgcagggtcacgaagatgtgcaaacagttcctttcgcacgacctggtatccgtcatatgaaaaagtgttctgccgttcttctgttcgtgcatccctctcattttctactgtctgctccgtcagtgtggtcgtacttgtgtattcctcattcattcgtgtcagtccatccttccattatttcttccgcctcatggagcagtttattcaaaccatctgcggtaaatgtattcatttctttaatttctgctgccggccggagtacatcccaatttcctgcataatgctcctgctgcaaaatgccaacctgtgcaatacttgtgattggctgtccaaaagttcccgcccattctggtggaaaaatgtaaatcatctgtttgaccgttttgccctcggcttcctcttctttcgatggcagaacgatttcctctattttgatcatctccggctcatccagttcaaaaagcatcagcttattgtccccttgttccacaaactgcccccggaaacgatacttcaaaccctcttcccattccataatgtcgaaaagtgtcttagccaggccacgacagccaagtgtacttgcacaccagcgtccctctttcagccttccccagtgaatagcattcggattgcccttttcgcatggccgaatcgcaacacagcggtcaaccgagttcagaagcagttccacatactccacatcctcaaactttttcagacaggaagtattgaaccgcagcttaccattggagattgtcattgccgggttctgtagtgtagaaaaatactgagcccgtactacctcatatcccgatagattcagtcggttcatgacctctgcgttattctcttgctcttcctgcattacactttcaggaagcctcccggtattcctctgccgagaaaccagtccagtccttatcaaaaggcacatatcctcgaagaataccatcatccaccacactcagaaccgacaacggcctatttttttgtatagttgcgggatgccctcagatgattggctgcattataaacctctctggatacaatcgcctcatggtgatccctctgtcgatactgcgtccggtcattgttatttttctttgacttatgtgtaagaaagtttggcgtgaaagtctttcttgccagcacatccccacagtggcgttcatttgcaataacgccaactatggtacccggattccattctgtattacccagcttggttttacggccgtactcggtcaaaagttctgcaatctcagtatatgaaaagccattcaggtacagataataaatgaccctaaccgtctgtgcctcactttcatttaccacaagattgccatcctcgtcctgatcgtatcccagcaatgccggtgtcaaaaacagacctcggctgaaccgccggtcaatagaccagttcataataattgatttggaatgaggttcttcctccgccacagatgccagaatggtcaggatcatgcggccattgctgtccagcgtatagatattgtctgcctcgaattttacacccacgggcggatcaagatttttcagcgtctcaataactgaaaggcagtcaacaatgtttcgggcaaaacgagcgatggattttgtaagaaccaggtctatctttcccgccttacagtcctcaatcaactgctgcattcctttgcgatgctccagtgaagtgccactgatgccctcatcgtcatagatgccgacaaattcccatccgggctgtgcctttatatactctgtatagtaatttttctgaagttcataggaagaagtctgctcatcattgtcagtggaaacacggacataagccgcaacacgccgaacagaggtgctttctccaaacccctccaccgcctttgccgggataacttccaattcagaagcatccacccccttatatctgtctctgattttctgcttgcggtctaccgcctctactccactgcttcccatgtacttcctctcattcttccggccttatgctccaataccactggcccatcttccgataacttcggataccgaactcttttttgtattttctgctgtcctgcgactgataccttcatcgctcatccgcatatagatttctctggatctcatatctccatcggaaagcagtttcttgatcagatccgctgccttctcagattttgattcaaacttcggaggctccgactctgcttccgggtcagttggaatcttacactctagccatcgaaagccctcctcggccgttattgagaaacgaatctctccatcagatggagccagattgttcttaatctgtcgcacaatgcgaatgtctttgttttccggagcatgctccatttgcagaacacttctggctgctgccacaacatccacactaccaatgctccggtacaaatcttctgtcccctctttcttgttgaggtgaccaatcaatacaactgcacagtcatacgcagatgcccacattccaagacgctgcatcagctttctcgccctgcctgcaatctgaaggtcagaatcactccccagatatgcctgtatcgggtcaatgaccaccaactttggacgaaattgtataatcgcctttctgatacgttcatcatcaagcgtcaagccactattcatttcttcatttataaaagccacattcctacaatctgtgccacatgtttccagccttggcttgatggtatccgaagcatcatcttccgaacactggtaaatgaccttctgcggtatcccgacttgcttaccgtccggcattgttccaccttttgacaactccgcaatcagattcatcatcatggtagactttccgtcaccggggtcgccttgcagcaatgtgatcttcccgactgcaatgaacggataccacaaccaacgaacagctgttgcttctacatcactatataatgtgaaaattcctgtttcctctttacctgtcattccctttgcctttcatttgcagtctttttctacatttatattataagagctgtatgatgttttgaccgctacctattatgtagcaaaacagccttagaccacataacagatagggggataacactttgcgatcttaaaactctctatatattcagttcccccctgaaaaactgacacggtagaccgcctgaaaacaaaaaagccgaggtagactttggacaaccttatataaggtcatctaaaagtctacctcggcttactacgtattcgagcagcacctacaggcagtatcgaaaaagtcatgctggctcacacatcctgcggtgagtcaagctcgttacattttttgtcagatacatttttcctctgacgaatctgtaaaattcattcgcggcccagaatagaattgggatgcaaaatcatccatataggcataggattgcaaatgtccattcttcacataggctatcgcatctctcccattcaccgtggctcggtttcccagcagcacctttttaccttgggtcgtataaattccgtaatccatagccgtcctccaattcacaacttttcattgtttattctacatctcgctcttgacaagttgcgctccatgcgttaatataaatatgcaagttgcgtttgcgaacacattatacgattcaacttgcgtcatgtcaagcgcaacatgaaaagaatttgcaatcatcatggaggtcatcattatgaaattcggggaaaaggttcgagctgcgcgcctagcagcccactattctcagcgtcagcttgccgatatgaccggcatcgctttacgcaccatccagaactacgaaagcggcgaacgccttccgaagcagaaggaaagctatgagctgctggccgctgcacttaacgtggaactggaatccctgaaagatgacaacgcagactttgtgatcaaggctaccgagaaatacggttcccgcggacatgagcaggctgaacgacttattaaagaagtatctggcctttacgctggcggtgaactcgccgaagaggacatggatgccatgatgaaagcgattcaggaggcttactggattgcaaaagaaaagaaccggaagttcgtgcccaaaaagtacagaagcacttccgacagcaattccgattcataa

SEQ ID NO: 70 - DNA, 8637 bp, unidentified
  source 1..8637: mol_type = unassigned DNA
gttgcggtttaccgtttcgtgaacctgatgggacacagccgccccaagtacaatagtgccgtcagcaccttctgctgggcagttgccaatgatgagcccttcaccgtcaacgaccgcagcaccgagctggagctgttgtacatcgacgaccttgtagaagggatgttcgacctgctggaaggcaaggagcagcactgtgaatttgacggcgtggagactgttctgaaagcggatggtcgctactgctgtgtgcctgttacccataaggtaacgctgggcgaggtcgtggacttgctgcaggagttcaaggcacagccgactacgctcatgatgcccaaaatgccggacggctccttcgccaagaagctgtactccctgtatctgacctatttgcccaccgacaaattcaagtatgctttgaagatgaacgtggacaaccgtggctcattcaccgagttggtccataccgccgactgcggacaggtgagcatcaacatcagccgccccggcattaccaaagggcagcactggcacaactccaagtgggagctgttcattgtagtggctggtcacggactgattcaggagcggaacatcaacaccggagaaacggtggagtttgaggtttccggggacaagattgaggccgtccacatgatccctgggtggacacacaacattatcaatttgtctgaaacagaaagcttggtgacggtcatgacctgtaacgagatttttgacccgaatcatccggataccttcttcgagccggtgtaagaagagatttataataaacataaaaaagatatatcgaagctttctaaaacattttcgtccgtatgagtatatggagaaagttgggataaattttccacggggggttcatatttacggaaaagtttcatggaatactgaaccgtggttaatcacttttggaaataatgtgcatataacagacggcgtaaaatttattactcatgatggtggaacattgatctatagacaatatatcccagatttggagattacaaagcctatcacaattgggaatgacgtctatatagggaataatgtgataattttgccaggtgtcacaatcggaagcaatgttgtgattggtgctggggctattgtgtctcataatataccggataattctgtggctgttggtgtgccagcaagagtgattaaaacagcagatgaatattttgaaaaaataaaaggtgaatctttgcatttgggtcatttaaagggacaagaaaaagatttggccttgatgaagtattatgcttatagcggtgagtcaaaagggatttatttctaattgtgtaaacttaattgaatttttccatggaggaaagggcagatttaatggctgattatagcaatgtatcttttaagaataatggcaagctgaagctgctgattatcgtcggcacacgtccagagattatccgtctggcggctgtcatcaataagacccgcaagtattttgatgtcattctggctcacactggtcagaactatgactacaacttgaacggcgtgtttttccatgacttgcagctggctgatccggaagtgtacatgaacgcaatcggtgcagatcttggcgagacaatgggcaatatcattgcagaatcctacaagctgatggttgccattcagccggatgctgtgttggttctgggcgacaccaacagttgcctatccgtgattggcgcaaagaggctgcacattcccatcttccacatggaggccggcaatcgctgtaaggatgagtgcctgccggaagaaaccaaccgccgtatcgtggacatcatctctgatgtgaatatggcttattctgagcatgctcgtcgttatctggctgatactggtttgcccaaggaacgcacctatgttaccggttccccaatggccgaagtgctgcatcagaatctggccaagattgaggcatccgacatccacgcccgtctggggctggaaaagggcaagtacatcctattgtctgctcaccgtgaggaaaacatcgatacggagaaaaacttcacttctctgttcactgctatcaacaaaatggccgagaagtacgatatgcctattctgtactcttgccatcctcgcagccgcaagcgtctggagcagagcggattccagctggacaagcgtgtcattcagcatgaaccgctggggttccatgactacaactgcctccagatgaatgcattctgcgttgtgtctgacagtggcactctgccggaggagagcagcttcttcaccagtgtgggacatccgttcccggcagtatgcatccgcaccagcacagagcgcccggaggcactggataagggcgacttcattcttgctggtatcgatggtgatcatctgctacaggcagtggacgttgctgtcgagatgaacaagaaccgtgattttggtatcccggtgccggattatgtggatgaaaatgtgtccgataaggtcgtcaagattatccagagctacaccggtgttgtcaacaagatggtgtggagaaagtgatgaaatgagaaaattgctctcgacaaaacgaaaaattcctattgaagcaaagtcggcagctgtatatacactttcaaccttgttttcaagaggtctagctataataacagttccgatatttacacgattgatgacaacaagtcaaattggtgttgtaaatctgtataattcatggtattcgatgataagtgccattgctacgctatcgttaacttcaggtggatatgttgtggcacttaaagaatacgaaaatgaaagggatagatatcaatcttccgttctttccctcacctcgctcattgcatttttaattgcatgtatctatgctttagctccgcaactatggagtagtatattaggacttccaaatgaactgattattcttatgcttataggatttctatttgctccagcgagagacttttggcttgctaggcaaagatatgaatataagtataaattgtcaggcttggttatgatggggtcagcattaattgcgtcggctctttctattgcggctgttatagaattaagcgccgtaaatgaatcaatagttgctgaaggacgcctattcagtaactatctggttatatatggcgtatcggccgttatatggatatgcacttttgtaaggggaaagactctttataatagagaattttggaaactatctcttacattaagcttgcccttagtaggctattcggtagcctctcaaattcttaccgtttcagatcgaatgatgattagtcagatggtgggaaacagtgcggttggaatttatagtacgttatatacagtgagttctttgtcacttttggtatggcaggctgttcattcttcctttgttccgtatatattcaggaatatcgaaggcgataataaaggaattaaacgtgtttcggttcaattgatgtctttttatgccgctgtcgctgttctgatgacattcttggctccagaaatagtgaaaatactagcaacggaggaatactatgaagcaatttatattatgcctccgattgcagcaggtgtgttttttacatcatttgccaatttatattcagatattgccatttattataaaaaaacaaagtatgtaatgtatcccgcgattattgcggcacttaccaatttggttttgaactacatttttataaatctgtatgggtacatggccgctgcatatacgacactcttctcctatattttatttgcactttttcagggaatctgggcgagaaaaatatgtaaagagcatggaatgagaaagggtactatttacaatgacaagtttatgattgttcttgctataattacgacgcttatttccttgtcaggtattctgttctatggaaatacagttttgagatattgtgcaattgtttttatctttacggtttgtatcgtcgttggcaagaaggtcttactgaataaaaaatctgaaaaaaagaaggaagcacaatgaaaacaattttcataaccggttcgtccggcttcatcggttcaaaccttgccaaacgtctactgactacagaacctgatactagggttattggtttggacaacatgaacgactactatgatgtccgcatcaaagaagctcgtcttgctgaacttcagaaatttgaggactatacctttataaaaggaaaccttgcagacaaagccctcatcaatagcatctttgagcagtaccatccggacattgtagtcaaccttggtgcgcaggctggtgtgcgttactccataaccaacccggatgcctacatcgaaagcaatatgatcggtttctacaacattctggaagcctgccgccattatccggtggagcatctggtgtacgcctccagctcctccgtctatggctccaacaagaaggtgccgtactccacagatgataaggtggacaacccggtttctctgtatgcagccaccaagaagtccaacgagcttatggcacacgcttattcaaagctctacaacattccctccactggcttgcggttcttcacggtatatggccctgcgggtcgtccggatatggcttactttggtttcaccaataagctggtcaacggtgagactatcaagatttttaattacggtaactgcaagcgggactttacctatgtggacgacatcgtagaaggcgttgtccgtgtgatggcaaaagcgccggaaaagaagaatggcgaggacgggttgcccattcctccctatgcggtttacaacatcggcaattctaacccggagaacctgctggactttgtgcagattctgtcggaggagctggtgcgtgccggtgtgctgcctgcggactatgatttcgaggcacacaaggagctggtgcccatgcagcccggcgatgtgccggtgacctttgcagacacggaaccgttggagcgcgacttcggctttaagccgcatactccgctgcgcgaaggtctgcgaaagtttgcagagtggtataagaatttttacatggcctaaagccattagcgcaggggctccctgtggggaaggaatccaaaatgaagtgcgtagaagtgtatgaagacctctaccatcaggaaccgtatggagtcgctttttgtccatatcgcatcagcccgttgggggcacatattgatcaccagtatggcaaaatcaacggtctggcaattgataaaggcatccacatggcctatcatccaaagcagaacggtgttgttgaattacagtctttgaactttccgaagcgtgcacagttctttgttggcgatgtgccggaagaaaagcagggtgactgggcggatcatctgcgcggtgcagcaaaaatgctgggtgagaagtatcgtcttaaagttggtctgtcgggcatcatcgaaggtagcttgccgattggcggcttgtcctcctccgcagcggttatcatttgtttcctgtcagcactgtgtaaagtgaacggcatccatctggaaccgttggagatgattctcacggcaaaggcagcggaaaaccagtatgttggcgtttcctgcggcaagctcgaccagagctgtgaggtgctttccaagaagaatcatctgctctacctcgacacgaaagacgatagttatgaacttatccccacaagcgagaagatgaaaccctataaagtggcaattttcttctccggtttggagcgttctttgaagaactctaagtacaatctgcggcaggacgagtgcaaggcagcggcctatgcattgatgggctatgcaggtatggactatgacacctttgcaaatactcggctgcgggatgtgccttttgaggtgtttgagagttataaggacagactgccggagttgtggcgaagacgcgcggaacattattacagcgagtttgctcgtgccgaaaaaggtgcggaactgtggcgcaaaggtgatttggatggttacggtcaactcgttttcgaaagtggcaagtcctctatttacagctacgaatgcggctgcgatgaactgaaaaagctgtatgagattatggctgataccgatggcatctacggtggccgcttctccggcgcaggcttcaaaggctgctgcatggcactgatcgacccgggcaaggccgaagagattgaagctaaagtgggttctgagtatctgaaagtgttcccggaactggaaggaaaatacagcttccacctgtgcaagagtgctgacggtgtggaactatgaagctgaattctgtccatcatattgcaatcatcgtttccgatatcgaaaaggccagagaattctatatccagaagctcggttttgaagtgattcgtgagaattaccgtaaagaacgagacgattggaagttggaccttcgggtggatgaacacacagaacttgaaatctttgctgagaagaatccaccgaagtgggtgaaacgaccggaagcttgcggtttgagacatctggccttccacgtagaaagtgtagaaggaactgtgaaagaactggccgagatggacattgaatgtgaaccgattcggacagacagctatacaggggagaaaatgactttcttctttgatccagatggtttgccactggagatacatgaataggagaacaggaagatgaaatgtttgattctggcggcaggttatgccacacgcctttatccgctgacggagaattttccgaagccgctcttgaaagtgggagaaaagtccatccttgattggctggtggatgatctggtggacaccaccgatattgacgaatttgtggtgatttcaaaccataagttcgcgcatcactttgaggattggaagaacaataagcaaaaggtacgaccttatgcgatcacggtgattgatgatggtaccagcaccaatgaaacgcgactcggcgcagtcaaagatattcagctggcagtcgaaaagctgaacttgacggatgatctgctggtcatggctggtgacaatgttctggattttagcctttctaagttcgtggagttcgcaaaggaaaagaatacctcctgcgtgatgtgccacgaggaaaatgaactgaaaaagcaacaaaagacggcgattatcacgctggatagtaatgatttaattgccagctacgaggaaaagccgcaagacccgaaaggcaatctggcagtgccgccgttctattgctaccgcgcctgcgatgtaaagtgcattcaggaagcattggataacggatgtggttacgatgcaccgggtagctttgccgcatggttgagtaaacagacggaaatgcacgcctatctaatgccgggaaaacgctatgatattggggatatcaacagctatgagtatgtgaaaagcgtgttttctaaataaaaaaagaggaggaagaacaaatgaaaattgcagttgcaggtaccggatatgttggcctatccatcgctacgttgttgtctcagcaccacgaggtcatggcagtggatatcatcccggagaaggttgagctcatcaaccacaagaagtcgcctattcaggacgagtacattgaaaagtacctcgcagaaaaagatttgaatctgacggctacgctcgatgcagaagccgcttataaggatgcggacttcgttgtcatcgcggctcccactaactatgacagcaagaagaacttctttgacacttctgcggttgaagcagttatcaaactggtcatccagtacaatccggatgccattatggtcatcaagtccacgataccggtcggctttacggcctctgtgcgtgaaaagtaccattgcgataacatcatcttcagcccggaattcctgcgtgaatcgaaagcactgtatgataatctctatcctagccgcatcatcgtcggtaccgatgtggagaatgctcgtctggtgaaagctgcaaatacttttgccggtttgctgcaggaaggggccatcaaggagaatattgatactcttatcatgggcttcaccgaggccgaggcagtcaagctgtttgctaatacttatctcgccctccgtgtgtcctacttcaacgagctggatacctacgcggagatgaagggcttgaatacccagcaaattatcaacggcgtctgccttgacccgcgtattggcagccactacaataacccgtccttcggctatggtggttattgcctgcccaaagataccaagcagctccttgccaactatgcggatgtgccggaaaaccttattgaagcgattgtggaatctaaccgtactcgtaaggattacattgcagaccgtgtgttggagattgctggcgcatacgaggcaaatgaggactatgatccgagcaaggagcacaatgttgtggtcggtgttttccgcttgaccatgaaatccaattcggacaacttccgccagtcttctattcagggtgttatgaagcgcatcaaggccaagggcgcaacggttattatctacgagccgactctggaaaatggcagcaccttcttcggtagtgaagtggtgaatgaccttgaggagtttaagaaacgtagtcaggccattattgccaaccgctacgatagctgtttggatgacgtgcaggataaggtctacacccgtgacctgttccgcagagactaa

SEQ ID NO: 71 - DNA, 14816 bp, unidentified
  source 1..14816: mol_type = unassigned DNA
ttatacaaccgtcacaacacctatttcaacttgattattgattctggggatgaatacggtgttgctcagacctgcgcagacaatcatttttgtgccgtcaaggtcaaattcgcctttgtcatatttcggaaaaagtccctgattcggagcgattactccgccgatgaacggcaattgaatctgtcctccgtgggtgtgaccgcagacgattaagtcaatgtcggttttctttgcgtcctcggcaatgtattcgggctggtggtgcagaagaattgtgaaattgttctttgctttttcggcaaattcttcccacagcgttcttgacggaacatcgtcatcgggagtgtagaactcataataagggtagtcgctcattccgccgataagcacactcttgccgtttttggtgaattttatgtattcattatcgagcaatacagcgcctgttgaatttgtttcgcttttaaaatccgttccgaatttggcggcattgtcacgctcatggttgccgagacagcagtatgtgggtgcaatttttgaaagcttttcaagcacatctttcatcttcgttgtgtcgggatcgccacggttgaccatatctccgcaaactgcaataaaatcgggattttgttcctttacaagctctgcaaggtctgcgttcttttctccgtattccttgttgtgcagatccgtgatgacaacaaatttcagctttgcgtcgttcttagtattgtttacacagtaatttgtgattgcaattgtgttgtcacagtaaacgccccatattacgagagtcacaaacagcacaagtattattgctccgaggattatcgaaaaatttttcattcaatttaccgcccatattaagtatggtattattttaggctcgttttgtgcggttgtcaacaaatgtgtgtcgaacaagtccgattattactgttccttgtgctttgattgtcggattttaagttgatttaggaattgctttgtttgacattccttttgcactgttgtataatgaatcataattgtatttatatgttactcgggaaatttacacaaagttaaacagaagaggtatgggttatgaagaagattaatttgcgtaagatgtttctggctctcgcagatgtgtttattatcgttgtcagcggtattcttgcaaattatattctcttgcttgtcggctacataggtgctgcttcaagcaaaggcttgttgagctatattgttattgatcttgtcatgtgtctgtttacgctttatataagcggaacatattcaaaattgtggcgatactttaacgcaaaggactatatggtgtgcggaactgccgtcttttctgggtttacgctcggctttgtaatctcgttgtttttgcagattccgcagagaaagattttttgtatagtacatttcgcaatagcccttgtcggaattcttgcattccgttttgttttcagaaggacttttcttgaccttaccgaggcaggaagggcagagggcggagagcgcacccttattgtgggcgcaggcaatgccggcagaatgattgttcgtgaaattcacaatgcgaaagagcagggtgatgttaataatccttcaaaaagcatcattccggtatgctttgtcgatgatgatttgaaaaagctgaatcagaaaatcgaaggaatccccgttgtcggaacctgtcccgaaattgttaaaatatgtgatgaataccgtatagacaatattattgttgcagttccgtcatgtgaggaagatgagaagaggaagattcttgactactgttccgcaacagagtgcaaaatcaagattatcccttatctcggtgagcttttgtttgatgacgggcatacacagcttatttcacaggcaaaggaaatcaagattgaggatcttctcggcagaaaacccattgagtttgaccgaaaggagattcatgaccttatcaacggaaaggtttgtcttgttacaggcggcggcggttcaatcggcagtgagcttgtaagacagattgcaaagaatgatccaaaacaaatcatcattgttgatatctacgaaaacaacgcatatgacattcagcaggagcttgtgcttgaatacggcacaaagcttaaccttgtaacgcttatttcatcggttcgtgattacgacaaaatggagcttatcttcaagacatatcgccccgaactcgtattccacgctgccgctcacaagcatgttccgcttatggaaaccgttcccgaggaggctgtaaagaacaacatctttggcacattcaatgttgcaacccttgcagaaaagtacaaggcaaagaagtttgttatgatttcaaccgacaaggctgttaatccgacaaatgttatgggcgcaacaaagcgtgcgtgcgagatgattattcagtacaaggcgcagcacagcaccgataccgaatttgtaacaacaagattcggtaatgttctcggctcaaacggctcggttattccgctgtttcgccgtcagattgaaaacggtgcgcccgttaccgtaacacatcccgatattatcagatatttcatgactattcccgaggctgtttcgcttgttcttgaggcaggtgcaatggcaaagggcggtgagatttttgttcttgatatgggtgctcccgtcaagattacaacccttgccgagaaccttatcagaatgtacggtaaggttccgtacaaagatgttccgattatctttacgggacttcgtccgggtgaaaagctttttgaggagcttcttatggacgaagaaggtcttaagtcaacacagaacaagaaaattttcataggaaatcaaattaaaatagacgaaacagatatgctgtcaaagcttgaggttctcaaaaagaccgcagaaaacaatgacagtgaaaagacagttgaacttttggcagaacttgtacctactttttgccacaaggtcaatgattaaccgaaaaggagaaattttatgtgcggtattgtaggttatgtagggcctaaggattgcagtgaggtgcttgttaatgctctcacaaagcttgaatacagaggctatgactcggcaggtattgcggtttttgataacggagaaatcaagaccgtaaagaccaagggcaagcttcaggacttaaaggataagcttgcagaggtcggcactccgaaaggtcatgtcggcataggtcacacccgttgggcaacccacggcgagccttcggatgtaaactcacatccacacagcggtacaagggttacaatcgttcacaacggtattattgaaaactatatggagcttaaagacttcctcatctcaaagggaagaacttttttaagcgacacagatacagaggttgttgctcagctcctcgactataaatacaacggaaatcctcttgaaacaattgacagtgtaatggctgagcttaagggctcgtttgcactcggaattatgttcaaggatttccccgacagagtttttgcggttcgccgtgaaagtcctcttatcgtaggcgttgcagagggtgagtgctttattgcgtccgatgttcctgcaattcttcagtacacaagggattattatcttcttgaccatgatgaaatcgtaacactttcacctgacggtgtttcgttcgttgacgaacaccttgatccgattgaaaaggaacttcagacagccgactgggatatggaggctgccgaaaagggcggttatccgcactttatgattaaggaaatcaacgaacagcccgaggctatcagaacaacgattatgccgagaatcaaagagggacttccgttccttgaggaatgcggcatcacaacggaaacaatcaagaatttcaaaaatatcacaatcgttgcctgcggtactgccatgcacgcaggtatggtcggcaagtatgttattgaggatatcgcaagagttcccgtaaatgttgacattgcgtccgagttccgttacagaaatccgattgtaggcgagggcgaccttgtaatcatcatttcacagtcgggcgaaacagccgacagccttgccgcaatgcgtcttgcaaagcagaagggtgccaaaacccttgcaatcgtaaacgcaaagggcagttcaattgcccgtgaggcggatatgctcatctacacactcgcaggtcccgaaatttccgttccgtcaacaaaggcatacatcacacagctttccgttatgtatctctttgcctttgagcttgctcttgcaaaggaaacaatcagcacagccgagtgcaagcgacttgtttcggctctcacaaaaatgcctgaggcagttcagtatgtaatcgacaactgcgaggatatctgcaagttcgttgccacaaagcttgttgcaaccgacagcttgctttacataggcagaggtcttgactatgccctttcaatggagggttcactcaagctcaaagaggtttcgtacattcactcagaaagctacgccgcaggcgagttgaagcacggcacaatttcgcttattgacgaggatgttccggttatcgccgttgcaactcagacaggtattatccccaagacaatcagcaatgttgttgaggttaagtcaagaggtgcaaaggttattcttgtttgtacagacgcctgtgtaagagaactcaaggacggtgttgcggattatgttatcgaaattccgcatacagacgagcttcttatgccgattacagcggttgttccactccagattcttgcttattacacatcaatcaacagaggtattgatcccgataagccaaagaaccttgctaagtcggttactgtagaataaacggcggtcttgtttttaattgaaaattgaaaattgaaaattgaaaatttcggttggcggtgtgccaccgcagtcaattcgagaagatagtcagataaagaaattgcattgatgcccgatacggcattgatgcaatttttgttttatatgaaagtgaatgtttatttatataattttaatttgtacaaatctttgcgtggttatctgcaggcggataatatccgtacatacagttttgcaacaacttccgtatataccgaaaatatacaaaaacagtcgggcgagaatgttttgcattcttgcgaattgtcttctcgaccataattttccattttccattttccattttccattttcaattttatgcacgctcaggcgtaatatgttctttaatatcatactgcattcacgaatagggtactcttgttttcaaatttaaacggtaaaaaccttgtatttttttgacagattatgtataattaattagatatacattctaaaaagcagtattgatgaatctaatttagtttcgggggaatatacggacatgatgaaaactgtttttaaaagagctgtaacgcttgcaatttgtgccgtaacggtattttgcggtatttttgcctgttcaggcgcaacaaaagattacgagattccgcagattgacgatatgacgctttcaatgcctgacggtatgagcgctgttacaagggacagtaaaagcacagataaatatttttctgttttcggtcttgactatgacacaacaatgaaaacctttcagaacggaaatatctatcttcagggtatggataatatgtcatcggttattctgaccgtgacaatgacaaaaaatgagagcagcgagaatgttggcaactatgctcagctttcttcaagcgagcttgcaaatatacgcaacaattttcttaattccgacgagtatcggagctgtactcccgaccaaaaagaaaaagttgtgtggcttgtgtttgacgcaactgctcagagcagtaagggcgatgtgaaaacctttgttgccaacacggtttatgacggtatgaacattaatatcacaatgcagagaacagagggtgatgttacaaccgttgactacgatactttttccaaagttgtatcttcggtaaaattcagcgacttgccgttttcaaagggatttattccgtacataatcatcggcggcggtgttgttatccttattttgattgttctcatcataatttttgccgtgagaatcagaaagcataaaaaggctaagaagaataacgctattcttgaggagcttgcagtcaagtataaactcggtgaaaagggtacagactacgacattgacaattttgacgattctcccgaaaagcccgataaacactcaaagaaaaagcagagatatgcggaagaggttgaagaagaaccggcttcgccgggcagaagatatgctcccgagccgataatcgaaaacatggaagaaccggaagaaattacaagtgagtattcaaactttggttatgacacggatgatgccaaggaaaaagaaattgacgagataatcaactccgcgaaggcttacaagagtgagcttgagcgtgaggcatataaaaacaactacggttacgaggaaaacagcacggaggacgaaaaaaaaaaggagcctaccgcagcagatacctcagagactgaacccgaaaaaattgacgaaaacgaaaaagataacgcagaaacacctgaaaaatacgaggacataagctcttcgtcgggtcctacactcgttatccccgaacccgaacacgatctttttgaaacaagcgagcctgacgatatcgaccgtgaggacgatgccgatgttgaagaaaccgaggaggtttccgaacaaaagcatccgcttgaaaaaaaggttgacgagtacgcaaacatcattttcggcagcgacgatcccgaagaggaaaccggggaagaggttgatgacgaggagcttgtaagggcaaaggctaagaaaaacaagtttgacagcggttatgacttttttgacgaagctcccaaaaagtcaatgggggttatcaaaagctcagacctcagagatgccgaggacgttgatgttatcggcgaggttgaaagaaaagcagaaaccgtaaagcagaacgctcttgaaaaagagaataataaagaaaccgagggtgaaccgaatgataaacggtcaacggaagaggttcttgccaatgtaggcaaaaacatcggtaacgctctcaggagctttgcaggcggagttaagaattttggcattcactgcggatatttctgcaagaatgtttcaataatgataaagcataagcgtgcgattgccaaacgcaaaaaggcagaggaagagagaagagagagagaaagacaaaaggcagagcgtgcaagaatgcgtgccgaaagaggcgaaagtgacggacttgttcaggttcacagcagaaccgaccgacgcccccagcagaatcaccgccctgcaaacagaaacaagagaagataatttcttttcttaacggaggaaaaacatggaaatgctaattaaaaacgcagtggttgtttcccctgccgacaagcttaacgaaaaaacagatattctcataaagaacggcgtgattgccgaaatcagcagcggcattacatcagacggggagattattgatgcagacggtctttgtgccgttccggggtttgttgatatgcatgtgcatcttcgtgatcccggtcagactcacaaagaggatattatcacgggatgcaaggcggctgccgcaggcggtgttacaagcctgcttgcaatgcctaacaccaatcccacaaccgacagccccgaaattgtaaagtatattcttgacaaggctaaagacgccgacagccgtgtttatgttgcggcaagcgttaccaaggggcttaaaagcgaagaacccacagacattgacgctgtgaaaagtgcaggtgcaatagcacttaccgatgacggcagacctgttgaaaacacaaagtatttgagtgacgcaatgaaaaaagctccaaagctcggcatgacaattgtcgcacattgcgaggacttgtttcttgccgacggcggtaaaattaatgagggcgaggtttcggaaaagctcggtgtcaagggaatccctgccggtgccgaggactgcggaactgcaagagaaattgcacttgccgccgctcttaatgagcctattcatatctgccatgtcagcaccaaaacaagcgttgcacttatccgtgatgccaaaaggagaggtgttaaggtgaccgccgaaaccgctccgcattatgtttcgctcacggacagggagcttttaagaggtgacgctgattacagaatgaatccgcctctcaggactcaggctgatgttaacgagattatcaacgggctttgtgacggtacgcttgatgccatagcaaccgaccacgcaccgcacacacccgaggaaaaggctgattttataaaagcccccaacggttcaatcggcatggaaacctcgtttgcggtctgcaacacatacctggttaagacaggcagaatgacgctttcacagcttgttgagaagatgagtgttaatcctgcaaggattttgaaaatcaacgcaggcacactttcagtcggtgcaaatgccgatgttgttcttataaatcccgatgaagaatggacagttgatgctggtaaacttcacggcaaaagcaaaaacaccccgttcaagggcagaaccctcactggtaaagtcaaaaagacaatcctcggcggtaaggtagtttttgaagattgagtttgttttaattgtagatgttgatacgattaaaattgtgcaaacggtagctgtactacgctcgggcataaatgttttttatttgtcaaactgtctgcacgaattggggacggcggctcgccgtgttcgctcaccaaataaatttaatttaatataaactttaacataaaggagtaaaattatggcacagaaaggcgacctcctgtcggtaagacaggacatcagagtagtagacgcaacaatccgtgacggcggtctttgtaacgatttcagatttgacgacaaatttatcaaggctctttacaatgcaaatgttaaagccggtgttgattatatggaattcggctacaaggcatcaaaggaaatctttaacgaagaagatttcggtaagtggaaattctgtaacgatgcagatatcagaaaaattgtaggcgacaacaagacttctcttaaaatcgctgttatggctgatgtcggcagaacagattttaagaaggatattatcgcaaagaaggacagcccgattgacctcatcagagttgcaacatacatcaacgcaattcctgcggctgttgaaatgattgaggacgctgcaaagaagggctacgaaacaacaatcaatattatggctgtttcaaaggcaagaaccgaggatattacagcggctcttgaaactctcggcaaaactcccgtaaacgctttctacattgttgacagctacggcgcactctatcccgaggagtcaagacgacttgcagacctttactgctcaattgccgacaagtacggcaagtcagtcggtattcacgctcacaacaaccagcagcttgcttttgccaacacaattgaggctatgactcagggtgtcagctaccttgacgcaaccgttgacggcatgggcagaggcgcaggcaactgtgcgcttgaacttcttctcggtttcctcaagaacccgaagtatcaggttgctcctattctcaaaatcattgaggagtacacccacaagtttaaggctgagggcgttaagtggggttacgatattccgtaccttctcacaggtcagtacaacacacatccccgtcctgcaattcagttcgtaaaagaggacagacaggattattacaagttctcaaatgaactttatgatattatcaacagctaaaaaataataattcgtaggggcgaacaacagcattgtaaaaaagatattgcagtcgggatatgaattgtttgcccgaccatagaaagaataacaaaaaatgaggagaatcactatggcatttgacagacttatcgaaaatattgtaaaaatgcagaatcctacggttgcaggtcttgatcctaagcttgactatgttcccgaatcaatcaaaacaaaatgctttgaaaagtatggcaagacgcttgagggtgcggctgctgcactttttgaattcaacaaggcgcttattgacgcactttatgatattgttcctgccgtaaagccacaggctgcatattatgaaatgtatggctggcagggtgttaaggctctttgcgacacaatcgcttatgcaaagtcaaagggtatgttcgttatcacagacggcaagcgtaacgatatcggcacaactatggaggcatatgctacggcacacctcggtcatacagatgttgcaggcgaaagtattgacgcattcggtgcagacgcactcacggtaaacggctacctcggaacagacggtatcaagccgcttgcaaaaatttgcgattcggacgacaagggcatttttgttcttgtaaaaacttcaaacccaagctcgggcgaacttcaggatatgaagcttgaaacaaatgagagcgtttatgagcatatgggcaagatgtgcgaaggctggggcgaagaccttatgggtaagcatggctattcggcagtaggcgcagttgtgggtgcaacatatcccgaacagctcggtgaaatgagagcaaaacttccgcacacattcttccttgttcccggttacggtgctcagggcggcggtgccgatgatgttaaaaacgcatttgacgaaaacggtcttggtgcaatcatcaactcaagccgcggcattatgtgtgcatggaaaaagcaggggcttacagaagatgactttgccgttgccgctcgtaaagaggctgagcgtatgagagatgaaatcgttggttgtatcggcaaaattaagcttggctgattcatttgcacaacagaatcacgaaatttttcgttttttatgctttagtgctatgaatttattgactttagcgtgctaaaagcgtataattaaaatgtatttatttttacaactatatttttaaattttctttaaaaagggagatatcagaaatggcaagagtatataatttttcggcaggtccttcaatgctgcctgagtctgtgcttaaaaaagctgcggcagaaatgctcgactacgaaggcagtggtcagagcgttatggaaatgtcacaccgctcaaaaatttacggtacaatcatcgagggtgccgaggctcttttgagagaggttatgaacattcctgacaactacaaggttcttttccttcagggcggtgcgtcaacacagtttgcggctatccctatgaaccttatgacaaagagcggtaaggctgattatgttattacaggtcagtgggctaaaaaggctcatgcagaggctgcccgttacggtcaggctaatgttgttgcttcatcggctgacaagaccttcacatacattccaaagcttgatccttcaacattcacaaaggacgctgactatttctacatctgtatgaacaacacaatttacggtactgtttatcacgagcttcccgacacaggtgatgttccgctcgttgcagatatttcttcctgtattctttcaagaccgattgatgtttcaaagttcggcgttctctatgcaggcgcgcagaagaacatggctccggcaggtcttacggttgttatcgttcgtgaggatcttatcggcaacgctatggatatcactcctacaatgcttaactggaaaactcacgctgacaacggttcaatgttcaacacaccgccttgctacacaatctacattgcaaagcttgttcttgagtggattaagaacgaggttggcggtcttgataagatgtatgaaatcaacaaaaagaaggctgaccttctctacggtttcctcgattcttcagagcttttcaagggtactgttgttcccgaggatcgttcgcttatgaatgttccgttcgttacaggtgacgctgaccttgacgctaaattcgttaaagaggctactgaaaacggtcttgttaatatcaagggtcatcgcacagtcggcggtatgagagcttcaatttacaacgctatgccttatgagggcgttgaaaaactcgttgagtttatgaagaagttcgaggctgaaaacaagtaattattgaatattatgatataacgggcgaacgctgttcgcctgttattgtaaattcttaaaataaaaaattaaaaaggattgattttgatgtataacattcttacattaaacaaaatcgccgctatcggcacaagccgtctcggtgataactataaatacggtgacgatgttcagaaccctgacgcagttcttgtaagaagtgccgcaatgcacgatatggaatttgccgacaaccttcttgcaattgcaagagcaggcgcaggcacaaacaacattccgaaggataagtgcagtgagcagggtattgttgttttcaatacaccgggtgctaacgcaaacgctgttaaggagcttgttatcgcaggacttcttatttcaaaccgtaaggttattgagggttatgaatgggcaaagactctcaagggcaacggtgcagctgtcggtaagatggttgaaaagggcaagagtcagttcgtcggtcccgaaatcaagggcaagaccctcggtgttatcggtcttggagcaatcggtattcttgttgcaaatgccgctgttgctctcggtatgaatgtaatcggctttgacccgtttatgtctgtaggcaacgctctcaagcttgctcctacagttaagctcatgaagagcgcagaagatgttatggtaaattgcgactatctcacaatccatgttccgcttactgatgacacaagagatatggttgatgccaatatgattgccaagatgaaagacggtgttcgtattctcaacttcagccgtgacggtcttgttaattcaacagcagttcttgaggctgttaagagcggcaaggttgctaagtatgttacagacttcggaacagacgatatcctcggtgaagagaatattatctgcctcccacacctcggtgcatcaactcccgaaagtgaagaaaattgtgctgttatggcttgtgatcaggttaaggagtatctcgagaacggtaacatcatcaactccgtaaactatcctgcaatttcacttgcaagaacaaatgctgacgatacccgtttctgcgttgctcacaagaatgttcccgagcttctcaagaaggttctcacacagatcagcggcaatgttgaaaatatgctttcaaagagccgtggcgactatgcttacacaattattgatgttgcaggcgccggtgcagatgaccttgcaaaaatcgcagcagttgacggcgtaatcagagttcgtgcaatctgatttcgattttaattgaactttaattgttggttgtaaaaaattatccgagcattgttttgatgctcggattttttgcgtttatttgtacaaatggttacaatgctacactctggcatgatatgctttcaatattataaactgtctgcacgaacggggtgcggtggtacaccgaccagatggtatttttttgcattggcaattataaatgttacggaaattgcaacggcacacaattctgcaacgggcaatgccgaccatacaccgtttatgcctataaacatcggcaaaatcagcattgcggcacactcgaaaacaagcgttcttgcaactgaaattacggctgaaatcttgccgttgttgagtgcggtgaaaagtcccgatgcgaaaatattcattccgcacaacagataatttattgcaaaaattctgaatccgctgagtgcaatctgctgaattttttcgttgcctgccgagaaaattccgacaagcggttctgcaaaaaattcagatgccgtaatcattgcaaccgaaattatcagcgtgatttttatgcataatttgaacagcttttgcagtttttcgtgattttgtgcgccgtagttaaagctgatgacgggtgaaactcccgaagtgaatccaaacgaaaccgcagtgaaaataaagtgaatgtacaaaatagcacttatagccgcaacgccttttgcgcctgcaaagtgcatcatctgaatgttgaacagcgctgttgtcacggctgttgaaagatttgtcacagcctctgacgagccgtttgccatagcaaagaggatttcacttaccttgaattcaggcttgccaaagtgcagagtctgctttttgttgaaaaagagcaaaagcggaattgcacccacagccattccgatgattgtgccgagtcctgcaccgattattccaaaatcccacacagccataaaaagaatgtcaagcacaatgtttgtgcaacccgacagtatcgagaaaacaagcatgatatgtggcttgtctgctgttacaaggtacgattggttgagcatctgccagcacattacaaagccatacggaatcataacgctgccgtagtcaatgcagtaggggagaattttttcgtttgagccgaacatcatgtacataggttcggcaaaaattgtgaacagcacagcaatgataacagaaatgaccgttgccgtgattgcaacaccggacataagtcggtttgcttcctcctgtttgccttctcccattttctttgcgattatagcatttgagcctgttgaaaacattaagcccacagccataaatacgagcgtgaacggatatacaatattgattgcggacaatgcgtcacttccgacacagttcgcaacaacgattccgtcaacaaccgtgtaaagtgacataaaaaccatcataagaacggttggcaaagtgaacttcagaatcgtttttgctttgataggttttgcataaattgatgttgccat

SEQ ID NO: 72 - DNA, 12131 bp, unidentified
  source 1..12131: mol_type = unassigned DNA
tcagccattgtaaacctccaaaattttctgttcaaatttttctctgcctactctgtcgattgtaaacttaaatcgttcgctcggctttgcgttttctgcaaagaagttaagagcggcatcacagatttccataagtttttctttattttcaataaacggaataattgttttacccttgttgattgagttgccgaaaagtccgccgaatgaaacaatgtagccgtgaattgtgtcccacgcatctgtcgggcaagccttgaagcatctgccgcagtagttacactttgaattgtcaacggaaatttttccgtcctcaagagtgattgcaccctgacggcaggcctttacgcagactccgcagccgatacaagcgtcctctttccatgaaaccttgattccgcccttgataccgacatcgttttcctcagctttaaggcagttgttctgacagcctgttatgccgaacttgaacttgtgcggaagttcctttgcaaaatatctgtcgtcaagctcctttgcaagagcgtatgtatcaatacaaccgctgggacagattgcctcaccctgacaggctgtaattgttcttactctcggaccgcaaacgcccggctcaacatcgccctcggcaagtgcgtccttaactgcctcaacatcatcaagctttacaaaaggaatttcaacactttgtcttgatgtgaggtgaacataaccgtcaccgtagttttccgaaacctcggcaattttcgcaagctgtttagctgtgaggttgccgcctacaactctgagcctgagcgaaaaattatttttctgtttttgacgcataaagccgccctttttaagcgtagcataatcaactgccatttctcttactcctccgattcattcacatttatactgtctacagcctgtttgaagtcagactttaaatcctcaatatcttcaatgccgacgctgattcttattgtatcatcaaacacgcctgcgtttcttttttgttcttctgttccgtgagcgtaaattgtgcttgacggatgaattacaagtgttcttgtgtcgcctatatttgttgcatttgttgcatacttcaaattgttgataagcttaaacgctctttctttacttcctgccctgattgtgaggattgcaccgccttttcccttcaacagctttttacaaaggctgtaataaggagaagcttcaagagcgggatagttgacttcgattccgtcctgtgtttcaaagaactttgcaagctccaaagcgttataacaaagacgctccatacgaagtccgagtgtttcaagtccaacagagttcataaaagcattaaacggtgcaaggcaacagcctatgtttcgccagataccgtttctcagctttgcaacatacgcaagccgaccgaattttttgtactctgcaagacctttgtatctttccgtattccattcaaaattgccgctgtcaacgattattccgctgattgaatttccgccgccgttaatgtactttgacgaggaatgaacaacgatgtccgcaccgtgttcaaacggctgaataagatacggagttgccgttgtgctgtcgataatgagcggaacaccgtgtgaatgaacaagctctgatacagcgtcaagatcggcaatttcaagtccgggattgccgataagctcggcaaagactgcttttgttttttcgtttatgagcggttcaatctcctcggctgtcaccttgttgacatatcgtgtaacaattccgaaaggctcaagatctccaaacaaatcaattgttccgccaaaaagacctgcgcttgcgattacttcgtcacctgattcaagaatgttcaggagtgccatcgtaacggctgccatacctgacgaacacgcaaccgcaccgacaccgttttcaatggaagcaattctgttctcaaaagatgttaccgtgggattgcctattcgagagtaggcgtagccgggagctctgttgttgaacaccttttcaagctgttcggcagagctgtgcgaaaatgcactgacctgataaatgggagttaaggttgagccaaaaaccttttcaccgttaaaacccttgtgaagtaatgcggtgttaaactccataatatcaccaaccccttaatttcatacaaccaacccttttgtgtaagaccgtcgtaagaatttgtctgacggcttcgattgatataggtagattatactccattaatcatagtatttcaataggtttaataagattttacctcttgcacaatttttctttaaaatttgccgtaattccattatttcctacaatgcatatttgtttagtaggtattgatttttaaattaaaaactgttaccattattatatactctttcagcaaacaaaacgcacggaaaggagatgccaaaattgaagatttcaacaaaggtggaattcggaatcatcgctgttattgacattgcgtcacactcactaaacggcaatgcggtaacaactcccgaaattgccaaacggcaaaatatatctaaaaagtatcttgaacagattctctcatcactcagctcggcaggacttgtgcgaggtcagaagggttcaaacggcggttatgttattgcaaaaggccttaaagagattacattcaaggatatcataaacgcacttgacgcaaatgttctgagcaatgtttattttaacactcggggcgatgatgatgttatgataagacttatcgacaacagtctttggtcgaagatgtcgtcatatcttcaggaatatgccgaaagcattacacttgcacagctttgcgatgagtatatcaaaaacaatgaaattaaacacaacattccgatgtactacatctgatagattaaaaacaaaaagccaccgatttttatgtcggtggcttttcttgtttttatcggattttatttaaagctttcaataacctgacaggttttttcaatgtcatcttccgtgtgtgcaaatgaaacaaacatcgcctcaaactgtgacggtgcggcatagattccgttttcaagcagatgattgtaatactcggcatatctctttgtgtcggctgtggttgccgtgtcatagtcaacaacctttttgtcggtaaaaaacgccgtcataatcgaacccacacggttcacattaagtcctgcgttcttcattgcattttcaatctttgcagacttgcgttcaagctcgggatatatcgaatctttatttttttcaagaattttaagcgttgcaatgcctgcacttaccgctaccggatttcccgaaagtgtgcctgcctgataaacagaaccgagaggagcaacacactccataatctcttttcgacctccgtaaactgcaagcggcattccgccgccgacaatttttccgagggttgtaaggtcgggttttactccgtaaagcttttgagcaccgccgagtgaaagtctgaagcctgtgattacttcatcaaaaataagaagtgaaccgtgcttttcagtgatttcacgcaagaattttaaaaatccttttttgggcggaacaacacccatatttgcggcacaaggctcaacgattacacaggcaatttcatcaccgcagttatcaaaaagctgttgtacggattcttcatcgttatactttgcaagcagagttgtgtctgtgtagcccttcggcacacctgcgctgttcggaatggaatttgtcagaagtcccgaaccgccctttacaagcaagccgtcggaatggccgtggtaacagccctcgaattttacgattttatccctttttgtaaagcctcttgcggcacggattgcactcataaccgcctctgtgcctgaatttacaagtcggagcatttcaattgacggcatatttttgcggataagctcggcaagttcaatttctccgctgtggcacgcaccgaatgtaagtccgttctgacaggcagaagtcacggccttgataacatcgggctgtttgtgaccgaggatattcggtccccatgagcagatatagtcaatgaactcgtttccgtcaacatcataaatttttgaaccctctgcacggtcgataaaaagcggagttcttccgaccgaacggcacgcacggacaggactgttcacaccgccgggcataaagtcaagcgcctgtgcgtatagcttttcgctttgagttgtattcataaaagcacttccctatttgtaaaattcgtcaatccattttgcaacatcaagtgcgtggtatgtgattatgatatccgcacccgctcttttaattgcaatcatattttcgcacacaattttcttttcgtcaatccagcctttttcggcagccgccttgaccattgcatattcaccgcttacattataggcaacaagcggaaggtcaaagcgttcgcttgcggcttttacaatatcgagatatgcaagtgcaggcttgaccataaccatatccgcaccctcgtcaatatcatctgcaatttcacgcagagcctctttgccgtttgcgtaatccatctgataactttttctgtcgccaaattcgggggcagattctgcggcgtcacggaacggtgaatagtagcctgaggcaaattttgcactgtatgacataatcggagtgttgataagtccgttttcgtcaagtgcgtttctgattgcagacactctgccgtccatcatatccgaaggagcgatgatatccgcacctgcttttgcaaggctgacagccattttagagaggagcggaagtgtttcgtcattgagaatttcgtgaccgcaaacaacaccgcaatgaccgtgactagtgtattcacaaagacagacatcggcaataataaggagtgacggataatttttctttatgtatctgattgcgttctgagttacaccgttatcgtcataggctgatgtcgcaagctcgtctttatgctttggaattccgaaaataagaagtcctgcaataccgctgttttcaatttctttaaggatctcgtctgctctgttaagcgaatattggtagacattcggcattgaatcaacaggctttttaatattttcaccctctgcaatgaaaatcgggtaaatcaaatcgcccttgtcaattcttgtttcacgaacaaggctgcgaatctgctcgcctgctcttaatcttctgaatcttctcatatatttatccttctttcaaagttacttccttgattatagttttcaaaattccgtctgtgtccttcgtttttgcaatcttgaacgaatttacgccgtgactttcaagtgcctcggcggtaatttcacctatgcagacaacggaagttctgtcggaaataattgctccgccgtcaaaaaatgtgttcacacccgacgcactcgcaaaagtaataaaatcggtatcaacaacggaattatcctgttttttctcaagctgaatgtcataggttttgacatcgtcaaaatcaatgttgttatcagccaaaatccgagtgagttcgggcgaaccgttttcggcacgcagaatcaatactttttcgccgcttttcacagtttttgcaagcaaaattccaagttcacgggttgtgtagacattcggaatacagtcggcaaaaattccgtacttttcaagtacagccgctgttcccgaaccgatcaccgcaaacttgacatttgcaaaactgcggatatcctttttcagcttacgcagtcggctcataaaaatttctgcaccgttcatacttgtaagcaccacataatcgtagccgtcaatgccgtttattgcattgtcaaaagcttcgttgtcatgatattcaatcacctttaaaaggtcgtgccttttgacctccgcacccgaaagcgtgagcattttgccgagcttgtcggagagttttctcgtacctgtaacggtaaccgaaacatttttcaaaggtcttgtaattgtgggggcaaagtcaaattttgcggtttcgccaaccactataacagcaggcggtacaacctctgcggatttaacattttcgcagattgtcgagagagttcccctcacggtctgattttttgcacaagcgccgtttgacacaactgcaatgggagtatcctccgatttaccgttctgaataagattttccacaatatcggggaggtttctcaatcccataagaaagacaagcgttccgtcggtttcgacacatttctttatattttcgggcagggtgtcctgtgccgtatgtcccgtgattatatgaacacttcggctcagatttctgtgtgtaacagggattcccgcaagttcgggaacggcaatcgaggaagaaattccgggtacaatatcaaacggaatatcggcacttttgagggtttcaatctcctctccgcctctgccgaacacgaacggatcgccgcctttaagacggacaaccgttttgccctctctcgccttttcaacaaggatttcgttaatattttcctgcttttcgctgtgtctgcccgaacgctttccaacgcagattttttcagccgtttcgggtgcaaaaccaagcaatgacacatctataaggctgtcgtaaacaagcacatcgcagtgtctgatatactccgcaccacgcattgttatcagatcaaaatcgccgcatcccgcaccgacaatatacactcttccgttactcaatttcgctcaccagcctttttgcaagtttgattctgtttgaaatttcatctgttccgctgactgtttttttacagtcggcagacagagaaagcgttatcctgtcgttttcaacctttgaaattgcaccgacaggagttgaacaatcggcatttaggctgtgcaaaacctgtctttcggtttcaaacgaaagcattgtatttttgtcgctgatttcagcgagcattttggaaaccacgctgttttttctgctttcaattgcaactattccctgacacggtgcaggaagaaattcatcggtatcaaacggagttaccgtgtaatcctcaccgttgcaaaggtcaagtctttcaagtcctgcctttgcaagcacaagggcatcgtactcaccgttcaacagctttttaagtcgggtgtcaacattgccccttatatccttgaattttgcattaggatagattttctccgcaaaaagctttcgccttaaactgcctgttccgatgacaaaaccgtccttaatttcaaaatcattgcgtgtaacaaacacatcgccatagctgccccttggcaacacagcggaaatttcaagtccgtctgcaatttttgtcggcaaatcctttgcgctgtgaacggcaacatctgtttctccgctcaaaagcgacatttcaagttccttgatgaacacaccttttccgcccaaagctgcaagcggtttgtcaagggttttgtcgcctgttgtcgagatgtaaaccgtttcaattttaacattcggaaaacggtttttcagcgtttttattaacatttcggtttgtgcaagggcaagcctgctttttcgtgttccgatttttatcgtcattgttcgtattcctcaatcaaattttcaacagttttttcatcgggttcaagtcccgaaaggcaaagcgaaagaagctgttcaaaaatcttccttctgtcatcttccttttcaactctctccttaattatcgggcgatatttccacaaaacctcggttgtgttttcgttcatactttcaaggattcccacaaaaagctctttaagatattttgcgtaaatcggacttttgcccgatgttgtaattcccgccgttatgccgtttttgcttgcaattgcagaaaaaataaatccgcatttttccttatcgtcaactgtgttgacaagaatatttttctcattgcaaagctgaaaaattctgccgttgagcgtttcatcatcggttgcgctgacaacgcaaaacgcaccgtcaaggtcgctgtcacaaaatctgcggtcaatgattttcacattcaaagccttgatttcatcgcaaattttcggagcaacaacggttatgtcgggcgaaaacggcgtcagcttttcaatctttctgagtgcaaccgtaccgccgccgactacgagtatttttttgttttcaatgtcaatataaaacgggaaatatgccattagttattctctccgcactttctgtagatttcaagaattcttgcaaattcttctgccgaaacatcggatttcagcttataaatgaatttttccgaaaaatctgacggcattgcgttttttacggactgcatacacggcaaaaattcgtgaaaggcaaggtcttttttgagaacttcaatttcctcaaaaattatttcttttgcactttcaacactgtcgagtttgagagcattgttctcgtttgcaagctgttttatgcagtcaatgttaatgagccttacaccgcttattttggggatattttcgtcaatgtcgggcggtacggcaaggtcaataaacagccttgatttttcggtttttatattgttttttaaatcataatatgtaaccgtgtaatgcggtccgcttgtggcactgattacgcagtctgcaaagtcaaacgctttgtatctttcgtcataatcaatcacattcgtacccgtattttcaaaaacagtttctgctttgtgctttcgtgaagtcacggtaacgcttatacctttgtgcgacaaaagatttttcacaacggttgagccgaccttgcctgttgcaccgattacaaggacattcagctcaccgtctttgaattttgccgcctcgtttgacgcaagagttgcaactgaaaccgatgtttttgaaatggcggtttcggtcttgattttttttgcacaggaaacagccgcctgaacgcacatattaagctcatatgcaaccgtgccgttgtcctttgcaaaggcgtaggctcgctttagctgaccgagtatttcatcttcaccgataaccattgattcaattccgcctgccaccctgaaaagatggagcaaagccctgtcaccgtagaaaagacagatgtacttttttagttcgtcaaaatcaattcccgaaaaatccgaaagaacggtttcaaccgttttcacagatgattcgtcaccgcaaaaataaacctcggttctgttgcaggtgcagagaatcaaacactcgctgatattttcagaataataaagttcgtcaagaaatgtctttttttgcttatcgggaaaggcaagcttctttctcacaaccacatttgaagttttgtgacttacgctcaggcagtacataaaaatttcgctccgttacaaataaaatccgacagtaaaatacacttttaaagttattttattactgccgacagctattgtcaattaaagttagtcagttattttaccactaaacctatctgtttggtatgttttaattatactacattcaccattccatgtcaataaatttcgggttttgcttgacaaaaacagtgattacaatataaactatacaaagatacctcccgtcagcaaacagcgggagttttattccgatgtaaatacttattgtaccgataggaatactaaatgatttgaatatgtattaaggagcgtttttatgcttaatcagttttcaagaacacagcttttgattggcaaagaagctatggacaggctttcaaaaacaagagttgcaatttttggaatcggcggtgtaggcggatacacggcggaggctcttgcaaggagcggagtcggcgagcttgaccttattgacgatgacaaggtgtgccttacaaacatcaatcgccagatttttgcaacaagaaaaacagtaggcaaatacaaggttgatgttgcagaggaaaggctcaaggacatcaatcccgacataatcatcaacaaacaccggaccttttacactcccgaaacctcggaaaaattcgacttttcaaaatacgactatgtagttgacgcaattgacacggtaacaggcaaaattgagcttgttatgcaagccgacaaagccaagacgcctatcatctgttcaatgggagcaggcaacaagcttgatcctacagcgtttgaggttgccgacatttacaaaacctcggtctgtcctcttgcaagggttatgagacacgaactcaaaaagagaggtatcaaaaagctgaaggttgtttattcaaaagaaaagcctatcacacccgttgacgatatggcaatcagctgtaaaacaaattgcatatgccctcccgggactgaaataaaatgcacccaacgcagacaggttccaggcagtaccgcatttgttccgtcggttgcaggtcttatcatagccggcgaagttatcaaggatttgattaagtaaactaatatagttgtcttttcattttaatttgctattgttaaaaattgcaatttatagtataattatcctaataactatttagaggttgcaaaatgaacagatatataattattgcaggagttaacggaacaggaaaatcaagtttgcgtggtgttcttgaagggcaggaagttttgcttggtcatataattgatgctgatgctattgcaaaaatgaacaattacgataacataaaggcgggtaaaaaagcagttgaagaaataaaatactgccttgataacaatatttctttcacacaggaaaccactctttcaggacacagaaccgagaaaacaattcagcaggcacgaaaacagggctactatgttattatgtactatgtaggtcttaactcaaaagaagaaagtcttgcaagaattgaaaacagggtacggaagggcggtcatgatattccgaaaaatgatgtgtgcagaagatttgataaccgcttcgattctttaaaaagaattgttccgctgtgtgatgaagtaattttttatgataatgaaaacggatttattaaagttgccgaaataagaaacaacaaattcaattattcaaacggttacagacctaaatggattacagaatttgaaaataaactgaaattaggctaaggaaatgcaaagcaccgagagaaattaccctcggtgctttgcttgtttttataggattttttacagttgatatcgtgattaaacagattagatgataaccgattcttcctgaagtgatttgttacggagaatctgaacctcatcgcctttggtaatgaaaagccgataaagaaatacattgaccttttccccgacggtaatcggagtttcgtcaagtcctctgtacgcataaaccgtgcctccgtcacattttacggcaatttcgatattgtcgcctctgaatgaagtctttataacctcaccgacggatacagacgctttttgtgcagttgtttcgctgagctttgtcacctttacaaattcgggacggataactgcacggtcaacattatcgacaacatcaaaggtcttgaactttgtataatcgtcaagcgtagtagtctgaccgaaaaatgatgcggaaaatgcggtttggggatgctgataaatgtcaatcggcgagcctatctgctcaattctgcccttgtttgtaattatgatttcatcggcaacctcaatagcctcgctctgatcgtgggttacaaatatacttgtaacgccgagcctttcaatcatatccttaagccatgagcgaagctcctgcctaacctttgcgtcaattgcggcaaatggttcgtcaagcagaagaagattcgggtttggcgcaagcgctcttgcaaaggcaacacgctgtttttgaccgcccgaaagctggcttggataacgcttttcaagtccttcaagaccgataagctttacaagctcgtttactctttccttgataaatttcttgctctttttctgaattttcagcccgaaagcaatgttatcaaaaactgtcatatatctgaaaagagcgtagttttggaacacaaagcctatgcctcttttgcttgcgggaatatcgttgacaacctttccgtcaattacaatgtcaccgctgtcgggattttcaagtcctgcaatcatacgaagaattgttgttttgccgctgcccgaaggaccgagaagtccgataagcttgcccttttcaataccaaagtttacattgtcggatgccttgtagtcaccgaaagttttatttatatttttaagctcaacatacat

SEQ ID NO: 73 - DNA, 9722 bp, unidentified
  source 1..9722: mol_type = unassigned DNA
atgacaaagaaatgggaagtaacggtaaatggaacaaacaatgtgattgagtacaaggcaggatttggagcaaagattctggtgaatggtcaggcgtacaaggtgaaatcacagaactggtgggtgatgatggtggattatccaattatgatcgatgatacggaaattcgtgttgtggcaatcggaaataaagttgatcttgctgtgaacggagtatatcagggcagcggcgagcagtatcagccattgcataaaacaccgacaatgtgtaatgtgtttatcgggatcagttgtatcgctggatttcttctttgcggatggttgggtttactgatcggagctttatttggaacagtttatgtaaaacagggactggcaggtaaggttggaaatgctgtcggtgcgtttgttggatgtacggtaatacagcttttgatcatggtcattgtagtatttcttcagcttgcatagtaaaggacggtttacatatggaacagggaaactatggagaaaactttgacagaggatatgaggagcaggcgagaccgagacagcaggtgatcgtgatcggggaaccggttccggataagagaacgaccaagaaccttgcaatctgttcgctggtacttggaattcttgcgattgtattcagctttttgccttatattggaattattcttgcactgatcgcattgccacagggaattgtaagtcttgtgcagaagcggccgggcaaaggacttgcgattgcagggattattacaggaatattcggaatattattgtcgatattgtttattttggtgtatgttgttgcggtacttgctttataataccgggataggataaagaggttattacagaaagaatgtcagctttgtgtagtaacctctttttctacctattgacattttttctcttattgttacaatgaagttagttgatactaaccaacaaaatacatacattatgaatagaatacgaaattgtaaaattgattgaggacttaaagaaaataactgaaataaagtttgcaattacttattaataataagagaggaaggtgtcttatgaatttgtcagtattttatggaattttaattccgtttttgggtacgtcgctcggtgcagcgtgcgtattttttatgaaacatgatatgagcgaacggttgtcccggattcttaccgggtttgctgcgggggtgatggtggcggcatccatctggagtttactgattccggcgatggatcagtcggaagagatgggaaagtttgcgtttattccagcagcagctggattttggggtggcattctgtttctgcttctgttagatcacatcatcccgcatttgcacaggtacagtgtcagcacagagggaccaaagagcagattgcagagaactaccatgatggtgctggccgtcacgctgcataatattccggaaggaatggcagtcggggttgtgtatgccggatatctggctggaaatgcaaaaatcacagtggcggcagctatggcattgtcaatagggatcgcaatccagaatttcccggagggggcgattatttccatgccgctaagggcagaagggatgaaagtgtcaaaggcttttgcaggtggtgtgctttcgggaatcgtggagccggtcggtgcaatgctcacaatccttgcagcaggatatattgttccggctctgccttatctgttgagctttgcagccggagcgatgatttatgtggttgtggaggaactgatcccggaaatgtcccagggggaacattccgaccttggaacgattttttttgcagtgggatttacggtgatgatgtcgctggatgttgctcttgggtaaaaataacagaatagagacagtgaaaaagaaattcctttccggatgtgaagggagtttctttttttacacagatgaattgtggacataccagtgacaaaacattgtgtattttttaacaaaatcattgacaataatacttatgcaatgtatgttatagatagaatgttttataaataacaatctggttataccagaggacagaggctggaatctgacatggaaacatggaatagccggaacatagaagaagggaagagggagaacagatgaaagactttaaagtgattgaggtaaaacggagtatttttgaagacaacaatgcggatgctgacaaattacgtgcagaattaaagtcagaggggacatttttgttaaatcttatgtcttctccgggcgcaggaaagacaacgacattaaaacgcacgatctccatgctcaaagacgagatgaagattggtgtcatggaagcagatattgactctgatgtggacgcacaggcgatcagtgagaccggtgtgcgtgccatccagatccatacaggtggaatgtgccatctggatgcggacatgacaagacagggaatccgggagttcggaacaaaagaccttgattttgttgtgcttgagaacgtaggcaatctggtctgtccggcagagtttgataccggaagtacaaagaatgccatgatcctttccgtgccggaaggggatgacaaacctttaaaatatccattaatgttttctatctgtgatgtggttctcattaacaaatgtgatacattaagtgtttttgatgatttcagcaaagaggctgtgaaagaacgcatcttgaaattaaatccagatgcaaagattttctttgtctcagcgaagacaggagaaggttttgatgagtgggcggactggatccgcactgagatttctgaatatcagaaataagtgaaagcagaataaaatatttttttacaggagccggcagagtgacggctttgcatataaggaggaagaaatggcagatccattgggaaattttgtaccggaatttattgaaaacgaagtagagagagaagctattgtaaagcttgctaaaatgatcacagaccgtgttccgcagaaacttggaatgaaaaagatcacaaagtatgatccggagtactggggattatctgcaatgtgtacagatgagatggcagagatcgcactgaaaatgggtgttcgtaagccaaagacattagatcagatggtaaagctgacaggcattgagaaaaagcacttggaagaggttttacagcagatggctgtgaatggtgtgatcgagtataattgggaaaatccacagcatgagaaacagtatgtacttccaatgtttgtaccgggaagtgctgagtttggaaatatgaaccttcagatgttagaggaacatccggaagtaggacgtttcttcgagagaatgagccgtctgccactggaaaaggtaacacctatggtaccggaaggaggagccggcatcggtatgcatgttattccggtcgagaaagcgatctctatggagaaccagtctatttccattgagcatatttcacactggctggataagtatgaaggaaagtatgcagcaagcccatgttcctgccgccgctcccgccagacgtatgaagaaggatgtgcggatgatccggagagctggtgcatcgcagtcggcgacatggctgattatgttgttgagacgaataagggcggacgttacatcacaagagaggaagcattagatatcctaaagaaggcagaggagaatggatttgtccaccagatcaccaatatcgatggtgaggacaagatttttgcgatctgtaactgtaatgtgaatgtctgctatgcactccgtacttcacagttatttaatacaccgaatatgtcccgctctgcctatgttgctaaggttgagacagagaactgcgtagcctgcggacgatgtgtggaatactgtcctgcaggtgcagtaaaacttggacagaaactctgcagaaaagacggttctgatgtggaatatccaaaacatgtccttccatctgagaaaaaatggggaccggagatgtgggatgaaaactaccgtgataacaaccgcatcaactgctatgacacaggtacagctccttgtaagacagcctgtccggcgcacattgcagtccagggttatttaaagatggcagcgcagggaagatatcaggatgcgttggcgctgatcaagaaaaacaatccgctcccggcagtctgtggacatatctgtaaccgccgctgtgaggatgcatgtaccagaggaacgatcgatcaggcaattgcgatcgatgaggtaaagaaatttatcgcagcccaggatctgaaggctgagacacgttacattccagagaaagtcgttccatctgtcagaggatattttgaggagaagatcgcgatcatcggaggtggtcctgccggtttatcctgtgccttctatctggctgaaaaaggttacaaacctactatttttgagaagaatgagcgtgccggcggtatgctggtatacggtatcccatccttcaaattagagaaagacgttgtgcaggcagagatcgatatcatcaaggagatgggcgttgagatcagaaccggagtggaagtcggaaaagatatcacattagatgaactccgtgcgcagggatacaaagcgttctacattgcgatcggatgccagggcggaagacttccgggcattccaaacgatactgtaaaaggatgttcttccgcagttgacctcttaaaagaagtcaatgcaaatgagaaatatgacatcaaaggtgatgtcgttgtgatcggtggcggtaacgttgcaatcgacgttgcaagagattccaagagatgcggcagtgacatggtaaaagtcaacatgttctgtctggaatccagagagacaatgcctgcatctgtagaagaaatcgaagaagcagagtcagagggaatcgttgtaaatccgggatggggaccaaaggaagttcttgtggatgacaacggtgaagtacgtggaatcgttttaaagaaatgtttatctgtaaaagatgcagacggaagattcaatccacagtatgatgagaaccagcttttgacagtagaatgtaagcatgtattcttctccgtaggtcagtcgatcgtatggggcgacttattaaagggaagcaaagtggaatttggacgtggcaacggagcggttgcagatgcgcttacttaccagacagcagaacctgatatcttcgttggaggagatgtttatacaggtcctaaatttgcaattgatgcgattgcagccggaaaacagggtgcaatctccatccatcgttttgtacagccacattccagccttacgatcggacgtaatagaaatgatttcatcgagttaaacaaaaacgatatcaaagtggaaaattatgacaactccagccgtcagattcctggacataatgattccatcgatacaaaacactctttccgtgatgcaaaacttgtatttacagaagagcaggtaaaagcagagacagcacgttgtcttggatgtggagcttctgttgttgaccagaataagtgtatcggttgtggtatctgtacaacgaagtgtgagtttgatgcgatcaagttacatagagaactgcctggatgcagcaagatggttccaagtgaagataagttgaaatatattcttccaaatggagcaaagcaggcgattaagattaaattctccaagaagaagtaatcatttacagagaggaataaaatgcacgaacttggaattattgtacatgttatgcgtaccgtggaggaagttgcagcagagaacaatctcacagagatcagatccgtgacctgtgagattggagaagtcagcggcgttgtcccggaatacatgacagactgctggggctatgcaagaagcagatcagagcttttaaaagactcagaattaaaaatcgagatcatacctggtgttaccatgtgtgaggactgtggaaaaacctattccacagtccagtatgcaaaaatatgtccgcactgtggaagcagtgccacgtatcttctggaaggaaacggattcagtatcaaggagattgaaggggcataacaaaaaaatattgttagtaaaaacctcactggctgagtataatctgctggtgaggtttttctattaaaaagcaaaaatgcacagagaccaaatccgcctctcatgcatctaatctatgtaaataagtgaaaagccggcagaaaggaagctgttccacggacaagtcagtggaaaacagcacaaaatacaatgaaaaaagaaatattaggacaattgatcattgattccgaggaaacaatgtatcatattgcaaagtccctgctttacaatgacgcagactgtgcggatgcgatacaggaagccattgtaaaagcatttgtaaaattacatacattaaaggatgactcgtatgcaaaaacatggctcatccgcattgtgatgaacgagtgttatgcgatcatgcgcaaagagaaaaaaattatttccctgcaggattatcagatgaacgagcaggaaacggaatccaaagactattcagatttatatgaagcgattttccgtttgccagagcagataaaactgtgcgtcacactgtattatatggaagggtacagtgtgaaagaggtcgcagcattgttagatacgacagagagtgcagtaaaaaacaggctggcaaaagcgcggggaaaattaaaagaagcgctggcagattgagacatagtgatgatccattggaacagacatacaaaaacacggatatcgaatgaaaaataataaatttcgtatcgtttggatagcaggaaaggcggtaacagtatgagattagaagatatgagagaacaatttccgaaaatgccggagagcatgaagcggatgattgagcaggaagttgcagtgcagatcgggcaggagaaagaaaatgacaatccaaaagttgtaacttataagaaaagaaagaaaaaaaacatggcacaccgtatgctggtggcatctatggtggctgctctggcacttgcaacaacggtctgtgcaggtgttgcttaccagatgcataatcagaaggttggaaaatatggcttaaaaacacagattgaaggaccacagacagcggcagaaagtacggagaatatggcagatcagacgacagaagagagagcgggtaaagcagccgaatatgtcagactggaaacctcttatctgccgaaaggtatggtgcagtcagaggaaggaaaattcagttttgaagataattatatgcagggtggagtcagcatgatcgtgtaccagctgacaccggaaaaaacaatagcagacattgaaaatacaggcattgctgtgagcgaggaaaccagcatcggtggcagaccggcagtttacatggaaacagctcctgccgagggtgattcagcagaaaattcttctacagaaggaactgcgaatgaaaatacaaccggtgcaaaaaaaatatatatgatttacgcggaacacaactacctccttgagatgttcattttcccggatgtgacaaaagaagaagcattccagatcgcagagggtgtttccattactccgacagaagaaacgagcggagagaatgttatgcaggtgtgcagttggaatgacatggaaaatgaggcaggaaaaggagaaccggaaacggatgaatcggaaacattgatgacatttccaaaagagaaaatgaaaaatatacacctcattggcggtgagatttctctggatcagaacggaattgaagcaacaccgggacttacagcaatcgtttccgatgtaacaatttccgataatatcagcagtttgtcagaaaatatgctggaggatgatacaaaagcagcatttgacacagacggtaatttattgccaatgaaagtggaatatttaaagagcggagacggtatcaacacagttgatgaagttgtggagaccaaagagattccaatgaaaattgtttcagtgacagtggattataaaaataatggaaagacggcactttccaatgtaatgtttaacggcggcattgcacttctggcagaatatggagaaaacatgcagtttgacgcatacatgaatgaaaaaccgggaacaggcgatatatgggattgcgtaaacgaagaatctattggatttagtcaggaagtttatttatcggatgttcatggaggagaacgccacaacaactacattaatacgataaatccaggtgaaaccgtcaccgtgcgtatggcattcaaagtgccggaagaaaaattaaatgagatgtacttcaccttaagcaattatggtggcagccatttctatgatgagacaagcttacagcttggctatgtggatatcagacagtagaaaatttttatgagaaaaccctcgcatccagttttcagaagctgtttgcgagggttctttttaattttgccgtcagctatatacaaatctaatttatagaaaaggaaccatataaactggcagacaaagaatgtcagagtccttagccaaatctttggtatacacaagatacttatcaagtatacgatcagaatattttttgcaaaattcatcaagagatttatgtgttttgtatccgcttgactttacttcaatcggacatattttatttctacttgcaagaagaaaatcaatttcataattatgccgcgaagtttcattgaaaaaggtataataaaataattcattgccattacaagtaaggatttgggcaactatattttcatagagatatccgagatttgtattgagcgtatcatttaatagtttttcgtatattatattttctgtaaagtctttgtccttgaacatcaatgtagtaaaaagtccggtgtcgcagaggaacagtttaaatttacaaaggtctttattagttgacattccagcatttggatcattggcatgatatgaaacaagaacagtttttgaatcttttaattcggcaattaattctaatatactatcggctcggtcatttgccagtacactggaaacttgatatcgtgcagcatttttatttagctgggcaggaattgcatcaaaaagaagtgaaagctttcctgttgagtctattttcttgaaatcatcctcataaagatttaaaatatcacgttttattgtatcgacttttcgaaaattatttgtctggagatattcatttacagcctgtggcattccaccaacaagcatatacagtctgaagtctctcattaatttccgatgtaatttatctccgattggatggcgggagtcaaagagttttcttactaaggcggtggttgtatgatcacctaaagcccataagaattcttcgtaatccatgggatacatagagagttttctttcttcactcggaataaggatgttctgtatgttcttttttatggaaatcagtgaaccggtttctatatagtcatatctgtggtcttttactaatgatttaattgcctgtcttgcaagtggacatagttgaacttcatcaaagataattagagaatttctttcgtgaagatcaaccttgtattgtaactgaagctgtaaaaaaagataatctaaatcggaaatgtcttcaaaaagagctttgatacttttggatacagttgaaaaatcaattaatatatagctttgatattcattcttagcaaaagattccacaaccgtagattttccaattcgccgcgcaccttcgattaacaatgctgtatttccgttggattcttctttccaggatagtagtttactgtatatttttcgcttaaacat

SEQ ID NO: 74 - DNA, 5614 bp, unidentified
  source 1..5614: mol_type = unassigned DNA
  misc_difference 1132: note = a, c, g, or t
  misc_difference 1133: note = a, c, g, or t
  misc_difference 1134: note = a, c, g, or t
  misc_difference 1135: note = a, c, g, or t
  misc_difference 1136: note = a, c, g, or t
  misc_difference 1137: note = a, c, g, or t
  misc_difference 1138: note = a, c, g, or t
  misc_difference 1139: note = a, c, g, or t
  misc_difference 1140: note = a, c, g, or t
  misc_difference 1141: note = a, c, g, or t
  misc_difference 1142: note = a, c, g, or t
  misc_difference 1143: note = a, c, g, or t
  misc_difference 1144: note = a, c, g, or t
  misc_difference 1145: note = a, c, g, or t
  misc_difference 1146: note = a, c, g, or t
  misc_difference 1147: note = a, c, g, or t
  misc_difference 1148: note = a, c, g, or t
  misc_difference 1149: note = a, c, g, or t
  misc_difference 1150: note = a, c, g, or t
  misc_difference 1151: note = a, c, g, or t
  misc_difference 1152: note = a, c, g, or t
  misc_difference 1153: note = a, c, g, or t
  misc_difference 1154: note = a, c, g, or t
  misc_difference 1155: note = a, c, g, or t
  misc_difference 1156: note = a, c, g, or t
  misc_difference 1157: note = a, c, g, or t
  misc_difference 1158: note = a, c, g, or t
  misc_difference 1159: note = a, c, g, or t
  misc_difference 1160: note = a, c, g, or t
  misc_difference 1161: note = a, c, g, or t
  misc_difference 1162: note = a, c, g, or t
  misc_difference 1163: note = a, c, g, or t
  misc_difference 1164: note = a, c, g, or t
  misc_difference 1165: note = a, c, g, or t
  misc_difference 1166: note = a, c, g, or t
  misc_difference 1167: note = a, c, g, or t
  misc_difference 1168: note = a, c, g, or t
  misc_difference 1169: note = a, c, g, or t
  misc_difference 1170: note = a, c, g, or t
  misc_difference 1171: note = a, c, g, or t
  misc_difference 1172: note = a, c, g, or t
  misc_difference 1173: note = a, c, g, or t
  misc_difference 1174: note = a, c, g, or t
  misc_difference 1175: note = a, c, g, or t
  misc_difference 1176: note = a, c, g, or t
  misc_difference 1177: note = a, c, g, or t
  misc_difference 1178: note = a, c, g, or t
  misc_difference 1179: note = a, c, g, or t
  misc_difference 1180: note = a, c, g, or t
  misc_difference 1181: note = a, c, g, or t
  misc_difference 1182: note = a, c, g, or t
  misc_difference 1183: note = a, c, g, or t
  misc_difference 1184: note = a, c, g, or t
  misc_difference 1185: note = a, c, g, or t
  misc_difference 1186: note = a, c, g, or t
  misc_difference 1187: note = a, c, g, or t
  misc_difference 1188: note = a, c, g, or t
  misc_difference 1189: note = a, c, g, or t
  misc_difference 1190: note = a, c, g, or t
  misc_difference 1191: note = a, c, g, or t
  misc_difference 1192: note = a, c, g, or t
  misc_difference 1193: note = a, c, g, or t
  misc_difference 1194: note = a, c, g, or t
  misc_difference 1195: note = a, c, g, or t
  misc_difference 1196: note = a, c, g, or t
  misc_difference 1197: note = a, c, g, or t
  misc_difference 1198: note = a, c, g, or t
  misc_difference 1199: note = a, c, g, or t
  misc_difference 1200: note = a, c, g, or t
  misc_difference 1201: note = a, c, g, or t
  misc_difference 1202: note = a, c, g, or t
  misc_difference 1203: note = a, c, g, or t
  misc_difference 1204: note = a, c, g, or t
  misc_difference 1205: note = a, c, g, or t
  misc_difference 1206: note = a, c, g, or t
  misc_difference 1207: note = a, c, g, or t
  misc_difference 1208: note = a, c, g, or t
  misc_difference 1209: note = a, c, g, or t
  misc_difference 1210: note = a, c, g, or t
  misc_difference 1211: note = a, c, g, or t
  misc_difference 1212: note = a, c, g, or t
  misc_difference 1213: note = a, c, g, or t
  misc_difference 1214: note = a, c, g, or t
  misc_difference 1215: note = a, c, g, or t
  misc_difference 1216: note = a, c, g, or t
  misc_difference 1217: note = a, c, g, or t
  misc_difference 1218: note = a, c, g, or t
  misc_difference 1219: note = a, c, g, or t
  misc_difference 1220: note = a, c, g, or t
  misc_difference 1221: note = a, c, g, or t
  misc_difference 1222: note = a, c, g, or t
  misc_difference 1223: note = a, c, g, or t
  misc_difference 1224: note = a, c, g, or t
  misc_difference 1225: note = a, c, g, or t
  misc_difference 1226: note = a, c, g, or t
  misc_difference 1227: note = a, c, g, or t
  misc_difference 1228: note = a, c, g, or t
  misc_difference 1229: note = a, c, g, or t
  misc_difference 1230: note = a, c, g, or t
  misc_difference 1231: note = a, c, g, or t
ttaagcccagagattttccgggtaaaggccgtcggccgtctttttggcgatggcttccaccaccacgggtttatcctcgcggtaggtgacgccataccacttatcggtgctgcgcagcaccttgacggcggctttcttttcgccgatgagctcactgaccaccagcggcaggaaatactcgcacttgagcgggttcttttccagattctcgtccagccagcgggcaaagcgccggtcggcttccttcacgaagctctcgccgaagccccagaggttcatgctcacgggcgtctcgccgggcaggtccgtccagctctcgccgccgtcctcggtgtagtggatgccaccctcataggtctcgatgcgggtgcgctcggtgacgctgtggagggtgctgtcctcgttgagggcgcagacgccgcgggcgacgctgccattttcggaaacggtgttcttgagcaggtagctcaccatgcagtagtcgtagacctcgccgtcggtgtgagtggagaggtaatcgtagatgaccttgaatgcctcggggccgtagtagtcgtcggcattgatgacggcgaaggggccgtggatgtagggctttgcggccagcaccgcgtggcaggtaccccagggcttcacgcggccctcggggatggtgtagccctcgggcagctcatccagctgctggaaggcgtacttcacgtccatcaccctggacacgcggtcgccgatggcagctttgaaagcctcctcgatctcgtgcttgatgacgaagatgaccgtctcgaagcctgcgcggcgggcgtcgtacagggaataatccacgatgacctgaccgcagggacccaccgggtcgatctgcttcatgccgccgtagcggctgcccatgccggcagccatgaccaccaggaccggtttgttcatgttttatctcctccttgaaaagggtgtttctcttttacggttttattatactccaaaccacgccgggcaacaagacaaagctgttttttgaagtttggcaagtttttattgcatatatcagcaagtaaatattgccttttgtttccagaccgagtataataacttcatccgacacaaaaacgaccggccagccgcttttgcaggccgaagnnnnnnnnnnnnnnnnnnnnnnnnnnnnnnnnnnnnnnnnnnnnnnnnnnnnnnnnnnnnnnnnnnnnnnnnnnnnnnnnnnnnnnnnnnnnnnnnnnnnataataacttcatccgacacaaaaacgaccggccagccgcttttgcaggccgaagcaagaaagtgagtttttccatgaacgaaactgtgaccaagcgtttcctgctctacttccgcctgatgatggtagcgtggatcctgatcgccaacgcctttttccacgccatcgagtttgaatacagctggctcgtctttttgagcaacatcatgctctttacgatggagggcgacatcaaagaccgctttatcagcgtggagctgggcggcctcgtgggcatggtgctcacggtgctggcgatgctggccatcggtgcgctgacgcctgttctgggcgggatgctgggcctgctgctgccgctgggcgtggtgctcttcatcctcatcatcctgcacccctacgcccccaaggtgctgaacaatgtgggctttgcctacctgaccgtcgcctgcatcgacagcgcagcttttgcagcgaatctgcctctcttcttcggggtgtacatcgtcggctctctggtcttcaacggcggctgcgtgctgctcatgaagccggcccgttatctggccgcccggagcatcaagaacgacgtcaaggctgacgcctgaatctgagcttctcgtcttttcttcttttttctcacagcgccccggcagcaaagatgccggggcgctgcacttttatgtggattctgccgtttttccgtgctacaatggggtaaactgaacgaaaggaagtttcccgccatgtatgctgcatctcctgcacgctactccactctgccctaccaccgctgcggcaaaagcggcctgatgctgcccgccgtctcgctgggcctgtggcacaacttcggcgataccgcgaacttcgagaacatgcgcctgctctgccgcacggcgttcgacaacggcatcacccacttcgacctcgccaacaactacggccccgagccgggcagcgccgagaagaacttcggccgcatcctcaaggaagatcttgccccctaccgcgatgagctcctcatcagcaccaaggcgggctacaccatgtgggaagggccttacggtgactggggaagccggaaatacctgctggccagcctcgaccagagcctgaagcggatgggcctcgagtatgtggacatcttctaccaccaccggatggaccccaacaccccgctggaagagaccatgggcgctctggcgcaggcggtgcgcagcggcaaggcgctttatgccggcctgtccaactacaacggtgagacgctggaaaaagcctgcgccatcctcgacgagttccacgtccccttcgtcatcaaccagaaccgctactccatctttgaccgcaccatcgagcagaacggcctgaaagagactgctgtccggctgaacaagagcattatcgccttcagcccgctggcgcagggtctgctgaccaaccgctacctcaacggcatcccggaggacagccgcatccgcaccgatggccgtttcctgaaagagagcgtcatcaccgaggaaaagctggcacagatacgcgctctgaacgaaatcgccgccgcccgcggccagacgctggccgagatggcgctggcgtggatactgcgggacggcaaggtgacgagcgtcctcatcggcgcgtccaagccccagcagattctcgacaacatcgctgccctgaacaacaccaccttcaccgctgacgagctggaagccatcgataaggcttccggattttacaaggagtaatttatgtccaaaactgtatggataaccggagcttcttccggcattggccgggagtttgcccgccggtatgcccgcctcggcttccggctcatcctcaccgcccgccgcaccgaccgactcgaagctctggccgcagagctcaccgcgaagcacagcaccttctgccgcatcctgcctgctgatttggagcaggagagcgagtgcgcccgtctctgcgaggcgctgactgacgagcgcatcgatattttcatcaacaacgccggcttcggcgtctgcggcagctttcttgagaccagcggcgagaaagagctctccatggcgaaggtcaatgtgctggccatgcaccagctgttcaagttcgccgtgaaaaagatggaggctcagggcttcggcaccgtgctcaacgtggcgtcctccgccgggctgctgccgggcggaccctatatggcgggctactacgccaccaaagcgtatgttgtcagcctgacccggggcgtggccgaagaactgcgggagcagcacagcccggtctacgtctgcgccctctgccccggcccggtggacaccgagttcaacgagcgggccgatgtggtgttcgcactgcggggcatcagcccggaactctgcgtggaggaggccatgcgggggatgctccgccacaagaccatcatcgtcccgtcggccctcatgcgggcggcgacgacggcccagcggttcatgccgatggcgatcttaatgcccatcatggcccaccagcagaagaaaaaactgggctgaagggctattgtgtgcaacaagcagcaatcccggcctttgcagagtccgtttttatgacgatttcacgaaaacgcagcaaaatgagaaaaaatttgcagtaattatgccaagaaaacaccttgacagtcggaataaagaatgctactctagtatacaagagggtgcagggccggacagtccaaatcgttgcttcccgtggcggcagttggactacaggtatcgtccggcagcgcagcgccccgcaaagcaaaattctgattggaggacttaattatggcacagtgtactcccaaatcctttgacctgaccggcaaggtcgcgctcatcaccggcgcatcttacggcatcggcatggctatcgcaaaggcaatggccgcaaacggcgctaccatcgtcttcaacgacatcaagcaggagctggtcgataagggcctcgccgcttatgaagaagctggcatcaaggctcacggctatgtctgcgacgtcaccgatgaggacgccgtgaacgccatggtcgcaaagatcaccgaggaagtcggccatatcaacattctggtcaacaacgccggcatcatcaagcgcatccccatgaccgagatgaccgctgctcagttccgtcaggtcatcgatgttgacctgaacgctccgttcatcgtcgccaaggctgttatccccgacatgatcgctcagggcggcggcaagatcatcaacatctgctccatgatgagcgagctgggccgtgagaccgtctccgcctacgctgcagccaagggcggcctgaagatgctgaccaagaacatcgcctccgagtacggcgagtacaacatccagtgcaacggcatcggacccggctacatcgctaccccgcagaccgcacctctgcgcgagcgtcagcccgacggcagccgtcatcccttcgacagcttcatcgtcgccaagacccccgcaggccgctggggcgaggctgaggatctgggcggacccgctgtcttcctggcttctgccgcttccgacttcgtcaacggcctcatcctgtacgttgacggcggcatcctggcttacatcggcaagcagccgcagtaagtttttccatatccggcatttttgcgccgtgtccgctgccttccgggtgccgggcacggcgctcttttgtttcccatatcgactttttttccggaatctgctacactggtcataataataaaaacaggaggactttcccatgaagatcgcacttatcaacgagaacagtcaggccgcaaagaacggcatcatcgaggccgctctgaagaaggtcgtagagccgatgggccacgaggtggtcaactacggcatgtacgctgccgatgacgccgcacagctgacctatgtgcagtgcggcatcctcgccgccatcctgctcaacagcggcgctgccgactacgtcatcaccggctgcggcaccggcgagggtgccatgctggccctgaacagcttccccggcgtcatctgcggccatgtggaggaccccgtggacgcctacaccttcgcccacgtcaacgacggcaatgccgtcgccatgcctttcgctaagggcttcggctggggcggtgagctgaacctcgagtactgctttgagaagctgttcggcttcggccacggtcagggctatcccaaggagcgcgtcgaacccgagcagcgcaacaagaagatcctcgacggcgtccgcgccgccaccttcaagcccctcatcgagtgcctcaagagcatcgatcaggacctgctgaagggtgccatcgccggtgagaagttcagcgagctgttcttcgcctcctgcaaggacgaggagctggccgcttatatcaagagcctgctggcttga

SEQ ID NO: 75 - DNA, 13686 bp, unidentified
  source 1..13686: mol_type = unassigned DNA
ctattcgtttccacaaacttcattaagataatcattccatttctcttttataaggttaggcttgaatctctttaaaacacctcttgctttatttccaatgctatctgctactagtggattttgaaatagataaatcaatttttccgctaacattgaagcatcacctctattcacgataaacccgtttactccattttctataagaaatcttgcacctccaggactcgtatcagttgttattactggaagacctattgacatagcttctaaaagagcattagaaatgccttcaaaatccgatgacatcacgaaacattttgaagtagctatatattgagccggattattaactttccctttaaactcgaccttatcagaaatgcctaaattcttggtcaaacgcatcatttctgataaatcttcaccatcaccataaaggcataatttaacattatctatagttttgcaaaaaaatgagaatgctatcaacagtacatctattctcttttgttgcacatgtatcctcccaacataagaaatctcatctttcctttgagaaaaaggcaaaatcgtttgaatccccgtaacaaatatcggatttggaatgacagatgttttctttttaatgatattcttaaagaacgattgggcttgaggtagttgaaagacagcaccatcagcccatctataaaaaaattgagctattttagcattcagtggcaacttagcataaggatcactcctttcacaaacaactaccggcacatgagtttggatagcagcaaatatactatacaatcctgcatcatataagaaagcaacaattacatcaggatggatttcttttatcttcttccgtaaatcaaatataattttccatcgttcggctttctcccttattacttcgctccattcaacgttctcagaaaatgtatattctgtatttgaataatagaaagtatgcagaaatatacgattctcgttatattcagataaactatttaccgtccaattaaacatttttgagtacccatcataagtgactctttgcccgacaaacaaaatccttttattcataattatcgcttataaaatctaataatctatgcacatattttacattattaaaatgcttttggaatatggcatgacctttttggcctatttcagtagcatgagatttattttgcataattttatcaaacaaaaaagctaattcatttacatccaattcgtttataataaaagcagagtttgtatcaaaataataaggaacttctccaacacgatttgttattatgggtcttccagttgaggtatattctgctattttctgactaaatcgtgctatgtcttgtagattggaagcatctaaaggaatcaataaagctaatgattcagaatacaacttcaataaatcactataaggcaacccttgtttgatagaaaccttttctcccaatccgtttatttctatctgttcttggattttttgtatatcgttttgatttccagaaagaaccaacaccaaatttgcattcccttttttagaataaatatcatacgcatctagaataaaatcaataatgcgtttatatgcagcacttccgcaatatgtgaactgttcccgaattatgtctactacagaattttcatttgtagcagacaagactggagtcatcaacataggtttcttgtatttttcacatctatttttcaaaaaatgagaaataggcaaaatgaaatcacaaaaatatccgaaataacgatcgaatgcctttgtgctatataaagtatacttagatggattttgtaatgttgtatatcgtaattcatgatacaggactccaattttatatcccaatattttcatccaaatacattctattatgtaaataataaaatgattggaagtcagaatggtatatttatattctttcctaaggcgaaataataatattaaaatctttacaagattgtacagcctacccaaaagacctttttgaggatatatgccatataatatccccgcatttttaccatgaatctctttttcaatcttattatagccccacataggattaatgatatacaccttccgaccaaagtgcagcaaaccttgtgataagatttctactttggtgtttcctgcagaatattcaaatggataatcttgtgtggagtctaggaaaatatagttagctctcactttattttgtcttttaaataataatagatgttgcagataagataatataatcgaatcttagcgtacaaaaaacagtcatatttattaattctcatattaagaccatttattttttccaataatcctaaccgcttaatttcgttatggtaatgtgaaacaactttcaatagaatacggagattaacttccaaatagtctcgcttaaaatctaaattttggcttaagacgtattctaacaatcctatgtaaaatactacatatccatacaaaaaacgagcattagtggagttttttaaattggtaagtcgatcgtcagctttatcatcacaatatatcgtatgaacctctggcaatacagagactattatacttttctgaattaagtatctaaataccaagtcaacatcctcataactccacatggattcattatatccattaacattcaaaagaggttccttggtaaacatccaagcctgtgtacctacaaaagcaccatcttgatgcagcaagaaactatgcaaacaagatttctccaatatcggagaaggcacaacatctatattccttcttttgtaatgaagtcccgcaacacacaaatcactacccttgtctatcattataccaatctgactctcaatcctatgtggaagcatgatatcatccgaatcaaaaaagcaaatatacgaacccttactatgctttaaaccatagtttcttgccgaagaaggccctttattactttggcataagtatacaattctgtcatcgttgtaatcacgaattaaagcttccaatagtgcggaaacatttttagaagaaccatcatttacaatgatgatttctaaatttctataagtttgacctacaatactgtctatagtaggtttaatattagccctgttataaactggaattatcactgatactaatggcactctcatttttcaaatatttaacaccttatacggaacgttgtgtatcaagcttgcgcgttttgcaaatccggaattatacataatgcttgttttgactaaatatattttcttagccttagccagcataaataagtcaagaaaggattttatataaggtaaatcttgtgatactgtatggtagtccatgtgatatacccttccttctatgatagaaacgtaatcaatatcctttacatactccaaaaaggtaatgctatctgatgttatgagaattttttcatcaggattctctttatgcaacatgttgattgcatttttgcactgttccatcaagttttgccgcttctcttgttttaatactgggtaattaccttctttaaaatcccccaataattgttggaatctataaaccattgcaatatactctcctcctattttctcataattttcactcaataaattcgagagtttgtctgttggtttgaaaagttcatgaaacaaccgggaaaagcatttgtctcccaaatctatattggtataaatatggttctgtgcatctcgtacaacacgctttataagatacctttcttgaaaagcatgttcaaatggtaaatctctattatatatatatattacatttgtattctgagaaaagtccattttagaatcatcaatcaaccaatcatatttattgggcatcaggtaatcttctattctaaatggagacacaaaataaatcttaaaagaaactttcattttctttgctatataatacaatgacacacaacctcttaacctgtcagaaagaccaccatgaagcatagagccgtcagctatatacactatgccttggaattgcttagaacaagttggagcttgatatctatgccgaagtacagcctcaacagcagtgttcattattttaccaacgtataaaaaatattttagccctcgcagataatctatcatacttacttactgatttatagtcttataaaaataatttttaatttcttgatcagacattttataaaggtctgtattatatgttaaaccaagaaccatcggaaatacaaaatagcttggtgtgaatgcgaatgaatattctatccataacatcaaccacataaatggtactaccaatcccactatcttacagaatttattattagatacaactatacaatttatactcatcttatacaacattaacatgtaaaagataagcccaaaagttccaaaccaagtaaaaatggactctatatgcacctcgctaattctctccatcgaggttccttttaaaaaaaatccgagtgacgacatgcggtctatttgaaataaagactcatgtccataatagggagtgcgcccccaaataacatatccattattaaaggcagactctatggcctctaaataaataaaagttctactatcctctaaggcatttgctgttctatcattagtttcgtcataatattcaaatccttctcccatataagatttcatatcaaatacgttaaaatcataacgtaaagccaaaattaaagctaacaatggtatacaaaagacaaacgtgtgagttatcgcaaataatctccttgaaagaaacgggacataaaacatcatcaatagcataatacagaagaaatatctcatatagtatatgcgctgttctgttgttaaaatcgataaaataaacactaaaatcactatgaacttacgtttcgtattcaggtagggatataataaaaagaaaaataaattcattcctagtatatctgcataattaagatataatgcaaatggaagtaacaacacaaagaacggtataatatacttaaaatatagacttgaaacccctctcaagaagttttgccttccataaaatattatgcccaataatagagacaaggaaaacagagcatctgcctgatttatcggaaacaaagaagaaggatgaatgcaaagtttggcaaagcctactactaaataggcaatgatataatataaaaagtaattggtaaattggttctgtttaatatgcagattcttttttattaagaaaacaatagacattataattgtcatagtccaagatgcaaagatctgcaatctttgaggatatttgaagctttccacaattcttgtaacatacaataaaaaaaacactgcaacgataaccgtaaaatattttattatataattcgttaccaataatagaaaggtgtttttattaataagtttcataagttatctatttttttaataaatctggcaggtacacctccccaaatctcgtatgggggaatatctttggttacgagagaacctgccccaataatagaattattaaatattcttaccccccccattattatagaattcatgcctatccatacattatcatctattattataggacgcgtaactttagcatatctgtcttcatggtcatttctgtcacctatgataacatttgccccacaaaggacattgttgccgattaacacactcttgtcgcaaacaatactaacagacgagaatccacaatcatttcctatttgtattatagccccagacttccctgtttgaatgatgcaaggattacgcagccctctaaaattgaataaggaggacgaattaaatctacaacgtttaccaattgttatattactattgcgcgttttataaaaaataattcgacctcggaagctacatcctttatcaagatagataccccaaacaaatgcttttacttttgctattacagtataatgtttttttataaatttatttcgataccaatacagtttttcaatgattgagctcataatatattttttttgagattgttttatataaatgattcgtctggttaatcaagtgattgatgaaaatgaatctgagaagcctatcaacacatatcagtccaataaatgctacgaatgaaaaaaagaccatcagtataatgaacatatatcctggataatgagtagcagaaaacaacgcgtaaatttgctcaacaaggtctaccaaagcctttcttgcatatacatcctcatcatgcatgagatatacggcgaatgttgatgccgatatattatttaggaaactgctttttatatttattcctttgaaaaacaggaaaaccaaaaccgattgtaatacgaccaaaggattgatatatcctcgaaagctccccaaataatgtctttctaaaaagattagaatagaaacaatcaagatactgtaaatacactttttcctatttacattaaaatcaaaatatctaatacttccacctatgaaatacatatagacaaagtggttgtaattaaatccattcaaattataatcactatgtaagattcctccacatactatattcaaaaaagttaatagacataaaaatagaatcacattctttctatttgcagagaaagccatgtttaatataggagcggtaacgaacaaatagaaatatatttcaacaaaccaccacggactatttctataaaagaaatggaagcgctttaaaaatgccataaaagacagtgaagtctcagagaataaggaaaaaacaatccatattgcaacagaataaaatgcacaagtaataaaaaatcggaaaaaactgtttgcttttaatttgattccaaaatatccagatatgagaagaaaggcattaacgtgaaatcctaagaaactctgtatacccattgaaaagttattggcacaattatcaagcaaaagtcgatcgcatccgtgatacaaaatgtggctacataggattgaaaatatgcagataatcctcagtaattcaaaatttgaaagccggttatttcccgatatagacatattacttatgtttaattatagatttatatagataatctctttctgatttagttaaccctagaaatagaatgacgtttgttaatattacgaatgaaataaccgcacatacgaaatcataggttattgtttgatttatatgtgttaaactgagatgatacagggttatcataaaaatggaactaaccaaaaccgtagttgaaggtctaattacagtacataaatattcacgaaaaggcattttaatcttaggtaaaatgatgtacagcctgcctatttgagttaaaatggcaaatacaatcattgaaatgtatacggagggcggagacatgccggtagaaagcgatatataggcacttggtaaagtcaacaacatgatcgccccctccactatttgaaatctttttatattaccagttgcgtgaattcctattataataggattagcaaacgagtttacaagtaaataagccattgtaagcttgaaaaagacagatgtatattcaggtacatcaatcagccacattttcaaaatgtaatcaatgacaaaatatagaggaacagctatcaagattaatatataaaagaaacttatcgagcttagggcgattaatttgtgcataaaagcaagattgttctctgcgtatgattttgttatctgaggattgatagccattcttgcattgttggcaaaagcagcaacgtaatttgacagtgaagtagagagccctctagcagcatttatagctggaccgcaaaagatatttaggagaacgctcattccttgttcaatagtcattacagaaagatttcctaataaattccatccagcaaaagagaacatcttacgaaaaacaggtctgtcaaatcttagtttacacttagcctcttcaaaattccgtctgcaatacaccaagtaaaaaatcctatcaaccacctgtatcattgttaccagaatagcgtagaaaatcaatttatctccgctaaagaaaaccagtactatcgtagcgagcaacttcattgttgaatcaaaaattgagatataagcaaatgatttcatcctttcatatgctattataagagccatgtctggtgtagacatgatattcaggatggtgacaacagaaactgaatgaagtactaaaattgaggctgtaactcggtcataaggtaagtttaacttgttgtaaaccatccattgcccaaatgactcaattaaaaccaatactaaaagaccaataccataatgtattattctcgcttgattatatattgtgcaaagcttttttttattattttcacctatcgcaaaggctatgaatcgtgatgttgcaacgctcatggttgtatttaaaaacacaaacatagaagtaaccccgcccacaacattatatattccataatcaataacaccaagtgcgtccaatacaagtctactggttataagccccattaacattgtaatgaacatccttacgtataacaatagactattttgagcaatacgttttttatttgtttctagagttcccattatagatgtagtttctgtctaaacaatctcaagattttattagaaacgtgatgaagacctattaaatatttaccaacttgagggtaggtatagcaaatacaagcttctgcccataattcatgaatatctccccctaatatatacttgaaagttttagccaatgagatcttcacagacagcccagaggttgtaccctcttcctcactaaaatatttcaagaaggatagtgcactgaacttaaaataataaggtttatgaatcaatgcgtataataatgtttcttccatttctgccaaaacatcagaagcctcattcctcagtcctaattcactaaggcacataataattctattggaaacggttttattagtttctgcaatctcttcattgtctattctactatcaacagcaaataaagggactgtttgtccgttatgcgttttatatccaatagttgacaattgtggatttgctgacaaataatcttcaacaaaagaaataaaatatttaggtaattctacattaggattatgagtataaaagtttaccggaaagtaattacgacatcgtttaaatgtgtgccaatagaaacaaggtgcaggacgaataccgaatttctgttgcaataaattcaatgcgttcaatccacttcctttccaaccgacatccacaaaagcatataaaatatcatcaaacaagccctcttgataaaaatagtcctttatgttctgctgctcattttttatgtgttgctccaatttcctatagccatgcttattgttaattaatgcaaacaactcatctagtttggaagatgcgctattccttatttcgctttcgttatacaaagaataatctacgtattcatttagcttgaaatattcaacaaccttgttaatacttaaattcttgctctctaatccaaaacatcgttcaatatttcttctatttattttatctatagttggaagatacaatgatttccgggaaacatataaatatttcaattttacatctgattcctgactatttagcatttgagccatataatacaaaatccaactatctctcgccaagaagtatagtctttttatcccttctctttttgatacacttaagacatcaagtacgaatgcaagacaaataggcacggctacatctgctgaaaattcaatgatgtcaacatttctattacccattaatgaaatcctcgcaaatcttaaaacgccaataaaactgccatataaataggccatccttttcgccttatacttgtttagtatatattgctctattggtgtatatccggtattctcaattaaataagcatcaattcccttcttttttgcatttatatagtcacttcttttattatcaccataatggcaccaataatcaggcatcaaatcttttcgaaccagctcgaataacataccgtccgatttggatacaccatactcagaagatatatagattctatcatagggctctgaaaccccttctttttcgagaacgcctctaataaaataagaatctaaatacatgtcagatataaaagcaatcacaaaacctttagatcgtttttctttaattgtcgatactatgagttcattcctatacagattctgtctttcaatctttaactcgcattttcttacgtattgactgttgtattctgaaaaacgttctgttggataacagcaataaatatcctctatggttggatgtgatttattcatttccaacctcaccatcttttctgcttcaagtctccagtttaaaaaactttcttgcttcaccacagactcgggataaagtctccttgacaacaaaaagaaaatattgtttggatatccacattttcttattaaacaagtatcaaatatatcgaatgacgctaatttcatctttcagcaattgttatatattgcgttaatgcctaaaatctacatttaaccataatcggcttagtgtattttgcaatcttcgagtatatacccattttggcatacttacgaatattttctctttttattttttgcataccactctgcaaacattctcagccctacccttaatggggtagagggcttgaagttgaaatcacgctctaaaggagtgatgtcagcgtatgttacggatacatcaccaggctgcatagatacaagctctttgtgcgcctcgaaatcatagtcggacggaagtactccggcacgtaccagttcttcctgtaatatggtgacaaagtccaatagattttctggacgattgttaccgatattgtacacacaatagggcgggatgggcagaccatcctctccattactgcattcgggagcatgctgcatcacgcgtatcactccctccactatatcatcaatataggtgaaatcacgcttgcagttgccgtaattgaatatctttatgttctctcctttcactagcttgtccgtgaatccgaagtatgccatatctggacgtccagccggaccatatactgtaaagaagcgcaatcctgtagatgggatgttgtatagtttgctgtatgcgtgcgccatcagttcgttgcccttcttggtggcagcatagaggctgactggattgtccactttgtcgtctgtcgaatagggaaccttctcattgcttccgtacacactactggaacttgcatacaccagatgctctacacctttgttcccgtcatcatacgagtgacggcaaacttccaatatgttgtaaaatcctaatatattgctcttgatatacgaatcaggattagttatgctatatctcacacctgcctgagctgcaaggttcaccaccacttccggttgataatcactaaacagagtttcaacttcttccttgtctgctatatcgactctcataaaaatgaagttatcatattcggaaagtgaatgaagccgttcttctttcagcgacacatcataatagtccgtcatcgagtcaatgcctaccacttttacatcttccacatcctgcaaaagtctcttcgcaagatttgcgcctataaatcctgccacaccggttatcagcacggttttgccgtgcaaagatacgtttttattaaatgccatcttatctatggttgtataatccatacagcgtatatactatttatcaagcaattacgccatatttttatttaaaataaaattcagtttatattttgataagcactcaatttagggcatactcctttaataaggcatttttcattgctctaaaccaagttaagtttttaacattggcttgtgaccaaggctatccgctcaggagccatgttcacgttatggtaagttacggacatctgaagctcccacgccactgccaaaatgcagcgagttgtttcgcttcgattatacattacagcttaatcatatccaaacctttggtaaatactcaattaaaaattagcctgcctcatctattttgtctttgacgtactttctcccctattgagaagttcaattcctctgtcaagttcctcctttctataaaaagcacttaaataatatttcttgtcgtcacccttcctgtctgtcaaaaagaactcaaattcacctgtagaaaatttgtttttcggtaagtctgctttgtctatgcctaattccaataagcaatgcttataatcaaaacttatggagagaagattatggtataggttgttcggcatacaataacgctccatcagactcttcattttgggatgatggaatccattgtaatacaaataacaagctcatatcaagactctttaaattttataaatgttaaattttgtattattcttcctcactaagccaatggttatgctcaataaacttcagaatagtataaagatgcctgaaataatgttcgaatgcccctgaagtataataatcatccaacgcatccacgctttttgccccaagaactccggacggtccatttacagattcactatgaccagtgctatcgtgaacaatatgttcgcaaacttggaaaacataataaaacatgttacgcccattatattcaatggagagtactacctctttgttttgcccgtcagggccgttgggattgtcttctttgacacttattttatttgtttcctttgcatacaaatcattaactatgtactgctgcaactacatcatattaaaaaacttattttcaaaatgttacaaccgtaaagtttcgctctgcaaagcccccttcgcgttggacttcctattctttgcgctacatactctcaattcatagcgttgctaatcgaacgtcacaatcatgcaggcaaaagcaagggcagaaacaagggtattgacagtgccaaaactgtctccgaacaagtccggagcacagttgcaaccatccacggagaacagacatagctgacttaacatccatttggtcagaaagaagccgtttatgcaaatgaaaagacatgctaatattgccatgttgccatggatcaccatttcgttgcattgggttctttctcatctgcgcgtattttttatatcaaaatattatcttaacaatgaacatgcgtttattatctagttttgccaatatttcgccaccaataatgccacgtttacatgttggctaaatggaaagtaaggctgtaaccctcagtccctcctaaaaatatccctcgtataaaccttttcctccacatcatccagacaagcgtcataacggttggcaatgatggcatggctctggcctttgaaggcatccaaatcattcaccactttactaccgaagaacgtgctaccatcttcgagtgtcggttcatagatgacgatctccgcacccttggctttgatgcgcttcattacgccttggatgctcgactggcggaagttgtccgagtttgatttcatcgtcaggcggtacacgccgatgacacacttccgctcctcggaaggattgaagtctccacggttgtagtagtcgtagtaaccggccgtgtgcagtacgcggtcggcaatgaaatccttgcgcgtgcggttgctttccacgatggcctcgataaggttttcaggaacgtcttgatagttggccaacagttgcttggtgtctttgggcaggcaatagccgccgtaaccgaacgaagggttgttgtaatggcttcc

SEQ ID NO: 76 - DNA, 6813 bp, unidentified
  source 1..6813: mol_type = unassigned DNA
atgcgcattatcttctgtctgatggttttcttgttcataggaaaaaacacgatgctggcacaacaactgtcctcattcgtagaatatggaacaaccctgcataccggtgacaacacccctctttggcaggtcagcaaccagcaaggactcacttcgctcgacaacaatacttacatacgtggaggaatatcctacaaacaccaacttggaaaatggaagtttgaagaagcactggatttggttgcagcagccggattcagcacgacctccttcattgtacagcaggcttacgtagacatccgttacaagtggtttggattctttgccggaagccgggaacagaattctccattgctgaatcaagagctgagcagtggcggcatgacctggtcgggtaatgcgcgtcccatcccacaagtacagataggcatacccgagtatgtacagttgctaccccgtttaggcctgaaaggagaaatctcgtacggatggtttacagataacaaataccagcgggagcaagtcggagaaaaatactggtacaccaagagtatcaaataccatcataaagaagggttcctgcgtatcggtatacccaaaggaaaatggcaactggaactcggaatgaccctcgacacccaattcggaggatacaagattggaggttccgaatcgggagacttgggcaacggatggaaggattacgtacgcgtattcttccccggccacgggcgtgaggacggaccggtaggtgaacatctggctttccaaggcaattttctgggtagcgaatatatcaaaatgacttatcgtcctaaggaagatttctccatcagcgcctatctggacaatcattttgatgacttctccgccatggccaaactcaacggttgggatggcttatggggtgtggaatataaatccaaccatagacaagccatcaacggaatcgttatcgaatatctccagactaccaatatgagcggtccactgcacggtttgcaaaattctgtagtaggtaagaccggaggagccgacaactactacaacaacggttactacccaggatgggcacattggggtatggcgatagccaatccgttgatagcatcgcctatctataataaggatggcgatatgagtttcaagtacaatcgcgttaaggccctgcatctgggatggagcggcgacatcagcagtgagtggagatatgtggcaaaattgtcccacaacagaacttggggaactcctcatcgtccaatacccgatatattagaaaatttttctacttttgcatcgttttactatattccccgtaaatggaagggctggtgcttcaacgcgtcccttgcattggatatgggagagatatatggagacaattttggattccaactgaaagtacataaaacattttaagaaaatgaactacatacaaacagagattgacggcgtatggctgattgagccgaaagtattccatgatgcccgcggatactttatggaagcatttaaggaagaagagttccgtgcacatgtcggaaacgttcacttcatccaggacaatgagtccaaatcctctttcggtgtattacgtggtcttcattaccagaagggtgattgcagccaggccaaactggtacgtgtcattaagggaaaagtgctggacgtggctgtcgacttaagaaaatcttctcccactttcggaaagtatgtcagtgtggagctaagtgaggggaacaaaagacaattcttcattccgcgtggttttgcccacggttttctggtgctgagcgatgaagctgtctttacatacaaggtagacaacgtatacgcaccacaatccgaggcatccatccgttttgacgacgaaaccatcggtattgaatggcccgttgctacggaacagcttctattatcagataaagacggacatgccgtatcgttcaaggatgcggtctattatgaataaaatatgaaaatagccattgtcggtacaggatacgtcggtttggtaaccggaacctgctttgcggaaatcggtgtcaacgttatttgcgtagacacgaacagtgaaaagatagagtcactgaaaaagggtgttattcctatctatgaaaatggactggaagaaatggttagccggaatgtgaaagcaggacgcctgcaattcaccacgtctctggagagttgtctgaatgaggtggaagtggtattcagtgccgtaggtacaccacccgatgaggatggaagtgccgacttgagctatgtgctggaagttgcccgcaccattggacgcaatatgcagaaatatgtgttggtggtaaccaaaagtaccgttcccgtaggtactgccagaaaagtgcgggctaccattcaagaagaacttgataagagagggatgaacattgacttcgatgtcgcttcgaatcccgagtttctgaaagaaggtaatgctatcaacgattttatgagtcccgaccgtgtagtggtgggagtagagtccgaacgagccaagaagataatgagcaagctctacaaaccattcctgctgaacaacttccgtgtcatctttatggacatcccttctgcagaaatgacaaagtatgcagctaactccatgcttgccacccgcatcagcttcatgaacgacattgccaatttgtgcgaattggtgggagcggatgtaaacatggtgcgcagtggtatcggttcggatacccgtatcggacgcaagttcctctatccggggataggttacggcggttcatgcttccctaaggatgtaaaggcactgattaaaacggctgaactgagcggctacaagatgcgtgtactccatgcagtagaggaggtgaacgagaaacagaagagtatcttattcgaaaagttgcagaagcatttcaataatgatttggagggaaagaccattgccatttgggggctggcctttaaacccgaaacagacgacatgcgtgaagctccggccctgatattgattgacaagctgctgaaagccggctgtaaagtacgtgcctacgacccggctgccatgaacgaatgccgacgccgcataggagaaagtatttattatgcgacagatatgtatgatgccgcactggacgcagatgcactgatgctggtgaccgaatggaaagaattccgcctgccttcatgggcagtcatcaagaagaccatggagcagccgttggtattggacggacgtaatatttacgacaagaaagatatggaagaacaaggtttcacatatcattgcatcggaaaataaagtcgcagaaagaagaaaagaaataaacagggacgttatgacaataaaaggaagtgcgattctcattgtacttgttgtctcattagcctcatgcagcaacagacaaacaggagaggtttccgtaaaggaagatctcattgcaaagcaactgttacaaggcatctgggtgaacgatgaaacagaaatgccgttgatgcgcatcgaaggggatacggtatattatgccaacccgcaaagcgctcccgtatctttcaaggtcattcacgatacaatctacatatacagcaatgaaccggtggcctataagatagaccgtcaaacggaatacagcttctggttccactcgctggccgacgaagtaattaaacttcataaatcagagaatgcagaagattctttggttttcaccagccgggaagtagaagtcatttccactactccagaagtgataaagaaagacagtatcgtaatatacaagaatacaaggtataggggatatgtatatatcaacccctcaaagatgaaggttttcaagacttcctattctgaaaatggaatcagtgtggacaatgtgtattatgataatgtaatccatatctgtgtatacgaagggaagaagatgctttacggccaggacatcaccaaaaagatgtttgcggatatattccctgccgaaatactgaatcaggccattcttgccgatatgaacttcatgggtgtggacagtaagggataccattaccaggcaacccttggcatacccgaaagctccgtatacagtctggtaaatatgattattggttttgactgtacaatgagcatagaaaaagcggaataaatccgctttttctatgtcttttcttcaccacaccacagtgtttatttcttctcaccgccattctgtggccgtttggcactgggctttccgcctttattgttgttacggccattcttatttcctcctggcctacgtccgtttccatggccgccccgtcttcctccgtcaaatgctctcggcttgtattctggtgcttcacccagctcttcgggaaccggtatcttatagatatccctatctaggaatttttcgatattcttaaagttaccctgctccttttcggaaacgaaggtgatggctacgccgtcattattagcacgcgccgtacgtccgatgcggtgcacataatcttcactgtcgtggggaacgtcgtagtttatcaccagacggatgtcatcgatatcaatacctctcgcaacgatatctgtggctaccaggatattgatacgtcctgccttgaactcatacatcacttcttcgcgctgtgcctgctccaagtcggaatgcatttcaccgacgttcagtttcatctgcttcaaagctttggtcacttccttcactttcagtttggaagaagcaaagatgataacgcgttccggtgtctcctctgcaaagaggctacggatgatgcccagcttctgattctcgtagcaaacgtaggctgcctgcacaatcttttctgccggtttggaaacagccagcttcacctcggcaggattgttcagaatgttaccagccaactgttgtatcttagcaggcatggtggcagagaacatgattgtctgccgctctttaggaaggaatttgacaatttgcataatatcgtcataaaatcccatatccagcatccggtctgcttcatccaaaataaaataagagacacgggaaagatctacataaccaaggctaagatgggctatcaaacgccccggggtagcaataacgacatcagcacccagtgtcaaccctcttttctgctgctcgaacagtattccgtcattaccaccatacacagccacgctggaaaccggcatgaaataagagaaaccttccatctgttggtctatctgttgcgccaactcgcgggtaggagccatgacaatgcaattgatggcatcggcagggtgtccgccttctgagagcttgttcaatataggcaacaaatatgcggcagtttttcccgttccggtttgtgccactgctattaaatctcgaccttcgagtatgacgggaattgatttttcttgtatgggggtgcactcttcaaagcgcatggcatccagtgcctccagcacattgccatttaaatgtagttctgaaaacttcatgtatctcttttaaatttgcgtacaaagataggaaaaagacttataaaatagactcttacagtaaaaaaataagcccttgggacaataattatctcaaggacttgcaaatttgtttcaagcatctgccttcaacggggaatatcaatgtatgaatccttaaatcccagaaagtaaagtacgccatctaagccgatggtgttgatggattgcttagcattggcaacaactttgggctttgcatgaaaagcgattccaaggccggcaattcccagcatgggcaggtcgttggcaccgtcgcccacagcaatagtctgcgcaatatccactttttccacctgagctatcaaacgcagcaactccgccttacgcttaccgtcaactacatcaccgagatagcgaccggtcagtttgccatcctctatttccagctcattggcatacacatagtctataccgtacttcttctggaggtactgcccgaagtaggtaaaccctcccgaaagaatagctatcttgtaaccgtatttcttcaaaacatacatcaggcgatccacaccttccgtaatgggaagattctctgcaatttcctgcatcacggactcatccaatcctttcaacaaagccactcgttcgcgaaagctctcaatgaaatctatctcaccacgcatggcacgctcagtaatagcctttacctggtcgcccacacctgcacgtatggccaattcatcaatcacttccgtttcaatcagagtagagtccatatcgaagcaaatgaggcgacgcatccggcggtacatattgtccaactggaaagagaaatccatttccagttcggttgccagtttcatcaactgttcttgcatggcaatgcggtctttcggagtgccccgaacggaaaattcgatgcaggcgcgtgtacgcgattcacattcgtccagcggaatacgtcctgtaaggcgcttgatggcatcgatattcatgccttgctctgcaagaatacgggtcacagcagatatttgacgggcagacaacttgcgccccaataaagtaagaatatagcggttctttccctgcatattcacccaatcctcgtactctttggcagtaatagggtaaaaacggacagtcactcccagggaggaagccttgaaaagcagttccttcataatgaaccccgaatgttgttcttccgtcttgcataaaatgcccaatgaaagagtattatgaatgtctgcttgaccaatatcaagaatagtagcatcatatttggccagaatttccgtcacggaagctgtcagtcccggacggtcttcacccgtaatacgtatcaggatgagttcagtgttcaatggttgcat

SEQ ID NO: 77 - DNA, 15507 bp, unidentified
  source 1..15507: mol_type = unassigned DNA
atgaaacaaaattggaacaaagaaagccttttggcagcctatcctcgttttgaagcacagccagatttttatctgggacggatggcagatgcggaaaaaggctttgcagatacattcggcaaagaagcggagcgttttttcagcgcacccggcagaacagaaattggcggcaaccatacagaccatcagcatggctgtgtattggcagcggcagtagatttggatattttcggtgcggcagcgaaaaatgacagccgtatcatccgtattttctccgaaggctacggcatggaagaaatttctctggatgatttggaagtgaaaaaagaagaaatcaatacaacagcttccctcattcgtggggtagcttccaaaatcacacagatgggctatacactgggcggtctggatatgtataccgtttccaatgtactgaaaggctccggcatttcttcttccgcggcttatgaagtgctggtgggtacagtcatcaacgcactgtattgcgaaaataaactgacacctgtggaagttgcacagattggtcagtatgcggaaaatgtatactttggcaaaatgagcggtctgatggaccagacagcgtcttccgtaggcggcgttgttgccattgatttccgggataacgcaaatcccgtcgtaagaaaactggatttcgatttcacaaaagcaggctatgctttgtgtatcatcgatagtggtgcagaccatgcagacctgtccgatgaatattccgctatccctatggaaatgcggcaggtagcggctcacttcggcaaagaagtgctgcgggaagtggctctggcagactttttgacagatatggctgcggttcgagaaaaagcaggcgaccgggcaacattgcgtgcatatcatttcctgaaagataatcagagagccattgacgaagcggcggcactggaagcaggagattttgacaagttcttatctctggtgaaagaatctggctattcttctttcatgtatctgcaaaacgtgtatgtttccggcagtgtggaacatcaggaagttgcttataccctggcagcttgtgaagcggcattggcaggcaaaggcgcttaccgtgtccacggcggtggttttgccggaaccattcaggcttttgtgcctcaggaaatgctgacaggttttgtggaacagatggaaaaagctgtgggcaagggcagatgtcatgtactgtctattcgtcccgcaggcggtacagaattgatgaaggtttgaaaaaaaataggagggatgctctatggcaattttggtattgggcggcgcaggctatatcggttctcatacggtatatgccctgtgtgaagcaggcagagaagtagtagttgtggataatctggaaacaggacatgcggaagcggtacatcctgacgcaaagttctataaaggcgatatttctgataagtctttcctgaacgatgtattccagaaagaaaatatcgaagcggttatccattttgccgcttattctctggtaggggaaagcgtggaaaatcccctgaaatattatgaaaacaacttgagcaaaacaagagatatgctggaagttatggttgccaacggcgtggataaattcgtgttctcctccacagcagcgacttacggcgaaccggaacgggtgcccattctggaaaacgaccgtacagaacccaccaacccctacggtgaaacaaaactggcaatggaaaaaatgttcaaatggacaggcaacgcaacaggcctgcgttatgtatccctgcgttacttcaacgcctgcggtgcccatgtcagcggcaacatcggggaagcacataatcccgaaagccatctgattcctttgattttgcaggtgcctaacggtcagcgggaattcatcagcattttcggcaatgactatcctacacccgacggcacatgcatccgtgactacatccatgtaacagacttggcggatgcgcacattctggctgtggattatctgctgaaaggtggtcagagtgacatcttcaatctgggcaacggcgttggtttctctgtaagagaagtcatcgaaaccgcaagaaaagtaacaggtcatcccattcctgccaaagaagtggctcgccgtgccggtgaccctgcacagctcatcgcttccagtgataaagcgaaaaaagtgctgggctggaaccctcagcatgacagtctggaagaaatcatttccacagcatggaattggcacaaaaatcaccccaatggtttttgagaaaggggaaagacatggtaaataaagcaattcgagatttggcgctctatggcgtcagaacagggctgattacagaagcggatgtgccttatgtcatcaaccgtttgatagatgaaatgaaactggatgcttatgaagaacccataggcgaagcggaaaccgatttggaaaccattctggctgttctgctggaagatgcctgcaaacgggaactgattcctgacagcatcgtatataaagatttgttcgatacaaaactcatgggtgttatgacacctttccccagagaagtcattggaaaattccgtgaacttcacgcagaagacccggaaaaagcaacagactggtattatgactttagctgtaatacagactacatccgcagataccgcatcaaaaaggatatgcgttggaaaaccatgacagaatacggtgaaatcgacatcaccattaacttgtctaagccggaaaaagaccccaaagccattgcggcagcgaaactggctcctcagagcggttatcccaaatgtatgctttgtcgggaaaacgaaggctatgcaggtcgggtgaaccatcccgccagagaaaaccaccgcatcattcctctgcgcattgcgggaaatgactggtttttccagtattccccctatgtgtattacaacgaacactgcattgtgtttaatggacagcatgtacctatgaagattgacagaaacgcttttgcgaaaatgttcgatttcattaacttcctgcctcattactttgtaggctccaacgcagacctgcctatcgtaggcggttctatcctgtcccatgaccatttccagggtggacggtatacttttgctatggaacgggcagaagtggaacggaaagcagtctgcaagggttttgaagatgtggaaatgggcgttgtgaaatggcctatgtccgttatccgtatttcccataaagaccatcatcgtttgattgattgcgctgatatgcttctgaaaaattggcgtggttatacagacgaagatgcctttatctttgcggaaacagatggagaacctcataacaccatcacacctatcgccagaaaacgtggcgacaaatatgaactggatctggtactgcgtaacaacatcaccacagaagaacatcctctgggtgtgtaccatcctcacagccacctgcaccacatcaagaaagaaaacatcggcttgattgaggttatgggtcttgcggtactgcctgccagactgaaagaagaaatgcagtgtctgaaagaagccatcctttccggcgctgatctgaaagcagacgaaaagaccagcagtcatgcccagtgggcacgggaattcctgaaaaaatatgatactgtgacagcagaaaatctggacagcatcattcaggaagaaatcggtctggtatttgcgcaggttctggaagatgccggcgtatataaaagaacagcggaaggtcaggcggcatttgaccgcttcctgcgtcactgcggcgcggaaatctgattccttccggcaaaataaaataacagacaaaatacagaagagcagggttggagaatccctgctcttcttagattgtagaaaaattgagttttttatttttttcaagaacgcggaagggtttggggaacaaagggttcctcaacttaaatccgcagtcggaatttacttctgacgaggaaaagccgaagtttcaaagcttttagctgatggagcttcggctttatacttctgtttactcgtcaaagtcttgaatgaaatgagactttgacgacatggtgtcgattctttcgacaccatgagaagagcagggttggagaatccctgctcttctgctgtcttggaatatgttatcaaatatttgaaattaagctattataattgcatcatgccagacatgatgcagccgcctttggcaccgcagtccatgacttcctgtaattgtttttcattgattttgatgccgccaatggcgtaaacaggaatggataccctgcggcagacttcttccagaaaaacaagtcctctgggtggaagtccttttttgcagtctgtggcataaatatgcccggcggtgatgtaagttgcacctagtttttccgcttcttccgcctctgctggtgcgtgaatggaggttcccacaagagagaaaccggaaagttcttctttgtgggcacggagcagaggaaggggcagatggatggcgtcacagcccagttcttttgctgcacggaaataggtgtgcaggatacagggaacgttatgacgctgacagattaccaatacatcttttgccagagcggtgtattctgcttctgacaagtctttttcccgcaggatcagacctttgggatggtgtttgcagatttcttctatctgttccagaaaagggcgtttgcttaaggtgtggtttgtcaccgcaaggatatgggaaaacaacgcatcatcatacatagatataatcgctcatgatcggctggagattgtttttcagcagtgtgtcataaacttcctgtacagatctgccgtcatcgatctcgaactggtcgtctcctttcttttcggtttcctcggaatgttcgccaataccggtgctgacacctgcggaaattttggtggcagcaatgttcaccagattgtcacgaacacgggcacattctctgctggaaatggtgatgtttgcgaaaggcatgaacagacgatacgcgcataccacctgcaaaagctgggtttcgtgaacatccattggattgatgcggtcattgttgatgatggggcgtagtctgggacaggagaatgcgatttccgcatgaggatatttccgctgaagcagataagcatgatagcctgttgcgaaagcgtccttgcggaagtcatccagacccagcaatgcggcaaaaccaacaccacgcataccgcctttcagggcacgttcctgagcgttcagacggtaagggaaaatccgcttgtgtcctgccagatgcaaggtttcgtatttatcagaattgtatgtttcctggaaaaccgttacataatcggcgccgcattcatggagatatgcgtattcgtcggagttgacaggatagatttccagaccgatgactttgaaatatttctttgcaattttgcaggcttccccgatgtattgtactgtggatttgctgcggctttcaccggtaagaatcaggatttcctgcaatcctgttttggcgatggctgccatttctttatcgatttcttcttcgttcagctgggcacggttgattttattgtggcagttgaaaccgcagtaaatgcagtagttttcgcagtagttggcaatgtagataggtgtgaacatgtatacactgttaccaaaatgctttctggtttccacacgggctgcctgggcgatgtcttccagcaagggcagagcggcaggggagagcagtgcggcgaaatcctcaggggtacggctgtcatggaccaaagcacggcgtacatccgcttctgtgtacttgtcgtaatcataagcttccatggccgcaacgacctgatccatcacatcggattccagcacttccataccgggcagataggtcatgtggtcaatgcggtttttcttttggtcttccagaatttcttcacttaaaatactttcgttcaaatgttcctgactcatgttctttcacctctcaatcctgcaaaaatcctgtcagcggagaagatgcactagcgcctttttcaagggttctgccaagacctgccagataagcgctgcgtcctgcttcaatggcttttttgaatgcttctgccatcaattccacgtttccggcggtggcaacagcagtgtttgccatgatggcagcagcacccatttccatggcttcgcaagcctgagaaggtctgccgatacctgcgtctacgatgatgggcaggttcatttcatcaatgagaatctggataaattctttggtgcacagacccttgttggaaccaatgggggcacccagaggcatgatgcaggcagcaccggcattttccagatctcttgcaacattcagatcgggatacatgtaaggcattacgataaagccgtcttttgccagcatttctgtggcacggatggtttcctgattgtcaggcagcagatatttggagtcacgcatgatttctactttgacaaagttcccgcagccaagttctctggaaagttttgcaatgcgcacagcttcttctgcgtttctggcaccggaagtgttgggcagcagggtaacggtatcgggaatatagtccagaatgttggcaagaccgccttcgttggcacggcgtacagccagtgtgatgatctgtgcttctgctttttccacacaagcttttaccagatccagagaaaatttcccggagccaagaatgaaacgggatgtgaattcgtgtccgcctaaaatgagtttgtcattgttctgcatgataaaattccttctttcttccaaaatcagatattatacggtttcttcgcccagaagcagacgggcgatcatattggattcatgggcagcgcagagggccgctctgggtgccatgaggcattgtccatgggcaatatcggtggtttcgtcgccacagagataaaaattacagccaatctttcgggtatggatggtgttgctgctgccgaagcctgccatgccggaagcacagaccagttttttctggggaaaacattccagtatgccgttgacaaacattgctttcgtttctgcgttgtcgaaggcttcgcagatgatgtccgcatcggcaaaaagggttttcagattttcgctggtcactttcacacagtctgtggcgatgtccagataaggattgatctggagcagctgttctttcagagcatctgttttatacatgcccacatggcgtagcagatattgctggcggttcaaattggtcaggtctacacggtcaaagtcaatgaggtgcagatgtccaaccccaaggcgtgccaaagcgaaggcaacattggaaccaagtccgcccaggcctgcaatggcaacatgtccggcatccagcttttcctgataggctgctgtgtggcgttccaccaatgcttcatagatttctgttttcgtaaatggatgcatcatcagccgcctcctacaaaactgacaatttcgatcttatcgccgtcattaagatatgtggtgtcgtattcgcttttgggcaggatttctccgtttttttctactgcgatgtatgtccggcggtagttgttttcgtccagatatacaccaagggttttcggtgcggacaaggtcaatgtttttccgttaatggtgatcattcagaagcctcctttccagcggcggcaagaaaaaagagctcacaaagaaatacacccgtggtggtgcaccccttcatgaactcttgttcactctcaacgctgccaatattttgtttccgtaaaaagttctggctttggtctgtctgtacgcaataaaaatagggagatgcaacgcatctcccgaaaattcattctatcgattcctacgttggcattatccaaatcaggtgtaagggtcgaagcaaaacttcctctcagcccaattcattgagctcccctgttttctttttacgagaacagtatatacacggattctgaaaatgtcaacaggcaaaatgacaaaaagcataaaattttcggaaatatgcacataactttacatgttaaaatgagtccataacaaagaggaggaattttttatgtggcacttggaagaagaattacagaaagaaggggtcagcgtcagcctgcttaaggaaatccaggagttccgcgaaagtcatggagtggatccttctgtggcaggccgtgtaccggtaccccgttttttatattatggcaaagaaatctgggaagaagcggcagcagcgctattgtgtggggaaaatctgctgctctccggcccgaaagcaacggggaaaaatgtattggcagaaaatctggcggcagcatttggcagaccgtcttgggacatttctttttatgtaaatgtagacgccgcttctctcattgggacagatacattccgggataatcaggtggtgttccgtgaagggcctatcagccgctgtgcccatatgggtggttttggcgtgctggatgaaatcaacatggcgaaaaatgagtctttggcagtgctccacgcaacattggacttccgtcgttccattgatgtgccggggtacgacagaatccctctgcacgaagccacacgttttatcgctaccatgaactatggctatgccggcaccagagaattgaatgaagctctggcatcccgttttgtggtcatcaatatgccggttatttctgaggaaaacctgcggaagctgctgaaacgggaattccccacactgaaagataaatgggcagaacagtttgccgctttgtttagagaactggaaacaaagtgcgataacgcggaaatttccacaaaagctctggatttgcgtggacttatggcatccattcatctgatggaaaaaggattgaaagctgtccgtgctctggaaatgggtatcatcaacaaagctttcgatccctttgaacggcagttggtggcagatgccattgccgcaagaattccacaggatctggactttggaaagctgtttggtgatcgctgatgaaaaacagagagagtgcggagcgtcgtgccatcaatcagatttggaacgccgcacaagactattccttgcagccggtgtatgttgcctttgatgaggacggcgacgcagatttttatttcaatacggtcatcggtgccgtatatcattattttcagtttgaaacgttggataagatgtttacctaccttcagcgcagacaggatggagaactgtatgtggaactgctttggctggggctggaaaactgcgtctttggcaaagccaaggatgaacgcccggctatggcggagttgcggcgggcttatgcggaaaaatttctggcaagacccaaagatcatgtggtggaatctttgctgtgggatttgaagcatgctcattgccagcgcatattaggtcaggcagatgatttggatgaagaaaaacgaaaaatactggacgcattggaatttcccgcagactgtaacacagaacaggtgacagatcgcatggatcgtctactgaaccagtattttttcaaaggacatttcaaagagtttgaagaactgggcggccatatcagtgattctccgtttttctggcccaagggctggggaaaacgggcaggcagtgcattgcggcgtatcgattgggaaggcaaaaccacagaggaaaaagattccctcatgggcaaagcaagaaagctgtatcagcggctgacgttttccagacctagtgctaaggtggtgcgtgcctatgtggaaagctgttttggaaaatccatgttttccacggcagaaatggcagaaatagaaaagaaactctgcacggaagcccatcgggaatgtctgctgcatttcacccgaggtgagtttacagaaacaggagaactgaccagggaagcggcagaacagcgggaatttgctgaaaaacagcgagaagccaatgaagcttattttcaggcaaatgaaagccagaccatgctggcagttaataaactgacagaacgcatacgcaatgccatattattgcagctggaacccactgtatatcgaacccgcgcggggaatctgctggcagggaaggtatggcggaatgtgtatctccatgatgagcggatatttgaaaaaacatcggatagccagctggataccctgacggtggatattttgctggatggttctgcttcccagcgagaacagcaggcgaaagtggcaacacagggatttatcattgcggaaagtttaactcgctgcaacattcctgtgcgggtaagcgctttcagcagtgtcagcggctgtacggtcatgcaggtattgcgggattaccatgacactttcagaaataaggatattctgcattttctggcggctggatggaatcgagatggtttggcattgcgggcagcggattacctcatggaacaggagagaagcgagcacaaaatgctcatcatcctttctgatgcccaccccaacgacgatcagcccatgccgtcgaaagaaggactccatctgcccaaagattacggcggagaagctggggtgcaggatgtggcggaagaagtgagtcgtctcaggagaaaaggtatctgggttatttccgtctttacaggaaatgaccgggatttaccggcagcccataagatttatggcggagaattggcaagaatccgttctgtcagctggtttgctgacacggtagggcggctcatacaggaacgaatcagagaaatgtaaaagtataaaaagaccagatgatattgtctggtcttttttgtatgtccgcatgttttattgggaatgataaaatcattgtattgcaggggtggttatggtagaatcaatgtgcagtatatgatttttcatgacatatcgaacccatgggttcctgacaccaaaaagaaatttgcggcggaaggtacagtatggaaacacagggcagttatgccctttttcccgtacctttcgtggtacggtttttcttttatcaaaccaataggaggtatggaaatatggaaacaaaaaatgaagaaagcagaattgcggtcattggcatcgttgtggaacaggaagcgtctgtggatgtgctcaacgaaacactgcacgaataccgggaatacatcatcggcagaatgggcattccctatcgtgagaaaaaagtgaacatcatcagcattgccattgatgccccccaggataagatttccgctttgtccggaaaaatcggcaacctgcccggcatccagtctaagactgtatattctggcgtgaaggcatgagtttagcggcaaatttagccgaaaaactggtcacggaacacgatctttcagaagaagagctgctctatcttctggaacatcgtcaggaagtggcgccttttgtgcaggaacaagcccaaaaactttgtcaggaggtttttggcaaagaaatctatatccgcggattgctggaaatttccaatatctgcaaaaatgattgctattactgcggtatccgcaaaagcaaccaaaaggcggagagataccgtctgacggaagaagaaattctggaggcgtgccatgcgggttatgccttgggatttcgcacatttgtgctccaaggtggcgaggatatgtggtatgacgatgaccgtctgtgtcatttggtatctgctatccgaaaaaattattccgactgcgccattaccctttccgtaggggaacgcagccgggaaagttatgaaaagctattttcggccggtgccaatcggtatctgctgcgccatgaaacagcaacagcgtcccattatgccatgctccatccatcggatatggactttgcaaaccgtatgcggtgtttgcaggatttgaaggaaattggctatcaggtgggctgtgggtttatggtggactcgccccatcagactttggaacatctggtgaaagaccttcggttcttgaaggagtttcagcctcacatggtaggcattgggccatttctttcccagaaagatacgccttttgcccattatgaaaacggctcgggagagctgacgttgtttttgcttgctgtcatacgtctgcttttgccgaaggtgcttctgccgtccacaacggcactgcggacacttttgccgccgggaaaggaatggggcattgcctgtggcgcaaatgttatcatgccaaacctttctcctatggaggcacggaaaaagtataccctttatgacaataaacgcatcatggggacagaagcagcggagcagattgaatggctgaaaaagcagttagaggacattggctataccgttgccgtcaccagaggtggcagccccatgttgaaagaaaaaaatcactgacaggaaagagaaatctgacctagaagaaaggaagaaaagaatatgtatgatcccaaatcaatgaaagcggaggaatttatctcccacgaagaaatcctggacactttggcttatgctcaggaaaacaagagcaatgaaaaactcatcgacgcaattttggaaaaggcaaaactgcgcaaaggcctttctcacagagaggcatctgtactgctggcttgcgaaatgcctgataagattcagcagatctatgctttggcagaacagctgaaaaaagatttttacggcaatcgtattgtcatgtttgcgcctttgtatctgtccaattactgtgtcaatggctgtgtgtattgtccttatcatgccaaaaacaaacacattgctcggaaaaaactgacacaggaagaaatcgtcaaagaagtcatggctttacaggacatggggcataaacgtctggcgctggaagctggggaagacccggtgaataaccccattgaatatattctggaatgtattaagaccatttattccattcagcataaaaatggtgccatccgccgagtgaatgtgaacattgcggcaaccacagtagaagaatatcggatgctgaaagaagctggcatcggtacatacatcctgttccaggaaacttatcataaagaaagctatgaacagctccatcccacaggcccgaaacacaactatgcctatcatactgaagccatggacagagccgtggaaggcggtattgacgatgtaggtctgggggtattgtttggtctggaacggtatgcttatgaatttgcgggacttttgatgcatgcggaacatctggaagctgttcacggtgtaggccctcataccatcagtgtacctcgtgtgaaacgtgctgacgacatcgatcccaatgcttttgataatggcattgatgatgaaatttttgcaaaaatcattgcctgcatccgcattgcggtgccttacacaggtatgatcatttccaccagagaaagcaaggaagtccgggaacgtgcactgcatctgggcgtttctcagatcagcggcggctcccgtaccagcgtaggcggttactgcgaagaagaaccggaagacgaaaattcggaacagtttgatgtgagcgataaacgatcattggatgaagtggtacattggctcatggatttggactatattccaagcttctgtacagcatgctatcgggaagggcgtactggtgaccgcttcatgagcctgtgtaagagtggacagattcagaactgttgtcatcccaacgccctcatgaccctgaaagaatatctggaagattatgcttcgccggatacaaagaaaatcggggaagcactgattcagaaagaactggggaatattcccaaagaaaaagtcagagaaattaccgtacatcatttgcaggaaatcgaaaaaggcaatcgggatttccgattctaaaggcaggaggtttttatgggtttacaggatacaccatccgcggaacgggtgcaaattggattttttggctgccgcaacgctggcaaatccagcttagtcaacgcagtgaccaatcaggaaatggcagtggtttccccggtgaaaggtaccaccacagacccggtgacaaaagccatggaattgttgccccttggccctgttctaatcattgatactcctggtattgatgatgaaggaggactgggagcgcagcgtgtgaagcggacaaagcagattctcaatcgtatcgactgcgctgttctggtggtagacagtgtggcagggaaaacgaaagcagatgaggaacttctgagcttatttcaggaaaaacagattccatttcttgttgcttataacaaaagcgacctgcaaatgcccgttttatcaaaagaaaacgaagtggcagtcagtgcgctggaaaaaacaggcattgaagaactgaaagaacgcattgctgcattgggcaaagaaaaccagaaggaacggatgctggtaagagacttggtaaaggcagaagatttggtggtgctggtgacacccatcgacagttctgcgccaaaaggacggctcatcctgccccagcagcagaccattcgggatttgctggaagcggatgccattcctgtggtgacgaaggaaaatacactgaaaaccacattggaaagtctgggaaaaaagcctgccatggtcattacggacagtcaggcatttgctcaagtcagcaaggatacgccgttggatattccattgacttctttttccattctcatggcgcggtataaaggatttttggaaggtgcagtgcagggcgtagcagccatagaaacattgcaggatggggataaagtcctgatttgcgagggctgcacccatcacagacagtgtgaggatatcggcactgtgaagattcctcgttggctgcggcagcatacaggtaaggaattagaattggtgcatacttccggcaaagattttccagaggatttatctccatatcgcctggtgatccattgcggaggctgtatgctcaatgaacgggaagtggcatatcgccagaaatgtgctgctgatgcagggattccttttaccaattacggcattgccattgcatatatgacaggaattttgaaacggagtatcgaaatttttccgaagctgtatacattgatttaatataaaaaaagactatgggaaccaccatagtcttttttaatatcaaagcggaaaatgtccgctgcggcgcagtgccaccagaatgccgggaatcaggatcaattgcagtatgatgccgggaatggcttccagtaaggcaccggaaaggaacatctgccaagtgaaggcgttttcaccaataccaagcagcagaacttccacaatgcccgataccacacggcctaaaatcatggcagaaatcagggcgatgtaaagagaagcagtggatttttgtttggaatgtccgtagatgagtcctgcaataagtccataggctgccagctcaaatgccatggcaatggcaacggggaacatgtgtggcatgccgaagatcatactgcggcaaatgggcagcagaaagcctaaaaacagcgcatactgccatccacagagaaaggcgcagagaaaaacaggaaagtgcatgggcagcagcatattgccaatctgtggaacttgtcctgtcaaaaagggaagtaccaggcccagcgcaaaaagcagggcactgacggtcagttgttttgtggatcgattcat

SEQ ID NO: 78 - DNA, 23935 bp, unidentified
  source 1..23935: mol_type = unassigned DNA
ttaaattttaaaatcttcttccttcagaataatgcgatctgacgaatccgtagattttccaaatacacgtcttgcaagatgctttacatttgctttctgtgaatgtttaattgcttcatccatgatttcttttacttccgcaactgtaaccgcatgatcttcacgctgcattacatcaattcggctgtaaagtgccagaattcccatttcatcaagcttatatccattttccttcgcataagtctgaccaaatgttactaactcatcattgatgaataccggaagttcaagcttagaagtgaatttctttttgaaatccggattagctgtcataattctctccagaggttttctctgatcttcaagaacaaagagaagctctccggtctttcttgacatcaatgcattcagttccttgattgttctggaattcaacttaccagccttttcgatgatgatcgctccaccgcgaagcttctggataatattgccaagttctttcttattcagtgactcacctgtaacaatagcaactttaccctgtttcagatttctttgtttctggattgcctttacaatatctactgcaagtactgtttttccagatcctttacggccaataatcattaagttaccggttcttgaagttccctctctctgggcacgtctgtcattatcaagtactgcaacaatctgttcactcattcctctgaccggtacgaagtaagagaataatttcttctgctcctctgtcagtccggctttcagtccaatctcactggttgcacttaagtcatatcttcctgttacaacaaatccggtatcaaatggaactccgcttccttttgacttcttaattctgcgctgaatctcttcctcagatggttcttcaatttccaagtctccttcaaggtcttccggatccggaatctcaggaagctcatcttcaaagtcgtcttcctcgaaatcatcttcctcaaaatcatcctcttcctcgaagtcgtcctcttcctcgaagtcgtcctcttcctcgaaatcgtcttcctcgaagtcgtcctcttcctcaaagtcatcctcttcgtaatcgtcgtcttctacataatcatcttcatagaagtcatcgtcttcctcaaagtcgtcttcttcctcaaagtcatcctcttcctcgaagtcgtcctcttcctcgaagccatcctcttcctcgaaatcgtcctcttcctcaaagtcgtcctcttcctcgaaatcatcctcttcctcgaagtcgtcctcttcctcgaagccatcctcttcctcgaaatcgtcctcttcctcgaagtcgtcctcttcctcgaagtcgtcctcttcctcgaaatcatcctcttcctcgaaatcgtcttcgtcctcggattcatcttccgggaattcattccactctgcatcgaattcctctacttcttcctcatcttcctccgggaattcatctgcaaaaccatcttcgtcaaaatcgtcttcgtcgaatccatcttcctcttcaaaatcatcttcttcggattcctcgtcttcgaaatcatcctcgtcttcggaattgtcttccgaatcatcctggttttctgtttccggaatttcttcatcttcttgtacttcttcgatttcttctacagcgtcgacttcatcttctgcttcaaactcttcgtcctcaccctcaaagtcttcgtcttcaaactcttcctcttcgaaatcatcttcatcctcagaatcctcgtcctccgtctcctcttcttccgaaactgcttcaacaatctcttcttcaggttcttcttcagactcttcaggttcttccacaatatcgtccagttcttcttctgaaataaactgatctacaatttcttcttcaacagattccccttctgcttttgcaagctccagttcctcttctatatcaaaattttcctcttctttctcctgtgctgtcacacgatcttccagctcttccacaagctgtctgatatcatcagaaagcaatgcctttcttcttgcttcctctgcctcaagacgagccttctcttccgcttcacgacgagccttctcctccgcttcacgacgagccttctcctctgcttcaagacgagctttctcttccgcttcacggcgtgctttctcttctgcttcctgacgggctttttcttctgctttccgtcttgctatttcttctacctcgcgtctctctgcctcaagtctttctgcctcacggcgggcttccagtgcttctctctcttttctaagtcgttcttcatcggatgctttttgctttgcaatcgcctcagcatttaccttctgcttggcttcccattccatcaagatgtcttcaatcttcatctgaccttcaatgcggagttcttcttctcgttcctccatcttcttctggtcttccggattaattccactcgccatagccacgccattagccagtgcttcttgaagtgtcgcacccttcacaactgtcgtaatagacttttttggtccttctgccgcatgttgaagaattccttctaactctctgacattccgagcttcttccggagtttcctttccgattggttcaatgactggtgcttctgtttctacaacttctggttcttctgaaacagcttcttccggctcttctgaaactggctcttctgaaactggttcttctaaaaccgattcttctatcggaacctctttgtctgccttggcattttcttccattgccttcaatgcttctccaagctctgctgtcggaattcttctcgttgcatccagaccatccacagtttctgttgtattggctcctgattcctgctgttctgcctccgcagcttctgatgcttcctgcgctgctttaatctgttcttttggaattgatacagtatcctgtggaatactctttacatccttaagcgcaactcgctcaggttttttatccactgctttcttaggctcttttttcggtacgcctttatactcatcgtacttttcctgttggagtggtgtcagtggtttgtacttcatcttcaattccattgcctgatatacatattttccttcgctgaaccacaagatcaaatcgtcacattcttccaggcactttgaggtcatgcctgcttcatgatatagctttgcgagctcatacgcccatttttcaatatattctgcctttttaaattcttccagtgccgaaatctgttctgacagatcagacccttgtgccttcaaaatccgatatttcaaaatgaattgattcggatctctcggtgccagttttacaaattcctcataacagtccgaagcctcattcagatcattcagtttcagggcaagtactgccagacgatacacaacctttctgctggacggtgctctgtcaaatgcgatcataagcgtatcacggctcttctgaaactccccgttattctcgtagatttcgcttactgtatttaacattgccgggctcttcacccttctccagtctattgtatcggcaatttccattgcttttctaaattgtttcttttcgtaatgttcgagcatctgctcggtttttacccgatattcatatttatccaatattctcacctcaaattttttgacaattctacagatacaagtttatcatacactagtcttattgtcaaaaacatacgagattttgttacaaaaatgttacaaaatgatatcgtccacttttttgaaatctttcaggctatacgcttctataatatttccctggataacataaagcgtatcttctatataaatacctcttgtgatcctcatattatttccattaatttcctcatgcatcgtacatgtaaatccttgtttttcgtcataagaaaatgtatagtactcccggccgccttcgctgtctgcagcaaaaccaatcagatttttctctgcatctactaaagctgccttataatcataagaaacatctgtatagtacacattttcaatgacataggtctgctcctctttcacatttttcggatcagaaatatcgaacatcgtcaatttcacgccatctgttgacatagttttttcatcaacattcatcccaatacccagaagcttatttttcccatacggatgcagataatctgaaaatccaggtatcttcaacgctcctatgatttttggatttttcggattcgacagatcaacggaaaataacggatccgtctctttaaatgttacaaagtatcctgcctttcccataaatcttgcggaatacaccctctcatcttctgccaagcctttgatggagccggtttctttcagttcttgattcaaaacataaacactgttcgtgtcgccatcggtcactacaactctcagatatccatcatattcatcaatagaaaatgaatcattaatatagccgtctattttgcactgtgccccagccgtcaatttcccactttcataagaaacttttcggattgtcgtcacatcttttccggaatattgccacacattttcataaaaataaatattatcgttgctcacatataaattgccaccgtctgccaaaagtgccttactgtgcgctgtctcatttggattttccagagaaactgatgtgatgattgaatacatatctgcctttgaaatggacggaagacagatatctgtttctttgatcagattatcgtttacaagtggtatataggacttcggattcttcgccgttatcccaccaagtgttacataataatcactgaataagtataagtatccatctgcaattcttgaagaattgtaatatccactctgactgaccctgccaacttcttttggattttcccggtctgaaatgtcataagttactgcggtcgtattagccctctgaccatatccataatcatcatcattccatttgccgcccacataaccgtcacacactacgattaattgatttctttcaatatccagatacatttcctggatttcagaaacatcttccactgttatagtcgccgtttgcttcatccgattatcgcgggtatctataatggcaatctgatcgctcttatcttttaacacgtaaaggtatattccatctgttttagctgtatccccctcatccacaccttcctgacgtacatttgtctcagaataagaaccgcttgccattccggtgtccgctgctgcagtactgctttcttcaatattctgtgctacatctccacttgccttactgtcagctgattcatcgactcttatatcattcaataatcttgccccgtttgaagtgtatgcactgtctctttcctgatctttcttatatttttccaaatatgcatagacatccttatattccgccgcactttctactttcgtactgtcactgattgtcacatcactgcctgctatcttatcatctcgagtcgcgtcttccattttaaaataattctggtataccatcactcccacgatcagcaccaggcatgcggctgccagcccaccgattctcgccggagtccacacttttttcttctttcctgcaagctttgcttcaatctgtctcggttcaagcgctttcggcaccggaacctgttctgacttttccttaattttccgaatcatgtcctgctcattcttattcataaaatgtcctcccatccaacacacactgcatcttctccagcgcccggcttcgttttacccggacagttcccggcttcaggcttagaatcttcccgatttctgtgctgttataaccgccaaacactgacagcccgactatcatttgctcttcttctgaaagaataaaaaatgcatttctcacatccatcgcaagtcctacatcttcttcatgaattccttccacctgtccttccgggaaaaaatcttctgtctgctgtattccttctttcgccacctgtttcaatcttttcttacatatatttgacaaaattgtaaaaatccagctcttgaaagcttcttcttttcgaagtttatgtatatgttcataagcagataacactgccgcactcaccgcgtcttctgcctcatgcggatcacgcatcagacaaagcgcgtagcgatagaggtcttgatagacctgctcatatagctttgaaaatgcttttgcatcacatttcattctttttcctcctcaatttgtttttctcaagaagttctccacactcctccattgacttatccaactgccgttcccaatacccagtgtaaaaagtattattacttcttctacatataagagtcccaaaatatcccaagtgttacaaaaaggcgtcactttttttcataagtgccgccttttatttacattcgtttattcaattatattaccgccgaaaatactgcgcaagataaaattcagcgtaattcccagtgcaacggaacatagaacgtgaattttacctatcggattatttagcccttataataattaatcagacaacctttgagaataatctctctttctgcgtctgtcatatctccaagtgtaaatgtgacttctttcaatgtatctccgactacataagctttgatctctgcatctttgttttccactgcttttctgatttccggtacaaagatataatcgccatttttgaagcttaatttcttgtcgtcttcttttgtgataaatggaagcattccccagttgatcagattggagcgatatctttttgtcgcatattcatttgcaatattcgcccagccaccgagcaccttctgacaggaagctgcctgctctcttgctgaaccgtcacctggttttactgcaaagatcgtacttccgactccgatatttccttttcctgcttccggatatttctcctggatctttgccataaccggttttaattcttccaatacctctaacggacattcgcctgcttcgattgctttctgtgctttctgtacttcctttgcacgtcccacatatgcaggatcttttctggaaagtgcaaactctgccagtccaagtggattggatctgtaagaagatgtttctccagatgggatcagctcatctgttgttgtaaccggatcgtgaatctctgatacaactttcaataccagattctccggaagtgctgacattgccggccagtctttgatattcggtccgaacttgatctttgtatccggatcagccacaccatgactgtcaaatacacgatttgcataaatcttctggtcaaagtggtatttctgtcccttgtattctacgtccatatctgttgcaggtgtcaggaaacctttatttgctgctgttgctgcaattgaacgggcatccataagtgcaacggatgcaatctgtccactctgaagcttggaaccttcacggttcgggaagtttcttgtagagtggcgaatagaaaatgcgttatttgccggtgtatctccagctccaaagcatggtccgcagaatgctgtttttacaattgttcctgcttccataagatccgcaactgcaccgtttttcacaagttccatatagattggtgtacttgccggatatacactaaatgtaaattcatctgagccaatgtaatgaccttttatgatgtctgctgctgcgcagatattttcaaatccaccaccggcacatcctgcgatgattccctgatccacataaagttttccatcaatcactttatcctgaagtgaataatccacagcaccatccaggctcaccagtgctttctgctctacatcgtgaagcacgtctttcagattcttacgtacatcgtcgattgtatatacatttgacggatggaacggcattgcgatcatcggacgtatctcgcttaagttcacatagaccataccatcataatatgtaactgcaccaggattcagttctttgtaatcttcacttctgccgtggatctcatagaactccttaatcttatcatctgttttccagatagaagacagacatgttgtctccgttgtcataacatcgattccgatacggaaatcagcacttaacttctccacacctggtccgacaaattccataactttattgtttacataaccatttgcaaatgttgcaccgataattgccagtgccacgtcctgtggtccgacgcctttgaccggctctccgtccagataaattccaatcacacctggcatcttaatatcatatgtcttattcaggagctgctttacaagttccggtccgccttcacccatagccatcgttccaagtgctccatagcgggtatggctgtcggatccaaggatcatcttgccgccgcctgccaacatctcacgggcaaactggtgaataactgcctgatgcggcggtacatagacacctccatatttcttcgcacaagtcagtccaaacatgtggtcatcttcattaatcgttccgccgaccgcacagagtgagttgtgacagttcgtcaatacatatggaattggaaacttctccagtccggaagctctcgctgtctgaataattccgacaaatgtaatgtcatgagatgtcagcttatcaaatttgatctgcagtctctccatattgcctgatatattatgagcctctaaaattccgtaagccattgtctgcgttctggcttcctccttggatacctcacggcctgtctttgcctttacttctgcttcgtccgtaatgatctcggtgccatttaccagatacacaccgccgtcatataatttcaacatgtctagtcctcctgattacctgtaattatattcttatgaataattacctttatttccagattgtatacatgtatatattagcacatcacatgacatatgtccaaccatttattcaccctttttcattcccttttcttcaataccttctgataaattacacatatcattcaactcctccctgattttttcatcgactggaatatctaactcttcataacgaaagctttacctttaattaattactgtctcaaacttaaaatgtcaaaacgccttacattttagctactaaaaacacaaaatattattttataaatattaaccaaataccctaaagaggaagattccacaaatccttcttatgaaatcttccccttttgttacttaaatctttttaaaagtcagaccttttcttacttttctttttcaactgctttcttaacagtttccacaggtactcctagtatctcagaaaccttttccaaatcaccgatatttttatacgcattacaaatgagttgttctgtcacttcttctgttacctgatctcttacttcctggaattcttctgccatcaattcttttaatgcttcacacatactcgatttcacctccttcattgccttccagtttgcgaaactcttgtaaatgccggagcgttttcacaggataatgattacaaataaaagtaatcgttaattcttccggtttaatttcacacacatgctctgtatccgactgataaaagcagcaataaccatatactttatagaaatcattgattgtcagataatcgtccgggcttttatattcaataatattgtgctttcggaatatccgtcctatgttcttttgaatcttttcttcaccacgaattttaatcaccaattcatcaatccgcattggctgtttcgataataaatgttccggttcaaatgtcattttttcaatttcattttcaaattcaatctgaatagatgcttcaaatgccgggtgccattctatgatttttcttttgtccatctaattctcctctcattataatttttttggtacctgttttcaatagaacttcctacgtttacaagttacatttttcatatcgggtaattgtttcagaattcgaaacgccgaaatgaacaccttacggcttgaatattcggagactagacttcctcctgaattggacatatcatagcatactcttctctagaagtaaagcattacatagaaaaaggttgaaacctagattccaaccctttttaataatatatttcttctattttacaccatcacttttcgttttcccaatagtgccatctcttccacattttttgtagcatacagtattgtaactccggttctctcctgcaattccaccagctcctgagtcaactgattatgaaatttgggacttacattgcgaagcggctcatccatgaggattacatctggttccaaaatcatggcacgcgccagcgcggtccgatgtttccacagatctgacaagttttttacttttgcaaatcggacttctacaagatccagaagttccagaacttccagtgtccgttttcctatttctttttcatctatgccgcgaagtcttaagcccagttctacattttccagaactgtcattcgtggatacacagtataattctgaaaaatcatagcaattccacgctcctccggtggaagactgttgaccagcttgtctccaatccatatctctccgtttttcacttcatcaagacctgcgatcatgcgcataacagcactttttccactcccggatgggccagtcaatattacaaattctccgtcttcaatctggaaatttaaatcctttactgcctcatatccattcggaaatgcgcgatctacatgttttaatgtcagacttgccatctgatcagcccctttctttgtcttcccctgactactgcaattcaggctttttatccatcattacttttttacaacaacgcctggtaaatgtctctctttccgactccccggtctttcgcgaccattttcattgcttcttttttctgaatcccctgatccatataataatccatatgttcctgaatggacatttcttcccatttctggcgttcttcttctatctgttcctgacggctcttaccctcaatgacaagcacgcattccccttttggttcctgctctttataatattccactgccgcactgatcgttgttgcaaagacggtctcatgctttttcgtaagctcccggcaaatgcggattcttctgtcacccaaggtcgcaagcagaagctctaatgtccggaccagtctgtgcggtgcttcgtagataatcatagttcttgtctcttccatcagttcgttcagcactgcctgtcgttcttttttatctgtcggaagaaatgcttcaaacgcgaatcttcttgtggacaatccggaaatggtcagcgctgtgatgcaagctgctgcccccggaactgctgtcacagtgattcctgcttcctgacacattgccaccagctcctcacccggatcggagattcccggtgttcccgcatccgtgatcagtgcaatatcttcaccattttccaagtgctcaatcaacgtatgcgcttttgcaatcttgttatattcatgataactggtcatcggtgtgtgaatatcaaaatgattcaaaagcttaatgctattgcgggtatcctctgctgcgatcagatcaacttcttttaaaatacggacacagcgaaatgtcatgtcctccaggttgccgatcggagttgcacacagatataatgttcctgacatataattctccttttatttcatcccgtacaatttcagtacttcttccgtatactccccgtctttcgtgtaaactatgagcggcgggtctacggcgaggcgtggttttccgcctttgaggccttcgataagaaccatgtttggctctttgtctgcatatgggtggacgagacgcatgcgtttcggctcgattccgtaattgcacatttttgtaaagatttccggcaggcggaaaggacggtgcaccatgtagaaacgtcctttcattttcagtacttttgcactttctcgcagaagatcatctaatgtgcataacgcttcatgtcttgcgatatacaaagcctcgttatcatttttcaggccgtgttctccaatcatatacggtggattggatacaatgacttcatacgaatcatttccaaatatgtgacttgcctctttgatatcaccggtaacgatatctatcttgttctccagcccgttgtgtgccacgcttcttcttgccatatcagcactttcttcctgaacttccagacctgtataatgaagtcccggattctttgcttccagtaaaatcggaagaattccggttccggtcccaagatccagtgcacgttccccacgttttacttttgcataggaagacagaagcacggcgtccatgccaaagcagaaccgaccgggcttctgtataatctcatagcccttcacctggagatcatccaggcgttcatcgggcttcttattagtcatcatttaacttggaggcgccatttttctcctccagagcttttaactgtgcaaactcctctttcgaaagctttgcatcttttttcttctttcttgatttgaatctcagctcacctgccggatattcacggatttctttttcatcgttatccagcgtcacaataacctttacaatctgacgcagtacgtgaacggcctgaacttcaccatgaagtccttccggcgtcgtcacatgatctccaactcccggaagctgacggttcagctcttcataggtctcttcttcgttagtcagacagcacatcagtctgccacaaactccggatatctttgtcggattcagagacaggttctgctctttcgccatcttgatcgataccggtgcgaactcagacagatacgtgtgacagcaaagtggtcttccacagataccaatgcctccacgaatcttcgtctcatcacggacaccaatctgacgaagctcaatacgtgtacggaacacgcttgccagatcttttaccagctcacggaaatcaattcttccatctgcggtaaagtaaaataacactttattattatcaaatgtatactccgcatctataagcttcatttccagaccgtgtttacgaatcttctctaagcagatgttaaatgcttctttttctttttctctgtttttctcttcttttttgtaatcctcttcgtttgcaattcgaatcacagattttaaaggctgtgtgatcttgtcgtcttctacttctttcggacctgtcacaacctttccgaactcaacaccgcgagccgtctctacgatgacacggtcttgaggtttaatctctaatttccccggtgagaaaaagtagatctttcccgcctgacggaatcttactccgattacttttgtcataaatctagttctcctttatcgtcaggaacaaaagctccatgaccagatcaaagttaacatttgcttttaatctggcttttgctttgtcaaggctgtccagaatcgtctcaattccttcataagaactgcgtcttgcctgctcacgcatgcagtcgatctgatctttgaatacaaccttatctatttcccttgtcgctttatataacaagacatctctgtaccataccatgatcaggtcaagatagtcgttaatttcaactttataaagagtgcagcgtttcactgcctccacaagctcactgatatccatctcatttatatggcgcatcaggttcaggacttcgtccttgagctcattaaaatgctcggaacctgccagtttgatagcttttccaaggttcccctgtgcaaatgcagcgcagacttcagccttgtaatctggtacttccattctctccatgagatattttttaatcagtgcatctttgatgtagcgaagttttaacatgacacatctggaattaattgtcggaagcaatacatctgcattttccgtcagcagaataaatactgcatactgtggcggttcttcaatcgtctttaataacgcattctgtgcctgtaccgtcataatatcagcttccggaataatataaactttatacgggccctgatatggcttgattgcaactgtattattgatctgtgtgcgcacatcatcgactccgatggatcccggcttctcatgtgtcacccagataatatccggatggttattcgattctgcctgtacacaggaatgacatttattacatggttccggtccatgttcttcacataaaagtgccatggcaaataactttgccagcatcttctttccggttccgcgctcgccattcacaatgtacgcctgtgatacccgattctcggcaactgcattctgcaaatattgaattacatctctgtgtcctactacatctttaaaacttcccatatcgtatgtcctctataatttcatctaagcatcttttttggtcatcattgtaataacgcttctttattcccgcagctctcagatgctcctcggaaaaatcttccgtatctgcgagaaatcttctgcacatctccgcgtaacgtggcacttcctgctgccgctctctcgtaagtgcacggttcagccgctcgccgtcctctacttcgatgtacaccggaacaagatacgccgctccgtaatatttctttaactttccataggactccagcgttccgatcatcagatagtcggattctgccagattgacctgtccatcttctattgtagcatatttccatgctccgtgaacagtattataagtacgaagttcaacaacctttccctgtctctcgaaaatatgcatctgttcatctgtcacaaaatggtattcgacgccttctctttcaccttcccgcttcggtctggtcgtgtaaagcgtcactgtctgaagcatcggcagctcttgcttgatcttccggaataatgtatcttttccagatgaactcttgcccattatataatatatcttacccatgcgtccatacctctatgtatccttctttttctactccctgtatctcatatgttcttcccatataccattgaaaatgttcccggatctgcgctgtgatccgttcccccggcaccagcatcgggatccccggtggatagagatacgcatactccgcggaaatgtagccttcgctctgtgtcaatggcacaacctgaaacccatctgcccctgcgtctttcatgctgatgacctgcgccggtgaatagattacttccgcctgtggcagatgtcccggttctatatcgtaatttttttctttcttttgcgactttttgatttcttccggcactatgtctgaatctacagtgttataagccccctgtaaaggtttatatttcttatccaactcataaattgcttttataagccgtttcattccttcatcggtatccccgaccgaagtcatggcaatcacataagtccccgcggccatctccatttgcaggtggtactgatttaataaatcttcctgcaattgaatacctgttgcttctgcaccatatgtatccgcaagtcctttcgtaagtcctgctactgataatacaagctttgacttatcataatgtttggtctctgccagccggatatgttcacattttccaagttcttctctacatctcttcaaacgctccacatacgggtcaaaaacttcctcgcagtgatgatccagcatctccatgcactgatcgattcccgccatcagaatataagacggactgctactctgtaacatatgcagatatcgtctcaccttttcccggttcaccagatttccattcatgtggagaagtgctgtctgggtaaatgccggaagtgtcttgtgaacactgtggatcacaatgtctgcgcctttttgatttgcattttccggaaaatagggatgaaaaccaaaatgagccccgtgtgcttcatccacgatcagcggcagtcctttttcatgtgcggcctttgctatctcggccacatccgacacaattccatcgtaagtcggagatacaatcatgactgctcggatctgtggataccgattaagggccctcctcacatcctctgcggatatctcaatattcaactgtaactctgaatcaaaccggggatagagatacaccggattcaactcattcatgtagattgcatgatagaccgatttgtgacaattgcgcgccacaagaatctgatctcctttattcgtcacacccgcgatagcactcagaattccaactgtacttccatttaccagaaaatgtgtctcatctgcatgatagattctggctgcccgttcctgagcctctttcaggattccttctgcatggtgaagatcatcaaatccttcaatctctgtaatatctacagtataaggatccgcatcccaggacatatgcatcttacgcttatgtcccggcatgtgaaatccataatagtcagaatcgctatacgcttttaatttttcgtatatcgttgccattcttataatctcttaagaagttcttctctttctttttcgtatcccggttttccaagaagtgcgaacatgttcttcttgtagctctcaacacccggctgattaaatggatttactccaagaatatatccgctgacaccgcatgcgaactcgtacatatagaataactgtccaagtgacttctcgtcctgcgccggaattgtcactttcagattcggaacctgtccgtctgtatgtgcaagaatcgtaccattcatagcactcttatttacaaaatccattgtcttgcctgcaaggtagttcagtccgtccagatccaccggctcctcaccgattgtgatctgctctgtcggctcctccacttccataactgtctcgaacatgattctgcttccatcctgaatgaactgtcccatagagtgaagatctgttgtaaggtctacagatgcagggaagattcctttcttatccttgccttcactctctccgaagagctgtttccaccactcagatacataatgcaggcttggctcataatttgccatgatctcaactgcttttcccttacggagcagaatgttacgtgttgctgcatagagcattgcatcattttcctcaaatggattctcaagtgcgaattttcttccttctgctgcaccttccatcagcttgtcaatatcagctccgctgactgcgatcggaagaagtccaacagctgtcagtacagagaaacgtcctccaacatcgtccggtactacgaactcttcgtatccttcctcatcagcaagtcctttcagagctccacgagctttgtctgttgttgcatagattctcttagcagcctcagctttgccatacttcttctccagcatctccttgaaaatacggaatgcgattgcaggctctgttgttgttcctgatttggaaatgatattaactgagaaatctctgtctccaatcacttcaatcaggtgtttcagatatgtactgctgatgctgttaccggcaaaataaatctccggagctttgcggatctcttttgatactacattataaaagctgtgtccaagaaattcgattgctgctcttgcgccaagataagatcctccgataccgattactaccagcacctctgaatctgactggatctttgcagcggctttcttgattctctcgaactcctctttatcataatcaaccggaagatcgatccagccaaggaaatcatttcctgctccctcccttcccaggagttcagcttttgcagcctcggtaatcttcttcatagattccatctcatgtgcgctgataaacgcatctgcctttgaataatcaaatgttactttacttcccattggactcgtcctccttatgctaccctttacgttctagttcttgtctcgaagaaatctgtataattttcttcttataaatgtgacagctcacagacagtccttgtttcacaaaactaactttgagccgttatctatattttaacaaatcagtctcttattatcaagccataaactcctccaggatttctcggatacgctgatttctgtttgcctcgtcctgcgcctttgtctcttccgattctattgttttttctattttttctgttttacctggtttttgcgatatagctgtctttttgactttccggtcatcttccacctgcagcggttctgtcttatacatcgcccaaagcagactgtccatagatccaggaaattcctgctttgattcctgcttcttctgattcacagattcacctggcaagttatcaccctctgcccttcctgcattttctggcattctggtattcttcacaattcctgtattttctggcattctggtattctcacccattctcgcttcttctggcattctggtattctcacccattctctcttcttctggcattctggtattcttcgtcattcctgcattttcttgtgttctggcactctccgctattctcgcttctgctgatcttgcctcttctgccagaacttctttcttgtatgttttttcatagcgatgctgataaatattttccaagtaatctaccatataatttcgtactgcctccagccggtactcctcatccgtcagcatatgtaccaagaatacgattaacgccatcgccacgccggttccgccaatcatagctgtctgctctgtcgcccctttgatccgataacttatgattgcgccgactccgccaagaatcagacaaagtccggcacccgccatctgtaaccgccgccatgcatggagcctgactccaccaacccggtattcatagagatacttgtccacaaatacgcctacgttttccaccttttcactgatcatacaggtgtgctcgaatttcgcccgcacaagccgcatcaacggatgattactcttccccatactttccgctgctgccaccagcttcctaagtgttcttccaacgaccacctttgacacaactccggcaaatgcactcattcccatcagtacatagatcacatgtctgtctaacattaattctaacatgataaaagccctccttttggcaccaattataatggattttccaaaagaagggcgaaaaaccgttccccataaagcgacatctgcacaccgcaaattatggtattttttcttatattttatcgaatcatttattctctggttttaaatcatcgggagcaattcctttacaagcgccacgctgtgggcaattgcctgtttttcaaactctggataatccatcgttgcactgttgtcagctttatcagaaattgctcgaatgatgacatacgaaactttgttaagataagcggcgtgcgcaattccggctccctccatctctgtacagagagcctgaaaattctccacgatacgtgctttcacttctccggaagaaatgaactgatctccacttgcgacccttcctgtaaatgtatggatctgcggatttgctttttcatttgccttcactgcaagctctaccagatgcggatctgccgggaatgtgcgtgtatccattcttggcacctgcccgattgcatctccaaatatggttgcgtccatatcatgatgcaccgcatctgtagaaatcaccatatcaccaatgtcaattcttgcatccagggatcctgcaatacctgtattaatcagcgtatctacgccaaatttatccaccaggatctgcgcgcagattgccgcattaactttaccgattccacttcttacaacaaccgcgtccttcccacaaagagttcctttataaaatgtcatggaagcaaactctgtcattttagcatctgccatctcacttttcagagctgcaacttcctcttccattgctccaataatacctatcatccgattttcctcctgctatgcatttttactgtgcgattcccgcacatatcctttatccaactgcctttttcactatcattacaaacatttcctgttatcctgtacattatcccctaccccatgcacaaatgtcaagcattgatgctgctctattgtacctgtttattcctcgtgtattcctctatgtactctttttcatacatatgatgtaaccggattgctccattgctatacagttcccgcaatcctcgaacacctcaagcttacatcatattattggaaatcttaatttttctttacaagtagattcttctctgttagaatggcttctgatattcatatatctggtataacacataggagggtatttatcatggattataaaacacatggtgtctgttccagcatgattcacgtagagctggacggcgataaaattaaagatgtagattttgtaggtggatgcaacggtaatcttcagggaatctcaagccttgtaaaaggaatgaaagtggaagacgccatcgaaagactttccggaatcaaatgcggttccaaagcaacttcctgcccggatcagcttgccaaagcactccgcgaagcaatcgctcagtaaattgattcaattacaaagtaagtcacatggaaaaggacacgcagcttttaatagcttgcgtgtcctaaaactaaacttacctaaacttacttctcttgattgttataatattttttcttttaaattttctttgaactgtctccagttccttcgcccttccaaagccctgcgaaccaacgtaagggccatgaaatatgtagattgctgtggaagagcgtctaattgtttcaatattcagttgttataaaatttctaaagtattatgatccaacctactaactttacccgaaatttgtttttaatttgtttttcccatcattataatggccttgcccactaatctgattgtaattataaatttgttaaattcttctttcttttctacaatatcttacttacggttcctcaatgtaaactccatttgtgaaactgctgcttacatcatcattagcggaatgaacacatcgaacacgatagtaataatcgccctctacatccatgtattctttcgaagaaactcggtctgtattttcaaggaatttattccatgcatcatataaagaccattccgtatcctcttcttttgcccgttcaatcattactcctattcctatacgtacaacgtcatgagatgctattgttgttcctccggcatagatttgtcccgggcccattcggacaattttggaatatccagtcagaagatcctcgcctctggcaactttttggttatagccaatggattctgcatcttttgtaagctgggatccgtcgatcaccttcacgctagatgccgcctgtgtatccgtcgatacaccaaagcttaatcctaatgccatagcgcatacgcagcatatggatctacatcgcttcatttatctacctcccatctctctctatttagggttccctatataatagacacatgagtagcaaaaaactgacgcatttttttacataaaatataatttttccaaaattttttctaattcactttgattcatagttcccgataagtaataatgaagttttttaaattcaaactctgctacataccgattagtttcagtttctggagtcaaatactccgtaatttcaatttttattccttttatcttatcataactatattgctttacaatctcatcttcttcatcatagccccaagaagtttctccataagaagcactaatcataaatgtagttttttctccattatataaataatctagttctgcaagttgaatatctgtgtccattaacattttttcaaatttcatttcttccggatgccaaataattcttactggttcgattccaaactcttcccctattttctcataggccttctcttcatcttcttcctcgataatcttattcttatcgctggaatcgacttgagaaacttctctgccacctacagaactcttcataaactgcagcattctttctggtccgccaatgcttgtcattccaactgccattacgaggatcagcactgctgccagtgctacaattctacggatattgcgttttttccggcgcattgtatagattttcttctcctcgctctgattcttcaacatctcccgtccaaggcgaagtgcttcctggtcttcttctgagagtttcgcatacgcatctgttcgcttcatatcttcagaacgcatttcacgctcacggattttttgatccagtgcatttttcatgcggatcttcagctcatttggaatctcttcattatcgttaagtccgacttcttcttcaatctgtttcgcttctttattcaattgatctttcaggatttctttcaactgatctttcttttcactcataatctacctcttaacgaaatctatcctctctttctcttgaccaaatctcccgggaacgtataatataattatatgccaaagttgaaaagttttcactgtttcgtacagtatatacgaagcagaattatccgtacggcattcttattgtaacatatattatcgaaaggagctttttatgaaacgtattatcttaaccggcggcggtactgccggtcatgttacacctaacattgccctgttaccacgtcttaaagaattacaatacgacatccactatatcggctcatataacggaattgagaaggaacttatctctcaattcggtataccatatcatggcatctcaaccggtaaactcagacgttatttcagcgtccagaacttcacagatccattccgtgttatcaagggaatgggtgaagcacgtaaactgattaagattctggagcctgatgttatattttccaagggaggttttgtctctgtaccagtagtccttgccggtaagggacaacatgtaccagtcattatccacgaatctgatatgactccgggtcttgccaacaagatttccattccttctgcaacgaaggtctgctgcaacttcccagagacattatcttctctcccggcaggcaaggctgttctcaccggatctccgatccgtcaggaacttttaagcggagataagtaccgcgccagagaattccttcactttacttccgacaaaccggtcattctggttgtcggcggaagcctcggtgccgttgccgtgaacaatgccatccgtgcgattctcccggagcttctgaaagacttccaggtcattcacttatgtggccgtggcaagctcgatccttctttgaacggaacagaaggctacgcacagttcgaatatatcaaagaagagttgcgtgacctcttcgcactgaccgacattgtaatctccagagccggagccaatgctatctgtgagcttctcgccctgcacaaaccaaatcttctgattccgctgtctgccaatgcaagccgtggtgatcagattctcaacgcccgttctttcgagcgtcagggattcagtatggtgcttgaggaagaggaacttacgaacgaaacacttctcagtgcagttcatgatctctatgataaccgcgagaaatacatcgatgcaatgaagcattcttcccagcaggattctatcgataccatcattgatctgattgaatcggtaactgcttagatacttacaaaactatctgattctgacgcagatatctgatagaagaaaacaggtgtcatatccggcacctgttttttatttgccatccagttggtgaaactgttcttcgtagtacttcttaatccattgctttgccctgtataatgtactatacagcgtatccacagatatccccattttctctgcaacttctttttgtggtttatccaaagtatatgaaacggtaactgcctcataccatcttgaatttttctcatatagatctgcaaagatcgtatcgtgtagctcgcggcattctttctggcgaagcacttctatgagttgagcatccagtccttctgacgaatatggcacctcctgctccggaatctcttccatcggtgtctcccatttactgtctcttagatagttctttgccatattctttgcggtagtgatcagccatgcaggcacggactccatacatatatctcccaggttgtcgtataatttcaggaaaacttcctgcacaatctcttctgccacatagtgatcttcgacgtagtacaatgccgttcggtacactttacttacattttctttgtaaagcctgtcgatttcagctttctttacatcttcagattccaccat

SEQ ID NO: 79 - DNA, 19778 bp, unidentified
  source 1..19778: mol_type = unassigned DNA
atgaaagtagtaattctggccggcggccttggcacgcgcatcagcgaagaaagcgtctacaagcccaagccgatgatcgaaatcggcaacatgcccatcctgtggcatatcatgaaggaatattcctactacggctttcacgattttgtcatctgcgcgggctacaagcagcacatgatcaaggagtggttcgcggattacttcctgcataccagcgatattacgtttgatttcacccgcggccagaacgagatgatcgtccacaaccatcacaccgagccgtggaaggtcaccgttgtggacaccggcctcaacacgatgaccggcgggcgcatcaaacgcattcgtccctacatcggcaatgagaccttcatgatgacctacggcgacggcgtctgcgatgtggacattgccaagctggtggcattccaccgcgagaacggcaagatcgccacgctgaccgccgttcagcaggagcagcagaagggtgttctggatattgccgaggataattctgtccgttctttccgtgaaaagaaggccagcgacggcgcgcttatcaacgcgggctatatggtgctggaaccgcagattttcgactatctggacggcgacgcctgcgtctttgagcagaagccgctgcagaagctggccgaggagggtcagctgatgagctatatccacaagggcttctggcagtgcatggacaccgcccgcgagaagcaggtcctggagaaaatgcttgccaccggcaacgcgccctggaagaagtgggaggattgatgatggtacattacgatcctgaattttaccgcggcaagcgggtgttcgtcaccggtcacaccggcttcaagggcagctggctctgcaagatgctgctgatggccggggccgaggtcacgggctacagcctgcagccgccgacgcagccgaaccttttctccatcgccggcgtcgagggcaagatgcacagcatcatcggcgacatccgcgactttgacgcgctgaaggccgcttttgacgcggcgcagcccgacattgtactgcacctggccgcgcagcccatcgtgcgcgacagctacaaggacccgcgctacacctatgagacgaacgttatgggtacggtcaacctgctggaatgcgtgcggctggcccggcagcagggcagagcgccccgctcggtgctgaacgtcaccaccgacaaggtctaccacaacaacgagtgggcctggggctaccgcgagaacgagccgctggacggctttgacccctactccaacagcaagagctgctcggagttggcgacgcactcctacatcaacagcttttttgccgataagaccgtggccgtctcgacggcccgcgcgggcaatgtcatcggcggcggcgactttgccaatgaccgcatcatccccgactgcgtccgcgccatggccgcgggccgtaagatcggcgtgcgcaacccctactcgacccgcccgtaccagcatgtgctggagccgctggcggcctacctactgatcgcccagcgccagtacgaggacagccgctttgcgggctactataacgtaggccccgacgactgcgactgcgtcaccaccggcacgctggtggatctgttctgccgggcctggggcggcgacgccgcctgggagaatcaggccgaggccaatgccccgcacgaggctaacttcctgaagctggactgcagcaagctgaaaacgaccttcggctggacgccgcgctggcacatggccgagtgcatggaaaagaccgtcgccttcagcaagatctggcttgccaacggcgatgtcccggcggagatggaaaaggaaattaacagcttcttggaggggcagaaatgacaaaggaacagaggagtataacaagcgcttttgtcatttcggttttggtaggtggagcctatctggtttcctggctggcgcatgtatggggtggtcagccgtggcccatcggcagcaacatggtcaactatgccgtagttctagtactgttcggcgtttcgcttttgctgttcggcaacctttttgcccgcattctgccgcaagaacgtggctttgtgcgggcctgcgacgcgcgtctgcagggtcgcggcgcggcagcggcccttgtggtatctgcgctggtgacagccgcctaccttatttattacgcgaacattggggtgtccaaggaatttgcggggccttcctattcgccgtcctccctgatggcgccgcagatggtgccgctgtattacctgcttacggtgctgttttttgtggcggcaatctatctgctgctgacgggtaaggactgcccgcagtggatgacctggggcggctacggcctttcggcagtgatgtacttcttgggcgtatggatcgtcaatacgtttgagggagacccgtaccacggtgaggcgtatttggaaagcatctacaacgtggctgacagcatcccctatgaggagttgacgacaggcatctacggccactacggactgttctttctgctgccgatgaagatcttcggtgcaaaggctgtcgttattcaattcctgatcgcgctggtcggcgttgtgacggatctggccatgctgtactgcatccatcacctgataaaaaagaactgggtacgcctgttgatggcactggttgtgccggtcattccgtttgcatacagacggacgaattactggcagctgcagcctcaccgtttggtattcccgatgttgctggcggcctatatgctgttctgtttgcggaaaaagcagtcgaaaaaaacggctcggttctggggcggctggcttctgtgcatgctggcagtgctgtggagcaccgagagtggtctgttctgtatcatcggctggtgcgcgggctgcatcgtccgctggtggcagcaggagccatggtacgcccgcggccagtgggaacgctatggtgcgctgctgctgggcgctgtgttggcggtgctgggggccattggcctgacaaatttgtataacctggcctgcggcggagcaccgatcttcaaggtgtttttttacccgctgtacagcagcaattatatggatggttccatcggctacccgcttgagctaggcgtgcgcccatgggtgtttgtgctgctgcttatgctggccgtgctggcatggtcgctgttccagacaaccgctatcggaagaatagccaaaacggagaacattgccccatttgcggcctgcctgtcggtgctggggctggtatcgttcagctactatgcaaaccgttctgcctggatgaatctggagatctgcctgccggaggcactgctctgcctgtgcttcccgctgcaggcgctgacggacggggaggggctacgcaagaagctgggcggcctgtactgcacggcggcacagtctgtgggactggccgtgctgctggtgctctgcgtgcttacggcacagctgcccggcggcgtgataaatacagtgatcctgcaggagcgcggtgcgttcagcacacgcggcatctatgcggaggtggagaatttctctgccaatataccggacaacacctttgcggttggccgcgatgtggggatcatctaccatgcagcaggctgggacaactacggacattatgtggatgctgcggattacggcgtggcagataccgaaaaattactccctcatattctggcagagttgaaggcccagccgagctttgtcgtggatgacatactgggggtctatctggggcagaatggctacacgcccgacatgctcggataccagctgcagacgaccttcacatcggctggcggcacgaacccaattacctattactactacgaaaagcaataaaaaaggagagcaaaacctatggcatggaagaacgaggcagaagcccgcgagcagatcaaggcgatggtcgccgagtattatcacgacttcaaggagaaaaagaccccctatcaggagggtgatcgcatcacctacgcagcccgcgtctttgacgagaaggagatgtgcgctctgaccgatgccacgctggacttctggctgacgacgggccgctttgccgaccagttcgaaaaggaatttgccaagtggatcggcgttaagttcgcccatctggtcaacagcggttcctccgccaacctgatcgccttcatggcgctgaccgcccccgagctaggtgaccgccagatcaggaagggcgacgagatcatcaccgtggcctgcggcttccccaccaccgtgaccccggccatccagtacggcgcggtgcccgtgtttgtggatgtgaccgtgccccagtacaacatcgacgtcaccaagctcgaggccgccctctcccccaagacgaaggctgtcatgatcgcccacacactgggcaatccgtttgacctgtccgccgtcaaggcgttctgtgacgcccacaacctgtggctggtcgaggacaactgcgacgcgctgggcacccagtacaccatcaacggcgagacccgctttaccggtacctggggcgacatcggcacgtccagcttctacccgccgcaccacatgacaatgggcgagggcggctgcgtttacaccaacaacccgctgctgaaccgcctgatcctctccttccgcgactggggccgcgactgcatctgcccctccggccaggataacttctgcggccaccgctttgacggtcagttcggcgagctgcccaagggctacgaccacaagtacgtctacagccactttggctataacctcaaggtcaccgatatgcaggccgccatcggctgcgagcagctgaagaagttccccaccttcatcgagcgccgccgccacaactgggaccgtctgcgcgccgcgctggaacccgccgccgacaagctgatcctgccggagccggctgccaacagccgcccgtcctggttcggcttcctgatctctgtcaagccggagagcggtctggaccgcaacgccgtgacccgctatgtggagagccacaacgtgcagacccgtctgctgttcagcggcaacctcatcaagcacccctgctttgaccagatccgcggcaccgacgcctaccgcgtggcgggcgagctgaccaacaccgactttatcatgaacaacaccttctgggtcggcgtttaccccggcatgaccgacgagatgatcgactacatggccaagacgattatcgaggctgtgaatcagtaaaattttgacaacgaggtacagacccctatgatgcagcaaaaggtgaaaacgacccgcgcacccagactgcggttggacaaaaacaggcggctgacgcctatgcagatctactgctgggcaacggtggcctgtctggcggtgctgctgcttgccctgctggccagccgcggtacgctgctgcatcgattcttcttttatgatgtcaccgataccggtatggactttttccatagtattgagtatatgcgtggacgtatgccctacggacagttcgatacgctgtacccgccgcttgcaaatttgtttttctatgtgttgtatttgcttgtgccaaagacacaatcagctacgtggacggaatcgtttatctcgtctctcaacatgaagggaacagaacgggatttgcgtttgcagcaagcgacgatgatgctgtttatcgtctttgttatcgtggtggtcttaggaattgtatcgatgacagaacgcctgacgcgcagctgcggggggcggaaaaagctgctggcattctgtgcagtgttcagctatggggtactgtacggcttggaacgcggcaatattctgctgctgtgctggccgttaatggcattttttatcctgtaccgcaattcagaaaaaccacttttgcgggagttggcctgtctggcactggcgattgccgccggtttcaagctgtacccggcgtttctgggcgtgctgctgctgcgcgataaaaactatctggccgcggtgcgcacggtgctgtacggtgttgtctgcctgtgcttcccgctgttcttcttcaatgaaggattgtttggcctcacactgtggttccgtgtactgtttgattttagcggcagcagagatgaaccgtggatcggcaacggtttctccaacattttggcagaggccggacatgcggtggacaagctgctgggcacgcagctgggctatggcagctacgcactgctgggcattgtgctggcagcggtgctgctggtgtgcagcttttttatggataaggagtggaaacgcatcacagcaatcattctggcgatgctgatgttccagtcccagtatgattatgtatggtgcctgtttttgattccgctgttcctgtttatggagcaggagcgtgagctgcgcagtgacaacgtgctgccctatctggccttgatggtgccggtgctgccgctgccgctgtttcggcgggaccagatggagccgtcctttgtaccgcgcaacacgatttgtcatgtcatgctgctgctgctcattgtctggtgctttgtccaggcagtgcagggggtgcgtgtacgctgtgcggaaaaaccggtcaagccggcacacggacacccggcagccacggtgctgctggccgtttgtgtggcggtggccggtgtgggcggccagcagctgtggcagcgcacccacaactggggctttgactacggctataacggccgactggatgccgaggacatccggcagaaggacgtgcaggacagcgacggcaacccggtagaggcaacatggagcggccgcggtgcgtatattatgatttacaaccacgcgccatttacgcaaaggatgacggtcacgttccagacaggctacggcatggatttgaagcgcgcctatacgatgacgtttgaagcaccgaatctggaagatgctgatggtacaaccgggaagcagaagcagacgaatattaagattgaccatgaggggcagaccgtgcgctacacggtagatgtggcccccggccagacccaaattgatgtgagctatgacggcccgatggcggtctatgatgcttcttcgcgcaaaaacggtaccttcacggtgacaaacctggcggtcaccagtgagggcgctgtggaggaaaccgaataacggaaggaaacatatactatgcagaaattgctggccctgctgggcgcaaaaaataaagaggaatttgtggagctgttcaagcagttcatcaagttcggcctggtgggcgtaagcaacacggctgtgtccatggcggtctactatatcttcctgtggatcagcccggacctgtatatggtcggcagcattctgggcacgattctgagcattgccaacgcctttttctggaatgataaatttgtctttaccggcaacgccaatgactggcgcagcaagctcaagcggctgggtaagacctatgtcagttacggcggcacgtcgattttgtccaatgttctgctctggatcgaagttgcattcttcagtgtcagcaagtccattgcgcccatcgttaatctgttagtgacgatcccgctgaactttgttatcaacaagctgtggacatttaaggaaaagtgagaacaagcacgatgcaattagtaatggaaaaaccacatacgaataagcgccagaacgcgcgaggctgggtattggctgcactgctttgtgtggtgattctggcctattcctcaatttatttcgccaacacgatgcccattacggaaggctagaatgtaaactatgcagagctggtattgcacgggaaatttccataccgcgatttttactattacctgccgccactgaacatcctgattgatgtgctgctctggaagctgtcgtttggcagcctgttcatttaccgtgcgtggtggctggtacagcggattgctatttatgagttgatgtttcggctgctctgccggtatttcaatagatatgccgcctttgcagcgtgtgccttctctgcgattctgtgcacggcctctgtctacgatttatttggtgattataaccagacgattccgtttttgtctgtgttgctgctctattgtgttctgggatttgcagaggcggtagataagaaagccgccgggaaatacctgtttgctgccggcgctatgctggggctgctctttctgaacaagcagacgatttttgcagctgcgggggttatttatctgctggctttgagtgtctactgctggaagaaaaaagacaaaggctttctgcaatattgtgcggcggtcatacttggctttttgctggtgttcgtcgtggccatgggaatccttgccgtcaatggcgcgttgcttccgttctttcagcaggtctttatgcacacgggaggcaaaggcagtccgcttgtcattttgctgaaaatctttacgggctggacaatcaatgcgccggtatttttactgatggtggggtgtgtagctgccataacactggcgcagaaaaacgagagtcagacagcaggacggatgctcttgctgctggtcataggcggcggctatgttttggaaaggcaggctgcgaacgactttatcgaagtgctcgttggtacgaaaagcgtccaagccgttgtcatcggtggagggttgctactgttgctggcgtacagccaaaagcgcagaagcggcagcaagataatgcatgatgtattttacggtctgtgtgccgcctatgtggtgactattctggttacggcccgttatgcgtcattaggcgaagataacgggagcttattggaagcaatctatgaatcaggcacgctgtttaagagtgtgactggtacgctgtatacgatcatcagctttttggatctatatctgattgcccgctcccttatgaaaataaaagcggatggcaatgacggctatgcacgtgagcacttttggatggcctgtgcggcattttctacgatatatgcagccagtatggcatcggcatcagaaatttcctaccatgggatcatgttggctatgccgtttgttctgtgtgttgggctgaacagcgtatttacagataaagttacggaaaaatctgtcaaaatcggtacgattgcgctgtgcacagtactttcgatggcttgtattgcacagaaggtcgtatgttcctattcttggtggggctgtgaacaggcagagtatgacaaaaaaatctacgccaccggcatccccgcgctgcgaggcttccgtttttctgcggaggacgacaagatgttggaagacatcacacagctgattcttgaaaacacaacagaagatgcaacgatttttggctatccctatgtaaagctctttaatattctgacaaaccgctatacaatggatacgtttgttccggttctgttctatgacgtggtagacgaccagtacgttttgcaggaggacgagctgctacaggaaaatctgcctgacattgtaatctggaaggatgatgttccaaactgcaagaaggttcacgaagaaagttaccgcaatggtgagaaattgaagcagcgcgagctggaaaagaattttggacgactgctgggcacacgctacaccctgttgggcgtgtatggtgaggaaagaaccggtaagatcaaggtgtacaagctggcagacgagacagactggggtagcttcaccttggaaggaaagggaaccgaggaagagccgtatctgattcagtcggcggaggatttgcaggcgttcagcaattatgtcaaccgcggcatgagctttgcagatcagtatgttgaacagaccgctgacattgatatggacggtaaaaaatttacgcccattggtgcattcagcggggaaagctatttttacggcacctacaatggcaagggacatattatccgcaatctgagcattcagggcaaggctacagaggatgtcggtctgtttggacgtctcgaaggggctgtttacaatctggggcttgaagtgggcagcctgactggcgactgtgttggagcaattgccagctatgcagtcaacccggaggcagagattgtgaactgctttacggatgtgaatgtcacgggctcgcgcgctggtggcattaccgataacttcgctggtagtgttgtaaactgtgttagtgccggtgcgctgactggtggcgaaaacgcggatgcaatcgcctataatagctcaattatggtagagaatgtttatcagctgacgggtcaaaagacaagcctgcttgatagacccgctattcaagaaaagcgtgtcagctatgccgacgaagatgttttcaacagtgatttcctggtgaagcgtctgaatgccgcagtaagagaaaagaataaagcaaacagcgagagcggcgcagaagaagcgattacgcttgtcgaatggacaaagggaacggacggccacccggtattggttcctgaaaattgactgaatggaaaaggagcaacccaatgaaacagcgtttagcggattatgtggcggactttctggcggcgcgcggtgtgacggatgttttctccgtcgtgggcggcggcgctatgcacctgaacgatgcgctgggccataacccccggctgcatgtgacctacaaccaccatgagcaggcctgcgccattgcggcggaagcctacgcccggctggaaaataagatcgcggcggtctgcgtgaccaccggccccggcggcaccaacgcgctgaccggcgtcgtgggcggctggctggactccatccccatgttcatcgtctccggccaggtgcgctatgacaccacggcccggtacgccttgcagtacaccggcacgccgctgcgcgccatgggcgaccaggagtacgacatcaccaagtccgtccagtacatgacgaagttcgccgccatgctggaggaccccaaggacattcgctacctgctggaaaaggcgtggcatctggctacaacgggccgccccggcccggtctggctggacatcccggtcaacttccagggcggctacatcgagactgacgagctgcgcggctacgaccccgccgaggatgacgcccagctgcccccgtcggtggacgacaccacgatccggacgattctggaaaaaatcaagaacgccaaacggccagtgttccacgcgggctatggcatccgcctgtccggcgggtatgcggcgttccgctccgtggcggaaaagctcaacatccccatcgtcacctactggaacgccgtggacctcatcgaggatgacaatccgctgtactgcgggcgcgccggcaacatgggtgaccgcccgggcaactgggctatccaaaacgcagacttgattctggccgtaggcacgcgcatttctattcgccaggtcggctacaactggaagacctgggcccgcgcggcagaggtcatcatggtggacattgaccaggccgagctgaaaaagccgaccctgcacgtcgaaatgccggtctgggccgacgcgaaggactttttgaccaagctggataaggctgccgcggcccccgtgaacgcgggcggcgagtggctggccacctgccagcgctggaaacgcgactaccccgccgtgttgccccgccagtgggaggaaaacggcgagaccgccaacgtctacgcctttgtgcgctatttaagcagtcgcctgccggagaacagcctgaccgcggtctccaacggtgcgtgctgtgtcgtcggtaaccaggcgtatgtcatccagaagggcagccggatggcaaacaacagcgccattgccagcatgggctacggtctgcccgcagccattggcacctgcatcggcggcggacgccgcccgacgatctgcctcgagggcgacggctccatcatgatgaacctgcaggaactgcagaccattctgacgaacaagctgccgatcaaaatcttcctcatcaacaacaacggttaccactctatccgcctgacgcagaataaccttttcaaggagcactgcaaggtcggcatcggccccgagagcggcgacctgtccttcccggagtttgaaaagattgcaaaggcgtttggctacccctactacagcgcccacagcaacgccgagatgaagcaggccgtggacacggtgctggcactggacggcccggctttctgcgagattttcaccgacacgaaacaggtctgggagcccaagagcagcaccaagcgcctgcccgacggcacgctggtcagccccccgttggaggacctggcccccttcctgccgcgtgaggagctggaaaagcagatgttcatcccgctgatgccggaagtgtaagggagtgcgtgattcaaaaatggcaagcattcaaagacaaatccacaccgccatcatcaccggccctacgggggcaatcgggatggcgctgtgtgcaaagctgctggcggagggtgtgacggtttacgcggtcacccacccgggcagcgcgcgggcggcgctgctgccgcaggacgcgcggctgcatgtggtgccctgcgatgcggcggagttggccgcgctgccggagctgatcccggaaaaggccgatgcgttcttccactttgcgtggacgcacacgatcggcccgggccgcaacgacatgccggcgcagatcgagaacatccgctacaccattgcggcctgccgcgccgcggcgcagctgggttgccaggtctttatcggagccggcagccaggccgaatatggccgcgtggagggcgtgctgaccgcgcagaccccctgcttcccggaaaacggctacggcatggccaagctgtgcgccggccagatgagccgcgtcgagtgccagaggctgggcgtggcccacatctggacgcgcattttgagcgtctacggcccgcacgacggtccggccacgatgatcagcggaaccatccgtaagctgctgcacggcgagaagcccgctttgaccgcgggcatccagcagtgggactacctgtacgccgccgacgcggcagctgcgttctacgcgctggccgtcagcggacaggacggcagagtctacccgctgggcagcggcacggcctgcccgctgaaggactacatcgagacgctgcgcaacgccatcgacccggcgctgccgctgggcttgggggaggtcccctacggcccgctgcaggtcatgcacctgcaggcggacacgtcggccttacaggaggacaccggctggcggcccgcgaccccgtttgaagaaggaatccgcgaaaccattgagtgggtaaggaaagagacaaaatgagtgagaaaaagacgatttcggtaatgatcccctgctacaacgaggagcagaacgcccgccccatctatgaggctgtgcgcgatgagctggtcaagagctgcccgaactacgactatgagattttgttcatcgacaataagagcgaggacggaacccgtgccatcatccggcagatctgcgccgaggacaagcacgtcaaggccatcttcaacgtcaagaacttcggccagttcaatagcccgtactacggcatgatccacacctccggcgattgcacgatcacgatgtgcgccgacttccaggaccctgtggagatgatccccaggtttgtggccgagtgggaaaagggctacaaaatcgtcattggccgcaagacccagagcaaggaaaacccggtcatgtactggctgcgcggctgctactacaaactcatcaagaagatgagcagctgcgagcagatcgagcagttcaccggctttggcctgtacgacaagagctttatccagacgctgcgcaacctgaaggacccgacgcccttcatccgcggcattgtggccgagctgggccccgagcgcaaggaaatcgagtacacccaaccccagcgccgcgcgggcaagacccacaacaactggtacagcctgtacgacgccgctatgctgagctttaccagctacaccaaggccggtatgcgcattgcaacgttcgcgggcttcctggtggcggggctgagctttctggtcggcctgttctatctgattgccaagctgctgttctggcagagcttccgcgccaggtacgcgccgacgatgatcgccatcttctttatgggcggtattcagctggcgttcctgggctttttgggtgagtacgtcatggctatgaacactcgcatcatgaaccgcccgctcgttgtggaggaagaacgcctcaactttgggccggacgaccaatgaccggcatgaagcaggagcttgggtatttcctgaaaaacgcgaaattccgcgcggcgctggggatgaccctgctgctcagctacggctatgccatcgccacgacacgggtcagcattgactcgctggaaggggaccgctacatcggcacgggcggcgtcatgctgtccaccggacggttcggcatgaacctctgggccgcggtgctgggctacggcagggccgagccgagctatgcctttggcattgacctgctggcggcgctgctgctggcgctggcggcggtgagcttctgtgcgctgctgcgcaaggccgcgcaggaccgcatcagcatgttcggttatgggctgtttgcctgcctgtttgtctcctacccgctgatgaacgaaatttgggagtacagcggcgcgaatgtctgcgtctgcggcggctatttgctggacgccgctgcgctgaacctgctgtgggacgcgcgccagcccggcgtgccgtggcgtggcagggctctgcgcatgggcgcggcggcgctctgcctgatggtggtctgctcgtcctatgagtcactggcggcggtgtatgtgctggctgtctttgcgcttttaacgctggagcagctgctggccgtcgagcgctcgcggcttgtggaagtcctgaccgagggactgtggtacgcggcggcgctggtcggcgggctctgcctgcgcgtgctggtgacgtctggcatccatcttgtgctgccgcaggctgcggccaacggcgccaccgaaattttgtgggcgttctacccatttgtctatcttgcaaagctgcttgtcaagggcattctgattaactacgcactgcgcggctgtttctacctgcccattgctgaattggcggtggcggtgccggtgtttgtcgctctggtcatcgtgctggcggtgcgcaaaaagcggcccctgctgctgctcaccggcgcggggacgctgttctcactggtgctgctgtcgtttgtgcaggggcgttactcgccctaccgcacctgccaggtgtttgcgctgtttgtggcactggtggtgctggccgtgtatgagctgctgcgccgcgctgcggcccggcgggctgtgctgctgggcagcgtgcagctgctggcggtgctgctctgtctgcaccaggccatgtacctgaaccatctgctggccgtcgattaccagcgttccgaacaggaggccgctgtggtgcgcactctgggcaccgagcttgtgcgcgactacggcaccgacaagcccgtggtgctggtgggccgttacacgctgggggagaatatcacccggtacacgacggctgacccgatgcagcacccgctgtaccgcttcttccgcgagcacacgagctgggagagcggcgacaccgtcaagtacgtcgagaccaactgcaactcggtgctgaactggtcggtcacggccttctccgaggtggacgacgtctacggccaggcagcggagcacctgttccgctactatggctttgctttggacatgacccacagcgctgccctgcatgagcaggcgcagacctacgccgacgcccacgacctgccgggatacccccgggcgggggcgattgtcgattgcggggactatgtgctggtaaatctgcaataagaataccgcggaaaagtttgcgcttctccgcggtttttgctttctttctgtattttaccgatgttttcagccggtcacggtctcaaagggcttcgtcaggtgcccgttcctgtcggcctcgcaggcgcagcgggcctacttcaaatactccaccaaaaacgccactgtcgtctcccgcagcactttgtccagcgcggcggcggtggcggcgtcctcggatagatagttgtggttcccctcggcaaacggctccagcacgaccctgccgtcgggcaggctctcgacggcggctatcgtctcggcctgggtcgtgtcgctcaaaatgccctcttggccggtgtaggtcaaaagtgtcggcagggcgctctcccgcagggcggcgttcgggtcggaatcgcgcatctcggtgaacagcgttccgctgacatcgacgccccaggtgctgatgctgccgctcgcctcggcctcagcggccagcgcttccacggcggaaaagtcgtcgatgttcaaaaattccatgccgcgcaggcccgcgccgttggcggggctccacagcgccagcgccgtgatgccgcccctgcgctgcgggtagaggctggccagccgtccgcccatgctgtggcccaccagcgctgtgcggcccgtgccgtaggtctgctgcatgtaggtgatggcgctctcgacgtcgtcggtcatgttggacagcgtgtaggccgggaacggctcggtgctgttgccgcagccgggaaaatccagccgcaccgtcgcaatgccctgggcggccagatcgtcggccagcggcgcaaagtggccgtcgccgctgcggctgccggtaaagccgtggcagagcacgacgagcggcagctcctccccgcgggccagcttgccgggcagctgtaccgtggcgtaaatgtccccgcgcgtgccgggtatggtgacgtcctgcgctttcggtgcgggcgtcagcagaaaaagcgatgccgccacgcagagcgccagtgcggcaatgcagcctgcaagggtataaaaagcgcgtttatgcgtttgtttgtgcatagaattacctccgtaatgcctctattaaagcctatgcggggcaaaaagtcaagacgcacagaatacacacaaaaaaacaggtgacaaacccggggcggatgtggtatactaaagattacaaattggttaaaaagtcagacccggggcgcaggcgcagccttgccccggcttttgtcctgttttaccggaggtgcttgactacgaattctatagcgaaccgtatgccccgcctgctggctatgctgtttgtgctgctggggctgttctgcgcggcggcactgcctgcccatgcggaggactacgacacggtgctggaccgcctgtcccgcctgcaggcgctggcgcgggagtactcggccagtcaggccgacacgcccgacccgatcgagctgacgctggcctacacccgcacgggggagtacaactccacgatctggcagctgaccgccggtgtgcgcgacgccgggtttgagagctgcgtcaacagcagtgaccccgagttggcgtcgctgcagaatatgaacaccgtcgtcctgcccaacggagagagcatcgactttgggcacctgctggcgtcgatgaaccttgtctacaacggcatacccatcacgggcagctggggcggcgactgtgaggagctggccaggcagtattacggccaggccggcgatgccgcgggctacgccgaggcgatgcgcgcttcctttaataaagacgatgacggcacgctgagccgcttcagcaacggggacctgcgggcggacctcgactccgtcgtcgtcggctccaaggtgacaaaggacaccgacctggccgaggcgctgcgcagctactacgcgaatctgaccgagtatgaccgcgttaaagagttcatctcgctgagcttcggcacggtggatacatcgagcacggcctttgcggacgccgtgtacagcgctctgctggaggattccggtatgcagctgctgttctacatgaacggtatgtggaccgtcaagggctggcagatcaaggacgactacgcccccgccgtgcgcggcgcaacagacctgtttgccgagtacctggccaacgcggtcaatcacgagaagatcaagagcgagacgaatgaccgtctggttgccatgggcgggcaggcactggccgacgcgctggaggcgttgggcgacaccgacgccgcccaggccgcactgaccgccgccgaggagatggccaataacgcccaatcgacggtttcctccggttcggatgtggtctccgccgcgcgggagaatttgcagacaaattttaacgtgaaggtcttccagctgattttgctgattgcggcggggctggcagcgttcatgctggtgttcagcatggtgatgtttgtggtgcaccgaaaagaaaattgagtttggactgcgtgccgctctcttgtgggaaagagagcggcacgcttttttggttgggcgcggggcaggcgggcaggccgctttttctgttcacaccccgttcacattccgtatattcaccccgagttatccacggcgtataacggttatccaccgtggaaatgttgaaaactccgtggaaagcgtggaaaactctgccgcccggacccgttcaaaagcggaaaaccgggaaaatctacgtagaaaaaacgtttattttccacattttccacagcagcgctgttgaaaactgtgaaaagccggtgaaaacgcgaattgcactttttgcaacacaaaatacacattttgtaaataagggcttgcgctcgccgcgcgacagcgctataataaacctaaccatcacccgcactgctgtgcggcggtgcgcttgaatataaaagggagagtgcgaaattatgttggacattaaaatcaccaaaacgacccatccgaaggaaaagccgcaggacgagtcgaagctcggcttcggcaagcagttcagcgaccacatgttcctgatggactataccgcgggcgagggctggcatgacgcccgcatcgtcccctatggcccgtgggagatggacccggctaccaccgtgttccactacgcacaggaaatttttgagggcatgaaggcctaccgcaccgctgacggcaagatccagctgttccgccccgactgcaacgcgaaccgttttaatgattccgcggaccgtctcggcatgccccccatcccgccagaggacttcgtgcaggctgtcaaggcgctggtcgatgtggaccgcgactgggtgccccactccgacggtgcgtccctgtacatccgcccgttctgcatcgctaccgatgtgggcctgggcgttcatgccgccaagcattaccgctttgccatcatctgcgcgccctccggtgcctactacgccgagggcctcgaccccgtccgcatctatgttgaggatgagtacatccgcgccgccccgggcctgaccggctttacgaagtgcggcggcaactacgccgcgtccatcaaggccggcgagctggccgaggagcgcggcttctcccaggtgctgtggctggacggcgttgagaagaagtacgtcgaggaagtcggctccatgaacatcatgttcaagatcgacggcgagatctacaccgccccctgcgtgggcaccgttctgcccggcgtcacccgccgctccatcatcgagctgctgaaggactggggctacaaggtgcatgaggagcgtgttgccattgccgacatcatgaaggctgccgacgagggcaagctggaggaagtctttggcaccggcacggctgccgttgtctcccctgtcaaggagctggattgggagggcaaggttgcccacatcagcggcggccacatcggcgaactgacccagaagctgtatgacacgctgaccggcatccagtggggcaagctgcccgacaccaagggctggatcgttcctgtggaataa

SEQ ID NO: 80 - DNA, 10763 bp, unidentified
  source 1..10763: mol_type = unassigned DNA
  misc_difference 458: note = a, c, g, or t
  misc_difference 459: note = a, c, g, or t
  misc_difference 460: note = a, c, g, or t
  misc_difference 461: note = a, c, g, or t
  misc_difference 462: note = a, c, g, or t
  misc_difference 463: note = a, c, g, or t
  misc_difference 464: note = a, c, g, or t
  misc_difference 465: note = a, c, g, or t
  misc_difference 466: note = a, c, g, or t
  misc_difference 467: note = a, c, g, or t
  misc_difference 468: note = a, c, g, or t
  misc_difference 469: note = a, c, g, or t
  misc_difference 470: note = a, c, g, or t
  misc_difference 471: note = a, c, g, or t
  misc_difference 472: note = a, c, g, or t
  misc_difference 473: note = a, c, g, or t
  misc_difference 474: note = a, c, g, or t
  misc_difference 475: note = a, c, g, or t
  misc_difference 476: note = a, c, g, or t
  misc_difference 477: note = a, c, g, or t
  misc_difference 478: note = a, c, g, or t
  misc_difference 479: note = a, c, g, or t
  misc_difference 480: note = a, c, g, or t
  misc_difference 481: note = a, c, g, or t
  misc_difference 482: note = a, c, g, or t
  misc_difference 483: note = a, c, g, or t
  misc_difference 484: note = a, c, g, or t
  misc_difference 485: note = a, c, g, or t
  misc_difference 486: note = a, c, g, or t
  misc_difference 487: note = a, c, g, or t
  misc_difference 488: note = a, c, g, or t
  misc_difference 489: note = a, c, g, or t
  misc_difference 490: note = a, c, g, or t
  misc_difference 491: note = a, c, g, or t
  misc_difference 492: note = a, c, g, or t
  misc_difference 493: note = a, c, g, or t
  misc_difference 494: note = a, c, g, or t
  misc_difference 495: note = a, c, g, or t
  misc_difference 496: note = a, c, g, or t
  misc_difference 497: note = a, c, g, or t
  misc_difference 498: note = a, c, g, or t
  misc_difference 499: note = a, c, g, or t
  misc_difference 500: note = a, c, g, or t
  misc_difference 501: note = a, c, g, or t
  misc_difference 502: note = a, c, g, or t
  misc_difference 503: note = a, c, g, or t
  misc_difference 504: note = a, c, g, or t
  misc_difference 505: note = a, c, g, or t
  misc_difference 506: note = a, c, g, or t
  misc_difference 507: note = a, c, g, or t
  misc_difference 508: note = a, c, g, or t
  misc_difference 509: note = a, c, g, or t
  misc_difference 510: note = a, c, g, or t
  misc_difference 511: note = a, c, g, or t
  misc_difference 512: note = a, c, g, or t
  misc_difference 513: note = a, c, g, or t
  misc_difference 514: note = a, c, g, or t
  misc_difference 515: note = a, c, g, or t
  misc_difference 516: note = a, c, g, or t
  misc_difference 517: note = a, c, g, or t
  misc_difference 518: note = a, c, g, or t
  misc_difference 519: note = a, c, g, or t
  misc_difference 520: note = a, c, g, or t
  misc_difference 521: note = a, c, g, or t
  misc_difference 522: note = a, c, g, or t
  misc_difference 523: note = a, c, g, or t
  misc_difference 524: note = a, c, g, or t
  misc_difference 525: note = a, c, g, or t
  misc_difference 526: note = a, c, g, or t
  misc_difference 527: note = a, c, g, or t
  misc_difference 528: note = a, c, g, or t
  misc_difference 529: note = a, c, g, or t
  misc_difference 530: note = a, c, g, or t
  misc_difference 531: note = a, c, g, or t
  misc_difference 532: note = a, c, g, or t
  misc_difference 533: note = a, c, g, or t
  misc_difference 534: note = a, c, g, or t
  misc_difference 535: note = a, c, g, or t
  misc_difference 536: note = a, c, g, or t
  misc_difference 537: note = a, c, g, or t
  misc_difference 538: note = a, c, g, or t
  misc_difference 539: note = a, c, g, or t
  misc_difference 540: note = a, c, g, or t
  misc_difference 541: note = a, c, g, or t
  misc_difference 542: note = a, c, g, or t
  misc_difference 543: note = a, c, g, or t
  misc_difference 544: note = a, c, g, or t
  misc_difference 545: note = a, c, g, or t
  misc_difference 546: note = a, c, g, or t
  misc_difference 547: note = a, c, g, or t
  misc_difference 548: note = a, c, g, or t
  misc_difference 549: note = a, c, g, or t
  misc_difference 550: note = a, c, g, or t
  misc_difference 551: note = a, c, g, or t
  misc_difference 552: note = a, c, g, or t
  misc_difference 553: note = a, c, g, or t
  misc_difference 554: note = a, c, g, or t
  misc_difference 555: note = a, c, g, or t
  misc_difference 556: note = a, c, g, or t
  misc_difference 557: note = a, c, g, or t
ttactcgtccagaagtttctttaactcttctttatctgtaagaccaaccagacggtgtgcttctgctccgttcttgaaaatgatcagggtagggatgctcataacccggaactgctgtgcaagctccatgttctggtctacatcaagctttcctactgcatagccttcctctcccagttcctccacgattggcccctgacgcatgcatggtccgcaccaggttgcccagaaatcaagaagaaacggtttctcagattttaatacttcctcttcgaaattctgtgttgtgattacttttgccataattgatccatcctttctatcggtctattcttctctctgatttcacgccgcaattctactttttttgtctgtttctcacatactggtttgcactgagtcctgcctgagcgccatcgtaaactgcctttgccacctgcaaaagaccgccggtacannnnnnnnnnnnnnnnnnnnnnnnnnnnnnnnnnnnnnnnnnnnnnnnnnnnnnnnnnnnnnnnnnnnnnnnnnnnnnnnnnnnnnnnnnnnnnnnnnnntctccctctacagactgaattttcattgtattcaccgcaaaagaagatttcctggaaaactccggttctttcccatctgtgtaaatggtaacagaaccagccataggtgccagttcttctgcctcatgaagagcaaagtcgctgtttccaagcactgcaacatcctttcccctgtagaaaaatgcgtcgcacacagcacagtagctgacacctcttccctcaagttccttaatccccggaattgcaggagcctttcgtttgcttcctgtggcaagaatcacgctgatggtgtcaaaatcacctgctgttgtctttactgtaaaagtatcaaacccgccaatccccagcacctgtgcctccaggatccgcacgcctaatgctttcgcctgtgcaagtcctgtctcaaataattctttcccggaaacaggatgttccataccataataattctctattttttctgctttttccaaagcaccaatgccgttattgatcaccagtggatccatatttgcccgggcagcatacaaagctgcggaaattcctgccggtccggcaccgataatgattattttttccatatacttcagaatcacctgcctttcttatgattccaatcatttccacatattgttatttacaatgtaactgttcagtatcttcacagttatacccttcccgaaagggtacctgctaaatagttacctgacaatatactttctataaaagaaattcagacttttcatttttcgtcggttcttttatcgtctatagccttctctgcataagccagtccccagaatatcacagctggcatacacgccatcaacggaaacgcataacgcagaagaccgtttaccggagaagctatacagattgccacattcagcgccggggcagccaataccaggattcctttccatcgcttcctgtagatcagatatccaaggagcagaatcacgatccatgtgtaggttcccgcattgcagatctgcgcaagacctggaatctgactccacagatcggcataacgtttcagctgattccttgtctctgcggaaaagatctgatgataatctgactcttcaatcagcggctcatttactgtatagaagcggtaggagctctgcgcggtgcaattatgaaatgggtaataatatccatagctgttatgaagtgtggcttctatatacacccccggatgcctcagaaacatgctgaaccaggcattaaagtagcgtttcagcttcgccatggtaatatgtccgccgcgataagttgcctttaccggatcagacagttccggattatacaaatccgcaatctcatcatacttcatcaccccgtcaattgctttagcttcttcctttgtcacatcatccggatattccttcagatatctggctgtctgctgcattggaattgagaaaaatactctggatgggaaattaccaatgtatagtctcggtgccacttctttctgaagccccatgtagcccactgtcacaaggatcaccattccaactgcatacagtctgcgtttttttccaaggaaaaagaataacaggataaatgcaggaagcaccatgtaaagtccattatttctggtaatgcacatgccaaagccaaccagaaacagcactgtcagctgctgtcttaaagactgaccgcttttttcccgaagggtgggaatgcaacattccacatagattaccatgaaaagggaaaacagagcgctgaaacttccatccttaatgatcgtctgggaataagctccaaatacaggcacaagactgaaaaatgcaatacagcagatattgaaccatcttggtgctccccatgatttcagtttataacaaacagtggcataacataccgcataaatcagtgccagcacgccaaccaccatgaaaatgccccagttatcactgatcacatttccaattgtcatcaaggctcccattataaggcttaattcccatggatgcttgtttgtaaatctctgatttccggcaaacatattcagctgccggaagccatcatagggaacacttcctggccagaagatcaggatatagggaagccatcctgccaaaatcagcaaaaatgctaccagaaggtagtgtttttccataaattccggaaatttctttatattcctgctgtgcagaaaaggatgcttctctccatatgcatataaaagactgatcactatatcaaacagaaaaaagaatcctgcccatgtaagcaatgcaatcagaatctgatttctcccagctgtaaagaaggaccagtttccctgcacggaaaaggacattccgatcagcataaaaacagaaaacatggcggcgatcagatgcgtgatccatttacagcttctgcaaaaattcctccagcatttcatgtacaatgcaatgatcgcaatgagaaccaccagtttgtcgattccgattcctgtcatctctttcttgcataaagaaagaaatgtttctcccggattatctgccgaaccagcatacaagcccgtcatggaaagagcaaacactgttaaaatggcggcaataaccggcaaagtatatttttttaattttttttccaccaataaatcctcccgatttttatcacactgccattctaacattactatatatgaaaagcaaggcgtggtttttacaaggtaaatttttggaatttacagattttttgaaatttttgttgcgtcaaagcagtttctatgctattatatgcactgtaagttcagagaacttataaatgcccagatagctcagttggtagagcagaggactgaaaatcctcgtgtcgctggttcgattccggctctgggcattttttatttttcaaacacgctctggaaaaagccgcccccgaaggggcggcctcatttattttgtaagcatttcatctaatgtttcgttcagcatctctctggatgtcacctgtatcgcctgaattcctgccttcttcgctccttccacattatccatgcggtcatcgaaaaacagacactcttctgctttcaggctatatttctccagaaggatttcataaatttccctgtctggcttcagggcgtgaacctgataggaaacaactcccccatcaagcacatccaggaatttcgctcccttggtgtgcacatggaacagttcttctgagtagttggaaagcaggtaaatcttataaccattttcctttagcgctgcaaccttgtcccagacctccggacgctttacagccatctgctctccgtttcgaaggaaccagcccatcacatccacatcgtccgggtacttcagttcatactgatgaatggcttcctcaaggctcagccttcctccgtcaagtccctgtacccagatctcattgtcaaacatttcctcgccaattctcttcgcctcagcttcagaaaggccgtagtccctggtcagcatctcaaaccagcgatactccaccagtacatctccaacatcaaaaattaaattccgaatcattagtcttcataaccattcgggttattactctgccatctccaggaatcctcgcacatctcacggatgccattctcagctgtccagccaagctctttcgctgccttggaagcatcgcagtagcaggtagcaatatcgcctgcacgacgtggtttgatcgcatatgggatcttaacgcctgttgcagcttcgaaattcttcacaatatcaagaacactgtagccttttcctgtgccaaggttatagattgcaagtccaggattctcctcgatctttttaagcgcttttacatgacctttggcaagatctactacatggatataatctctcacgccggttccatccggagtgtcatagtcattaccgaatacgccaagctctttcagcttgccaacagcaacctgtgtgatgtatggcataaggttgttcgggataccatttgggttttcgccgatggttccgctcttgtgggcaccgatcggattaaaataacgaagcagcattacgttccactccggatctgctttctggatgtctgtaagaacctgctccagcatggatttggtccagccatatgggttggtacactgtcctttcgggcattcttctgtgatcgggatctgtgccggatctccatatacagttgcagaggaagagaaaataatattcttaacaccatgttttctcattacatctacaagagtcagggttcctgcaatattattctcataatattcccaaggctttacaacggactctccaacagccttcagtccggcaaaatgaatacaggagtcaatgtcttctttgtcaaaaatctggtcaagggcttccctgtccaggatatctgctttataaaatttaaccggcttgcctgtgatcttggaaactctgtcaagggccttctcgctggaattagacagattatccagaactactacgtcataaccggaattctgaagttctacaactgtatggcttccaatgtatcctgcaccgcctgttactaaaattgccatgatattttcctcctcgtttgctgcaaagttcccaccattcatcacaatcaataaacaaataaccttctgctgttttctcttttcacagcactccacggaatgttatccgcaaacagcaactgtgatggtttatgtccattctttgcaatccttattagtaacctggaaggcattttttatgcctgccaagtttagaataccactatttatatttttctacaatagctttcatctcagataatttctgttccatatcccacaccagcttgaactgggttcttgcacgatccagattctgattttctcgatggatgcggaagtaatgatctccctccagatggtctgccaggaaacgcattccacactcaaaggtcatcaggattgcacccatcggaagcatttccacctccaaatctgtgagggcaccgccgcagccttccagaaatccttttacatacacctcaaacagatgaaggtcacaggacactttggaaatatcctgctcatcctctgctgccgtgcttgcgccaaaacggatggaatcaccaaaatcattcagagaaagtcccggcattaccgtgtccagatcgatcacacagattcccttatgggtagcattgtcgatcatgatattattcagctttgtgtcattgtgcgttacacgaagaggcagcttacctgcatcctgtaaatccacaagtgtatgggccagctgctctctttccaggacaaactgtatctccttctgaacatcagccgcccgtccgcatgcatcctcttccacagcctttttaaaattggcaaatcgcttcactgtattatgaaaatccgggattgtctcatgaagagtatctgccggataatcagcaagaaggcgctggaaattaccaaatgcaagagcactctggtaaaaatcctcgtcattttccacctgatcaaagcaggttgcatcttctataaacagatacgctctccagtattctccctctttatctacaaaataaggagctccagcacggtcatttacgatattcagggtttcgcgctctgcatccccgccattttccaggattttcttcttcagccaggaggtgacaccactgatattctccataagaccaacaggatctttgaaaatctgcttgttcattttctggagaatatagcgcttctgtccggcttctgtggaaaatacagcacagtaagtctcattaatgtggccatttccaaatatgccaacctcttcaagtttaccgccaaaatcaaagctgttgattacttccatcagttcctgatggcttacatcttttgtttttcccacttatttttcctcccaaagcttctgaggataaagaccgtcatctttcagcttctgaattgcagcaactactaccggcttatcttctttataggtaactccgtaccatttgtccatagatttcagaactttgacagttgctttcttctcgccaagaagctcatctacaacaaatggaaggaaatattcgcatttcagaggattcttttccacattttctttcaggaataatgggaatctgtccttcagttctctcagaatgcttgcagaaaatccccacatattcatagacaccgtagcatccataggaagctctgtccatgtagcaccatcatcctcggtataagcagcaccgccatctctcttctcaatatgggtgcgctcattaatatccttcagaaatccctcttcgtctgtcacacaaacaccacgagccacatgtccattatctgtcaatgtgttctcaagcttgtagcctaccatcatgtactgataaatgccgtctttatcctgattctctgtaaggaaatcatatgccatcttaaatgcatgacgtccataataatcatccgcattaataacggcaaaaggtccatcaatcacattgatacagctcatgattgcatgtccggttccccatggcttcacacgtccttccggaactgtaaagccttccggaagattatgcagatcctggaatacaaattctacctggatatgcttactcatacgatctccgatagcagcacggaaatcagcctcattctccttctttataataaatacaattttttcaaaccctgcctgaatagcatcatagatagaaaaatcaatgataatgtccccgtccttatcaataggatcgatctgcttcaggccaccatatctgcttcccatacctgctgccattactaccaataccggctttttcatgttattgctgcctcccattttttatttgtcaaaacggatattcctgatccgctttgttgcttattcataacgataccagggacaaacaattgcccctggttcgatggtaacagacaaatctcttcttgtcaatttctatcaattatttcacaggaaatactccggttttaatattcccagaccgctccccagcacttttcctgacttcagatatttctttgcagctctctgaagagatgtgttctcggaatatacattcaggttccgctgtacctttccccaaatacgccattcagcctcacgctcatcccaatctgtttctacaatctgaaattgattctgaaacataatgatattgcttttctccggcaaaatgtctttaagccccggatagagcagccaggaatgacacagatacggcatctcttttccccagaaagccattccctgaataatggattccctcacactctccagtgtgagcttttcgccctgtggaatatgaatactgatgatcggatctcctttttttaccattctttctcctgctgtaaaattccagcgggaatccatgatttcaaattgcattcttccaagcctgaaaatggtaagcttcatatggcggaaaaaccagtcgtattcatcaattccatactctccatattccagaaaacagttttcacaccaaaaggtcagatcgtaaaaagtgtccctgaaaatttcccggctgattccccgcttttcataagcatcataggtttcggcgcccatgcggcataaataatacagaaacacaagccgataatccttttccaaaagaattttttcataaaacaaagctctgtctttctcatacaaaagcttattttcctgatattcttcctccccaatgcgtccggattcctgaagctcattaagcagatgcacagcctccggcagcatgttgatttcagctaaaaattcatttattttcattggcaaatcctctgagatttacaacctgtcccgttattcttgcttcctctgctgccagtgccatcagatgactctccacggaaacagcagcgtctgttttaccctttcttccttctcctaccatacggacaaaatcatgcatcatactcatatcacttccgttatgtccgtttgcaggtgtgtgaagctctattgtctccagattcccactgacaaaatctctgatctcaatagtacctgcatccatatcgcctttgatctcaccttttgttcccataagacggatccgtctagcacactggtctgtaaaggctgtcataaggaaggacgctgttacctgattttcaaactttatgtcaacggactggtgatctactactgtattatcacagtggaatacacatcttccgtaaggtccttttttcaaagcctccaatacatgctccggatctgtctgatcggtcactgcacgtaccagatagccatctaaattctccagataaaagcgtggtgcatagaaagcacattcatctctatgtgggcatccatccagacaataagcaggagctccttccggtgcattttcctctgtaaaataagacagttcgccaaaggaactaaggctttcgcatttactgtctgccagccacagcatgatatccatatcatgacagcatttctgcaggatcataggactggattcctctgcatttctccagtttcctcttacaaagctatgtgcctgatgccagtaacctacctcttccatatgctggatagtcataagtcttcctattttgccttcttccagaagttcttttaatttggaaaagaacggagaataccgaagtacgtggcacacggacagaatacggtcgtatttcttcgccatctctcccatttcaatgatttctttcttgtcgggagacatgggcttttcacaaagtacatgatatccctttttcagagccatgatcgtaggctcataatgcatcctgtccatggtgcagatcatggcacaatctgccagcttttcttttccaagaagctcttcatagctttcgaagcaaagctcttccggaatattgtgtctttttgcaaagctctctctgcgctctttatccggctctgcaactgccaccacctgaaattcatctggatggtccagtgcatactgagaataaacatgacctcctctaaggcctgctccaattacaatactcgttacctttttcatactcttttactcctgtcgcaaacgtatttttaaaaccgtatctttttcatctggcaatggataggtaaataccggatcatctccgaaggaaacaaaggccacatccggatacagcaccgtattccatgcttcccctctgttcacctcactgccgtctgcaagatatgtaacagattccagcttatccgggccgattccatacagcggaagtgctccaagcggtgtctcataaacatgagcataaatgatgtcacctttctgggtatatcttccccaatccggcttttccaatttggaaattccgcatccgtaaatgctctccccattttttttcatccattttccaacttctgtgagaatctgaacactctcctccggaatatttccacgggcatctggtcccacgttcaggatcatatttccacccttgctggcacattccaccagctttcttacaagcatctgaggggtcttatactgatggtcgaaattgcaatatccccaatgattattcatagtggcacaaagttcccatggaatgggttctcccttgtcatcacatactccttttggaggaatgatctgctccggacttgcaaaatcaccgctgtaaatcagtggtttctctgttgtaatgctgccatggttatcccccgcaccttccagacggttgtcaatgatcacatccggctgatactttcgaaccattttgatcagctctgtggctttccatttttctccggtcatatcgtcataggaaaaatcgaaccatagaagatccagcttgccataccctgttacaagttcctttatctggccatgcatatacgcaagatatctgtcaaaatcaattttttcatctttatatgccggattgtttcgcataggatgctgcctgtctccatatttaggaaaatccggatgatgccagtcgataatggaaaaataaagaccaacctttaatccttcctctcggcatgcatctacaaattctcttaccaggtctctgcctgcttttgtgtttgttgacttgtagtctgtcagtttagagtcaaacagacaaaatccgtcatggtgctttgctgtaagtaccacgtacttcatgcctgctttttttgccagacaaacccatttcttcggatcataatccacaggatcaaactgatcaaaatacttactgtattcctcaattgtcatttctttctgtgacatcat

SEQ ID NO: 81 - DNA, 8535 bp, unidentified
  source 1..8535: mol_type = unassigned DNA
tcttgtgagcttatgcgccaatgatataggatacggcatgtattcttctgtctcattggttgcataaccaaacatcattccttgatctcctgcacctattttttccagctcatcatcactaagtttatttttttttgtttctaaagcctgatttactccaagagcaatatcttctgattgttcatctaatgttattattacattacattcatcacaatcaaaaccatattctttattattatatccaatctctcttattgtatctctgacaatcttatcaatatttatatttgcatttgctgttatttctcccataaccaaaacaagatttgttgtaatcgctacctcgcatgcaacatggcaatttggatcttcttctattaatttgtctaatattgcatcagaaatttgatcacaaattttatctggatgtccctctgttactgattctgatgtaaatagatgtttattcattatatatttctcctgtactaattcgtatttttctattatatataaatatagtggtttctattatccaaattctgtatctataattttcattgatattttttgtagaaccttacaagaaaacttgatagtgttttgaataccttcttcaatagaaacttctggtttccaaccatacttttcaaaagcgtaatcattagaaagttcagtatactttgttacttcatgatcaagtgctttttcagaaataggataagcaccttcatatagattcggatagttgttccaaaaattcttagaatcactatattccggtaataattcttctttatgcataagtttagtaacaatcttcatcagttcatttatggacaatgtcgtacccgtagaaacatttacaatatgaaatcctttatcctgtaacactaattcgcaaagtcggattaaatcttcaacataaacaaaatctctccgttgctcgcccgtcccgtgtaataccggatgtctatcatagaataattcccgaatcatatatcctactaccggtggttgtgttctcaagcaatctaaatgtggtccataaacatttgcaaatcgtagacaggtaacattcatattataaatatccacataactacggcaaaactgttcagctgtatatttagtagatggatatatcagacttggtggcacaacattagtttcaatcgaaggaaaatctgtattattttcatacaccgcagatgtactggcaaatacaacttttttcaccccataaatacgacttgcttcaagaatagttacggttcctgtcacatttacgtccaatgcttctgaagggttcatctgacaatcaggaagcggagtaattgcagcaatatgataaacatagtcgaattgatgtttttcaaaaatttgattgatcaattctctatctcttatatctcctctgataatttcatttctaaaatcatggttggaaaatacgaggttgtcctccgaaccataagaaaaattatcaagcaacgtcacttggtctccttttttccaaaaataatatgcaagctgagaaccaataaaacctgctgctcctgtaataaatattttacgcataagtaaactccttagtttttaatatgatcaataccacacatgctcttataaaaaacactcatcattaaatgattaaaaatcatatgtacatcctccgtgatttgcatactattaataggcacatgaagagaaatgtctgatagttcttttaaccttccacctgaatatccagtcaaaccaacaactttgcaaccttgttttttaccatactctacagcattaatcacattaggagaatttccactaccagagatagccattaaaatgtcccctttttttatttttccttgaagctgaaaacgaaatacttcttcatatccaatgtcattagctactgccattatagtagcaatattgtcatttaagcataaaaagcgaaactttttatctatatgctcggaaactcccttattaaaatcattttgaaaatgagacgccgttgcagcacttcccccatttccaaaaacataaattgtagcctcccttttcatacctgcttctaataaatttaacacttcgttcactgcgctcacatcaattcttttcagaatatcaatttcttgctcaagatatgtctcaattaattcattataatccataatatcctacccccttaatcactaaaaacaattcgacttccctcatggcaataactaaatggtatatatgtaaattcagaaagtgcttcttgtactaaattctgtctctgttgtggtacataaagcatcataaatccgcctccacccgcacctagaatcttaccaccaagtgcacctgcacttttagccttagcatacatactatcaatctgcggattagacacaccgtttgcaaacttctttttaatctcccatgttctatcaagctcggctccccaaaagtctagattgccatcataaagtgcttgaacagcacggtctgtagtatttaccagttcatcaagcataactgttttatctaaaatagtatcagattgctcattaagaatttttctggaatctctagttgttccagtatagaataacatcaaattatttctcagttgaaccattgcttcttttttacagacaacaggtgtaatacttacgctaccatcattaaaaaatttatattgactaaatcctccatgtgcaacagcaaactgatcctgaatcccaatgcgttgtccaagacgattaatttcaatctcgcatgcttcgcgtgctaaaactccttgtgacacaaattcacctttatatgcatgtaatgcatttaaaacaccaactgcaagtgcactggaagatgcaagtcctataccggcattacttaatggaatgtctgccatataaataatttcaattcctttttctatgccaacaatttttagtgcttcccgaataatattatgtttcacttcatccacacgactaactaattcattgccagaataaactatacgaatattatcatcaaactttctgttcacaataatataaacatacatatctaatgctgtgctaacaaccgtaccataacccaccttactgttttcatagtaagtggaaaaatctgtccccccaccaaaaaatgatgctctaaggggtgtctttgaaataatcatgtatcttctcctttttctctaatgaaactatttctttggcaacatccaaaactgtgtatttttcatcaaccatcctacatatacaaccggcagcctctcccgctgcaatatcacgttcatcatccccgataagatagcattcggagaggtttaatgaatattttttctgagcttcaaaaatcatacctggatttggttttctacaaaaacaaccatcgtcccaattatgaggacagtaaaatatatcgtcaatttctgttctttccttcaaaagatctgcacgcattttttcgtgtatgcaatgcaacatttcttctgtgagattacctcgtgcaattcctggttgattcgtaatgataatgacgagaaacccattttttttcagcatatgaattgcttctattgctcccggaagccaaacaaactcttctggcttttctatgtaacaagctcgtgccgggcgtttgtttatggtaccatcacgatcgagaaacacaacacgtttcggtttaaaaaattcttccgtaaatttgattcgctcaaaagaaccaacagagtaatattgatgctcagtcattgtggcaaacaacttgttttgtgcaactaattgtggataaacctcttcctcaaaattacaattttcctctgatattaacgaaatgacgctcttatcgactaacgcataaccaatatcaactccctgtaaatttggtataatacgttttttgtcataagttgtgatcaatccatcatcagtaatatgtagattgctttttgtatagttgtcacgattgctataagcagtaatttgaatctttgctttattattacaaaagtctgcgaacaattttgaatagttaatcggacaatagttatcacaatataaaagtaaaaatttatctgcgatctgtggagcagcatgttttattcgcatacctgtgtcgtagtctactggcgttatatcataatttatggttaatccataacgtgaaccatctccaagatagtccataattttcttaggtaaataccctaaaaggagcaatgcctcttccattccgaaacttttaatctggcgtattagataatcaataaatggaatgttattaatcggatacatcggttttggtgcagtatttgtaaatggtttaagacgtgtgccaagtccaccagcaagaatgacaacttgagtaactcttttgttcatattcactcctcttatttttatccacggccatatcgtagtatattaaagttcctgacagtcattggacatattgatatcaaaaggaatcttattctatcactaatttttactgccgaatttattaaatatatatatctcgtttttttataaaacaatgaaatatttactacggattctttaaatttttcatcactcataagacatactatattgtaaaaataccataacacatcatacagataccttttttgcaagtctttcacaaattttttatcagagcttaacaaacggcattttcttattccatctaaccagcattcatataaatctttcaaattgccttttatttctgtccccatcaatccatcatctctaatcctgtaatgatataatcccttgtgatatgcaactatctttttacattttaaaaaaatagttggcatcacatataagtcctcatgaagttttccttccggaaacttcacgtcttcaaatatttgttttttaaataattttccccaaacttcaccagccgatatttccaaaatatgtaatatcattttctttccatcaccaatcaatacctctcctgttgaatgctcatttcctgctttaatgataaaagcgatgtccgattcattctcttcttccaaccaaaccaatgtttcaattgtattattttctatccaatcatccccatcaacaaacagtatataatcaccagttgcctcctcaattcctctatttcttgcagcagataccccttcgttttctttatgtactactcttatattttcatattctttttcatacttatgacatatctctggagttttatctgtagatcctccatctattagaataacttcaatatttttatacgtttgattaattagtgatatgatacattcctctacatatttctctgtattatatactgtaacgattactgatactttacacacaaatccactcctcattttcttttttttaatacactccatagtttaaacttcgtcatatctattatcattaatctttatcattcaaacaattaactaacattccctttatctacacctattattccatattactttttctatgcatatttatatccattcctaataagcactaaaatactcaaataataaaaaatagattttgtcttttatgatctcaaacaaaatctatttttcttatatattttcaaaataaatatttaatttttccaaactattttctaattgccagaacaaatctttaattttttttattactatttcgccatacttctgtccttttattaaattatatttcataacaagacttctcaacatctcatttttatgggacatatcatgaaagtcattctggatatttcttatatacgtgttatcagataggtatttatgctcaatcatataatctattctacaatacattatctcattaaatatgtaaatcaaatgaattattctaaaatcaaggcgctcatgtttacatacgcattcattaaaatattctattatatgatttaggcattcaaacccatataaaacagcttcgtgtactgtaaataagtctgactcatcattaattgtattctcacgtgattttataaaatcagtaatcatattacgaattctatcaacatttaaagcatactttttattttttaagtatttaaatgttctaatttcgacagaattcacattatctctttcccttatatatcccgcatgggcatcaaatgccattctaaaatctaaatatgaaatctcttgtattgaataagtatgtttgaaaaagtctgctgtaaagaacacttttttttcattatcatatccccaaataagcatttcatgttcgctatgttctttttcctcaatatccttccaccacgaatctataaaatacatatctactgccaaaaaaatatattcttgattatctatactattcttaataatatcattaacatcttgattctttcttacatctagaattactgtttccaacactggacattgctcataataattaatatccctgtcatacttaaaatccaccatatactcttttctttgtctccttgcatatatccataacgaaatataattattatataaccatacttcgtcatttccataagcttctaatattccgtttattgcagtatttattgaatatgtcttatatttaggaatcttaaatggtagcttaattatattattatttttgccttccatatctttattttcctctcttatgaacagttattcactaatcacttataatgctttgcctgtgtactatacatattatagtataatccgtccgcatttttcattaactcctcatgacttccttcctccgtaattgttccattattaaatacaattattctgtcacaaaatctacatgaagataatctgtgtgaaatatatattgcagtttttccataaaccaatttgtcaaagtttttataaacctcatattcagaaattggatcaagagctgctgttggttcgtccattactacaatcggagcatttttatacaatgctctggcaatagcaagtttttgaccttcaccaccggatggctcaataccgttttccacaaacatcttatagatatatgtctggtcttttttatcaagactatcaatccatttatcaatgcctacaatcttatatatttcttccagatccgtatttttatcatcaaatacagttacattttctttaattgtaaaagcaaaaagtctaaaatcctggaatacaactgataacatcttcatatattctacaatgttatactctctggcatctttaccgtttactaatatctcaccttcgtagttgtcgtacaaatgacaaaggagtttaataaatgtagtcttacctgcgccattttgacctacaattgccagatgttcccctgctttaatctttacagataggtctttaagaatatacttgtctgtgtttgggtatttaaaactaacatccctaaactcaatttcgcaggctttgtcagttacctctacaacacaatcacttaaatccatcaatctgtcgttttccccatatatatcttcaacaaaatcgatgtaatactttaatatcgatgaagtataattcatttccaaatatgaatttacaattcctctaatagcaccaccaaatttagaagtcgcctggaacaaactggagaattcaccaattgaaatgatcttgttaaaaacatttactgataataatatatagatagcagaatcacaaacagcataaaatacattatttatatcccagtattttataaattttgtatgatactttttgctggtattatatattctacctacatatccgtcatatttcttttcgaatatttcagatgtatcatataaacgtacatctttggcatatctgctttcctgtagttcagtgttaaaatatgtactacctctctctacattgcccatttctttaaaaaacttacgcctgctcttattaacttttgaagtagtatatgaattcgctgcaaacgaaataattaccggaatcattaaccaaggaattcttgtacaaaccaaagtcacaacacctaaggcaacaataaaattcgtcacaatgcttgctaaagatgtgataagaccatttacctgcccggtttcatttaaagctctttctgcatttttaactttatccaaaaattccgtttcttcagtatgtttaaatttcatattgatacagctcatacataaatttgttttaaaaattcgatcaaacttttcaccaattctggcaatgttttctccaacccatttcattatgttggagcaaatgaaattacctccacaaataaatgctacccagaataccacccaaccgatatttctcttagatgcatcagcaatttcatcaattaaatactgagagcccaaaattgatataaacggagaaactgagttaacgattatatttattaacaaaagcaaataatattttttatcattctgccaagcaaatttcccgaagaacttaaaacaacgaatattatctttactatttttcatcgttctgtcctcccacactgtctttcttatcctcataatattgggactgaatctgga

SEQ ID NO: 82 - DNA, 5925 bp, unidentified
  source 1..5925: mol_type = unassigned DNA
tttttcatcgcccggcggcgggtcgagccgaatgtcctgagccagctggctgagcagaccgtccgcatcggcatcgtctgggccgcgctgggccgggccgacgctctcggatgggatgcggggcagcgctgtacggcagtgctgggcgcaacggcggccagcgaggccgtcagcaccggtctgatggccctgttctactgccgggaggcccgccgctgcttcggctcacagcctgtacagcgtccccatgacccggggaggcggctctgggacatcctctggccggtggagggcgggcgatgtctcgccagtgccctccacaccgccgagaatatgttggttccggcctgtcttgcggtctatctgcaatgctccggcgggcgtgccgaggctgtgacccagtacggaaatctgaaagggatggccctgcccctgctgacctttcccttcgggctgctggggagtctgtccgtcctcctgatgcccgagatcacccaagcccatctccgggggcagagcaggcggctctccgtcctcatcgaccggatgctgcggctcacaggctatttttcggcgctggcgggggcggcattctgggtgtggggacagccgctggccgaggcactctacggcagcgcggaggcgggcagctatctcgtcatcctcggcccggccatgccgctgatgtacctcgagagcatggtggacggcgcgatgaaggggatgggagagcagaaagccgtcttccggtacagtatgtgggactcctgcctccgcatcgcgggggtggtgctcctgctgccccggttcgggatgaaggggtttctcttcgtgatcctgctgtccagtctctacacctgcgccgccaacaccgggcggctgctgtccagctgcggcctgccgctgcgactgtggcggtggctgggggcgccgggtcttgcggggacggccggtaccggagcggggctggcgctgcggaagcttctgaccccatggctggcgagaggagtgcccgcgcagctggcggcggtggcgctgggcggtgcggggatgacgctggtctgctttgcggcggcatggccgctgggcctcggcgaggagctgcgggacgtggcggcaggggagagaagacacaaaagcgctggacatggggagaagaatcgagtataatgatacagatacgatggggcgataggcccttgggtcgaaaaaacggcggctggtgtctctccgacaccggccctgatgcaaaagaggactttctgtgaaggaaaagaaaacaagtatgctgcaggtgctggcccgccgggcctttctggtggtgctggacgcagccatcgtagccttcagcttttattttgcgctcctgctccgtgcagacggcgcagtcgaggcctcgtggtggcctcacaaccgcgccctgctctacgcgaacctgccgtggatcgtggcggtctatctgctcagcttcttgggcgggaggctctacaccatcctctggaaatacgccggagagcgggacctcatccgtctggctgggatgatcgctgccccgacggtcgtggtgtatctggtcaaccgctgcttcatccatggcgtgctcttcaactcggccaacgcgatggcttcggtgctcatcttcctgctcgtcggcgggagccgtctggcgtggcggctcttcctgaaccacccgttgggcgagcggctgcggggcaataccagcaaagaccccaaccgccctgtgatgatcgtgggcgcgggcgaggccggtgcgtgggccatcaacgtctgcaagagcaacggcagctacggccacccggtggtggcggtggacgatgaccccgccaagctgggccagaccatccacggcgtcccggtgaagggcacgctggaggagatccccgacctgtgcacccggtacagcatccacaccatcatcattgccatcccgaccctgcggggcagccgcctgaaccatgtcatcgacctctgcgtctccacccactgtgcggtgcagatgctcagcgacccccagcttgtgggggcgggcgcaccccagcagggggcgttccgagagctgaatactgctgacttcctctcccgtgaggaggtcacgctggacacggcccagatctcgggctacctcaccggcaagaccgtgctggtgacgggcggcggcggcagcatcggcagcgagctttgccgtcaggtcatgcgcttcagacccgcgaagctgctcatcttcgatatttacgagaactgcgcctacgagctgcagatggaactgcagcagaagtatggccgcgatgtgcccatcacggtgctggtgggttccatccgggacaaggcccgtctggacgaggtctttgagacctaccaccccacggtggtgttccacgccgcggcccacaagcacgtcccgctcatggagatcagccccgctgaggccgtcaagaacaacgtcttcggcaccaagaacctgctggtcagcgccagcgaacacggcgtggagcggctggtgcagctttccaccgataaggccgtcaaccccaccagcgtcatgggctgcaccaagcgcctgtgcgagatgctcatccagacctttgcgggcaacaccgacatgaagtgcgtggccgtccgcttcggcaacgtgctgggcagccacggcagcgtcatcccgctgttcgaggcacagatcaaaaagggcggccccgtcaccctgactgaccccaacatcgagcgctatttcatgaccatcccggaggccgcgcagctggtgctgcaggccggcgcattggctgagagcggcagcatctatgtgctggatatgggtgagccggtcaagatcatggacctcgcaaagcagcttatccgtttctacggctacgagccgggcgtgaatatggacatcaagatcgtgggtctccgccccggcgagaagctctacgaagagctgatgatggacgaggaacaggacaagatgcgccgtaccggccacaataagatcttcgtggctccgccccggaacatcgatcttggtgagttctatcagcagcttcaggagctgtctgccgccgccgagcacaacgacgacaacgtcgtggcccagctggccaagatggtgcctacctttacccccacccgagagaacctcaagctgtgaactgctggctgcacagcattcggctgtgtaaaaatatatgagagggatgtatatcatggaaaagaaaccgtttttgactgagtcgatggctcaggacatcattcaggacgtgcccacccccttccacgtctacgacgagaaaggcatccgggagaacgcccgccgcatcaacaaagccttcagctggaataagggcttccgcgagtatttcgcggtcaaggctctgcccaaccccgtcatcctccaaatcctgaaggaagagggctgcggcgtggactgctcctccctgaccgagctgatgctcagtgaggtgtgcggcttcagcggcagcgacatcatgttctcctccaaccagacccccgtggaggatatgaagaaggcctacgagctgggcgcttatatcaacctcgacgacgccacgatggtggacttcctcgaccgggtagccggtgtgccggagaacatcttctgccgctacaatccgggcggcaccttccagttgggcgagagcaaggagggctttcaggtcatggacaagcccggggatgccaagtacggcatgaccgaggagcagatgatcgacagctacaagaagctggctgcaaagggagcaaagaacttcggcatccacgccttcctcgcttccaacaccatttcggacgcctactaccccgagctggctgcgatcctgttccagctggcggtccgcgtccagaaggccaccggcgtccacatcgcctacatcaacctgtccggcggcgtgggcatcccgtaccgtcctgagcagactgagaacgacatcatggccatcggcgagggtgtccgtaagaaattcgaggagatcctggtccctgccgggatgggcgatgtcgccatcttcaccgagatgggccgcttcaccaccggcccctacggcgcgctggtggcaactgccatccacgagaagcacatctacaaagagtacatcggtctggacgcctgtgcggccaacctgatgcgccccgccatgtacggcgcttaccatcacatcacggtgctgggcaaggagaatgcgccctgcgaccacaagtatgacgtagtgggcggcctgtgcgaaaacaacgacaagtttgccatcgaccggatgctgcccaagatcgacatcggcgacatcgtgtatatccacgacaccggtgcccacggctctgcgatgggctacaactacaacggcaagctgcgcagcgccgaagtcctgctctgcgaggacggctcccaccgcctcatccgccgcgccgagaccccccgcgattactttgcaacgctggacttcctgcccttcatgaagccgctgctgggcgagtacgacgactaagcggtctcctgagaccattacaccagaataaagcgaggaacgacgcagatgttttttggattccaactcacctgtggcctgatgctggtcttttacgggtattcggtcatgaaaaatccccgggtctggggcgatcagggccgtcaggccgtcaaggctgaaaattttcccgagtactgccgtcagaacggacttttcttcctgaaggcgggctttctcatggccctcatcggtgcactggacgcactggtaacgctttcgggcctgctgtacgtcctgctgtacctgttcgggctggctttcgcgttctatccgctcacccgctggtgcaaagagaacgagggcttttcgtggccatggcctcgtgttgagagcgagaaaaagcgcatcaaaaagctgcgtcagcagcaggaggccgaaaaggcggaacgagaagaaaagtaaatagcaaaaaataagaggtcgctgtaaaagcaacctctcagtctcacttcgttcgacagcttccctaccgaggggagcctctggcgaagagattgggctttctgccatgccaaagcctcccctcgataggggaggtggcacggcgaagccgtgacggagaggttgaacacagcggcctctttttgttttcttaaatcaaaccattttctttgcagtagtggtaaataccatcctcagcacagggacgacagacctcgctggcaatggatttcaggtcgggggaggcgttgcccatggccacactgtggccgacggcctgaaacatttctatatcgttgttcccatcgccgaaagccatcgcatcttcctttgtcaggccgtagtgggccagtaccttccggatgcctgcgcccttgccgcccgaggtggggatgatgtctacggccctgtcccaccacgcggcgatctttgcgccggtggtgcccttgaggatggcgggccagtcccgctcgcggcagcccatcaacagctggaagacttcacctcgggagacttcatcgaacttatcggaaatgaccggcgctcgtccgccaatggcgtaatatgccgttaaatcgtcatccgttccgttggagagcagctgcgtccgtcctgcaaccgacaccggacgaccaagcgctgcggcgttttgaatcagcgtctgcacatcctgcggcgggatggggctggcaaaaatatctccgcgacggtcgtagcagtaggagccgttgtaggtaagaaagacgtcgaactccacgccgtcgaatcttggcacgatgagcggggaacgcccggtggcgatggccagcaggatgccgctttgctgtaagcggcgcagagcgtccaaagtcggcttggtgatgcgctttttctccatgtcgatgagagtaccgtcgatgtcgaaaaagatgatgcggggcttgcgcat

SEQ ID NO: 83 - DNA, 5776 bp, unidentified
  source 1..5776: mol_type = unassigned DNA
atgggagctaagaaaaattttgtgattgatacgaatgtgattcttcacgattataactgtttgaagaattttcaagagaatgacatttatcttcccatcgtagtccttgaagaactggacaaattcaagaaaggtaatgagcagattaatttcaatgcgcgtgagtttgtccgtgagctagatttgattaccgatgacaatctgttcaccaaaggggcgccattgggagagggcttgggccgtctgtttgtggtggcaggcatggtggactctccccgggtacgtgattcctttcccgaacgcatccccgaccatcagattctgtcggtagtggactggctttccaccaaaaagcctaaaatgaaaaccatccttgtcacgaaagacgtgaatctgcgcatgaaggcgcgttccatcggtctgctgtgcgaagactacatcaatgataaggtaatcaatgtggatatattcgaaaagtcgaatgaagtgttcgagggtattgaccctgcgctgatagaccgcatttattcttccaaagaaggactggacatcaacgagttcgattttaaggacatcattcgtcccaacgaatgctttgtgctgaagagtgaccgcagcagtgtgcttgcacgttataatccctttacccattcgatttgccgggtcaacaagacaaagaactatggcattgaaccgcgtaatgccgagcagagctttgcttttgaggtgctgaacgacccgaatatcaagctggttgccctgaccggtaaggcgggaaccggtaagaccctgctggcactggccgccgcattgggaaaacttaccgactacaagcagattcttctggcacgtcccatcgtggccttatccaataaagaccttggattccttcccggtgatgccaatgagaaagtggctccttacatgcagcctttgttcgataatttgaatgtaatcaagcatcagttcgctgccaattcctctgaagtgaaacgcttggaggatatgcaaaaaagtgaacaattggtcatcgaggcattagcctttatccgtgggcgcagcttgagcgaaacctactgtattatcgatgaagcccagaacctgaccccacatgagattaagaccatcatcacccgtgccggcgaaggtacaaaaatggtgtttaccggtgatattcagcagatagaccaaccctatctggacagtcagtccaacgggcttgtctatatgatagaccgcatgagagaccagaatttgtttgcccatgtcaatctggtgaaaggggagcgcagccagttgagcgagttggcaagtaatctgatgtagcggataccgcattttccggggtaaaactatttctatcccgctttccgactgttaaaacgggggaggcgggatggtttctttatagacgataaatagttgatataacatttttttatcgatttattgtctgttttgcctaaaatagtgtatctttgcctcgcctaaaacaaaactgtcaagcgaaatgaagcgaaatttttttcatcggtatctttccgcgaaagtgcttccgatatggactattctattaattgatgtatttatcatcgtcatatccagtctgttggcctatgctcttcgatatgatttcagaagcatttttttggaatcctctaccattgacaagaccattttatggacggttgttgtcaatctgatttttttccgtgttttccgtacgtattccaatgtgttgcgcttttcttcctttgtggatatcatgcgcatttttgtgtcattgacggtgtcgtatgcactactgatgataacaagcgtcttgacagaaagctatttggagttcaacctggctccggtcagcgtgctgttcatgtcctatatcatcagctttgccatgatggcatgctcccgtgtgattgtcaagactttcttcgaggcgctgaacttcgacggcacccatagtgccaatgtgttcatttacggtgccaaggaagccggggtcaacattgccaaggcattgcgtgtcaatctgcgcaaccactaccgtctgcgcggattcattgcggacgaacctgagcttatcaacaaggtgatgatgggtgtcagggtgttccccaacgatgatacgctgattgatgtgctgaacgaccgcgatgtgcagaccatcatcatttctcctgccaagatggaggaactgaagaagtccgacatggctgaccgcctgctggtgcacaacatcaaactgatgaccgcgcctcccttgagcgagtggaacggccaggcgctgagccgcacacagttgaaggaaattcagattgaggacctgcttcagcgcaatcctatcgagatagatatccataaggttgcctctcatctggagggcaagcgtgtgatgattacgggcgccgccggctccatcggcagtgaaatcatgcgccaggtggcttcgttcaatccctataaacttattttagtggaccaggccgagacccctctgcacgacatccgtctggaacttcaggaccgttggcgcgacatcgatgccgagaccatcatagccgacatctccaatgccacgcgcatggaggatatcttcaaggagttcaagccccagtatattttccatgcggccgcctacaagcatgtgccgatgatggaggacaacgtttccgagtccatccaggtgaacgtattcggcacgcgcaccgttgccgatcttgccgtgaaatacggtgccgagaagtttgtgatgatttctacggacaaggctgttaaccctacaaacgtgatgggctgttccaagcgtatttgcgagatttatgtgcagtctcttgcgaagaagttgcagaaggagggaggccatgccactcagttcatcactacgcgtttcggcaatgtgctgggttccaacggttctgtcattccccgtttccgcgaccagattcagcgtggcggtccggtgacagtgacccatcctgagataatccgttacttcatgaccattcccgaagcttgccgccttgttcttgaggccggcagtatgggcaacggcggtgaaatctacatcttcgacatgggtaagccggtgaagattgtggaccttgccaagcgtatgatcagcctttccggacgtacggatgtgaagattgaatttaccggtctccgtcatggcgagaagctctacgaggaactcttgaatgtgaaggagcttacaaagcccacctatcatgagaagattatgattgccacggtgcgtgagtatgactatgacgaggtgaaggagcgtattcagaaactgattgatgtaagttacacctatgaccagatgaaaattgttgctgccatgaaggatattgttccggagttcgtaagcaagaactcctgctttgaggcgctggataagaagaaataaaaagatagcggtatagtataaaatgaaagggtgataacgtcattgtagtgttatcaccctttcaattttattgtcttcttgtcagtcttttgtctcattcatgtgaagagaagtatttcaggaactgtgtacgttcgaaggtattgacccccttcgggtcgtttacgttcagaatacctttgaactggctgatggtttccatacctttgcggtccatccacaagttgaggaaacggatatactcctcaatgatggtagctgaattctgataaagcacactgcatatctctacggccgaagcacctgccaatattgccttgacaacgccttcgggcgagtgaataccaccggaagcggcatagtccagcttgtttacggctgccgaagcgatgcctatccagcgcagggctttggacaaatcggattcattgctgaatacgttaccggatacttgtatcattttctcaatgttgatgtccggctggtagaagcggttgaacagcactactgcggcggcaccgttggcatacagctggtctatcagagctatcggattggtcaggttgtcacccagcttcatgatgacgggtatcttgaccgtcttcttgatgtggctcagaatgtcgatgtggcgctgctcgaaggttccatacgtatactgtacatccgtctgcagtgcaaggatattgatttccagtgcgtctgcgccggcttcttctattttggcggcaaattccacccagtcggcattctgatagcagttgatgctggctatgatggggatgttgcaaacctttttgctttccttaatcaggttcagatattcgcctaacttatgttcacggatatatcctacaagatagtcactgccttcgggatacatattcgggtctcccagccagtcagcctccatcatgatttgctcttcaaagagtgattttagcacaatggcacctgcaccggcctcggatagtttctgattcttggcggcgctgtccgtcagtccggagctgctgacgataatggggtttctgagtttcagccctgcaaaagtagtttctaatgttgccatgataatgattttttatggttaatagtttctttctccaaaaatcttgcttcctacacgtatcaaggtgctcccggctgcaatggcctcgtgatagtcgtgagacatccccatggacagttcccggaatgattctgcatcggcaaaccatttggctttcacttcattgaagaagctacttaaagaacaaaactctgttctgatttgttcgtcattgtccgtattcgtggccatgcccatcaatccgcatatccggatatgcttgagctctctccattcaccggccgccagcatttcccggcattcgtcaaagctgaatccgaacttggtctcttcccgggcgatgtgcagctgcagcaggcagttgacggtttttccggctttggcagcctgcttgtccacctcggccaacagcttgtaggagtctatgccatgaatcagcgctacgtaaggaacaatatattttatcttgtttgtttgcagatgcccgatgaaatgccattctatgtctttgggcagactttcgtatttggcggtcatttcctgcaccttactttctccgaacacacgctggccggcacgatacgcttcttctatcgcctcattggggtgaaatttggaaacagccaccagccgtacctttccaggcagttcgctcagtacttgttttaaattctctgcaatcatctttttaggggttaatgagttaatgtgccaatgtgccaatgtgctaatatgctaattggctgtgctatgtttatcttgtgctgttacgccgcaggtcattggcatatttgcacattagcacattacgaagctctgcttcgttacacttccggtttgtcgtcgggctctgcactgtacggatatacatccataatggcggtttccgctacagatgctatctgataatcggccattgtgcctttcatgccctcatccagtttcttcactgcatcacgcaggtcggcagcctgcaccaatacctgggtagaggttttcttttccgcaccgcttttctcgtccagtgtgatgaaaaccagtttacatttaaaccagcggtcggcagcttcctcttcgctggggaacaattcgctatagttggcacgtttgatgtccgatacggtgaactctcccgaaatgaacggcgtcatctcttcgatgatgcgtgcttccgcttccgtaaaactgagggcatctaccaggtacggttcggtcaccttcttgttcattccattttccattgttttctcgtaacggatcttacattcaaaccatgtatgcattgccat

SEQ ID NO: 84 - DNA, 6617 bp, unidentified
  source 1..6617: mol_type = unassigned DNA
atgcggaggattaacatgaaaaaactgaaagtaaaaaaaggaagtacctgtatggcttgtcttgcatgcgtagaagcatgttctgaggctttttataaggagtttcatccggacaagtcctgtatccagatcgtagagaagaagagtgtacgcccgatggcctgtccacagtgtggcaaatgtgcagaagcctgtccggaaggtgcgatcactcagaatgcaaaaggcgtttacatgatcaacaaaaagaaatgtaccggttgcggagcctgtgcaaaagcctgtccgtttggactgatcgtcaagacagagggcaatccggcatccaaatgtatcgcatgcggtatctgtgcaaaagcctgtccgatggatgtactggaagtagtagaagagtaaagagcactcaaaaataatacataaaaataaaaaaagtcattgctgaacatgtgaaatgtctgcgatggctttttttattgtgccgctgtctctaattcaaaaatgcctctgacattcttctgtatacatctgatgtatcataaaaaacagaccttgtcgatagtgaccggcaagatctgtttttgactgatagatattttgttatctttagattaaacaataccctgagcgttcatagcatctacaactttttcgaagcctgcgatgtttgcaccggctacatagttacctttcatgccgtaacgttcagcagcatcaaccatgttgtggcagatattaaccatgataccctgcagttttgcgtctacttcttcaaatgtccagctcagacgttcgctgttctgggtcatttccagagcagatgtagcaacaccgccggcgtttgcagctttaccaggagcaaagatcacgccgtttttctgcagatattctgttgcatccatagtggtaggcatattagcaccttcgcaaacagccaggcatccgtttgctgccagctgttttgcatcgtcgatcagcagttcattctgagttgcacatggaagagcaacatcacattttacgctccatacgccgcgtccttcatggtattcagcgtttggtctgtagtttttgtattcggtcagtcttgcacgttttacttctttgatctctttaagtgctgctacatcgattccgtccggatcgtatacccagccggtagaatcacttgcagtaaccacttttgcacccagctgctgagctttttcgatcgcatagatagcaacgttgccggcaccggatacacaaacagtcttgccagccagttcgataccgttcagtttcagcagttcctgtgtcaggtagagcagaccataaccggtagcttctgttcttgcaagggatccaccgtagcttaagcctttacctgtcagaacaccttcatacaggccacggattctcttgtactgaccgaacatatagccgatctctcttgcacctgttccgatatcacctgccggtacatctgtatcagcaccgatgtatttgcacagctctgtcataaagctctggcagaatgccataacttcgcggtctgatttgcccttaggatcgaagtcagaaccacctttgccgccaccgatcggcagaccagtcagagagtttttgaaaacctgttcaaaaccaaggaatttgatgataccaatgtttacagacggatgcagacggataccgcccttgtaaggtccgattgcactgttgaactgtacacggtaaccggtatttacctgaacctgacctttatcgtcaacccatggtacacggaatttgaactgtctttccggatttaccattctttccagaagagcatcctttctgtatttttcttcatttgcctcgataacgactctcagagactccagaacctcttttactgcctgatgaaattcaggttcagatggattctgctctacaactttggcaataacctcatctacgtatgacatgattgtgtcctccttatcttcatacattgatttctgtaaccattcagagctatgcaaaaaacagttacgttttttttcattgcagattatagcaaatcagcgtggcaaagtaaagaaaaaaatagtgcttttttgcaaaaaaattacggaatttttgtaaaaatgttggaagtgcgtagtttttgcaggaaaagcctcaaaagggaaaagtaaaacttccatataaagcaaaagaaaacgaaaagaatgaccatttacaaaaagaagcagattcgctatactgagaggaaaagactggatgaaaaccggcctgaatacaaaggaggatctgccaatggaaaagcaagtgggacttaccgggcaggaggtggaggagcgtatccgaagcggtcaggtaaacaggatggaaaatcatatggtgaaaacgaataaggagatcgtaaaagcacatttgcttacttatttcaattttctgaacctttttctggccattctggttctgatcaccggacagttcaagaacatgacttttatgggagtcgtgatcgtcaatgcggtgatcgggattgtgcaggaactgaaagttaaaaaagtagtagacaagctgacggttctgacggcttcaaaagctcatgtggtaagagaaggtgaaaaatatgagatagatatagaagaagtggtgaaagatgacattctgattgtgataaacggcgatcagatctgtgcagactgtacggttcttgaatgtgacggtttggaggttaatgaatccatgctgaccggagaatcaaaacctgtaaagaaaaaagcaggagatgagctgatgtccggcagttttgtagttgcgggcggcggtgtcggccgtgtggttcatgtcggtgatgagaattatgccgcagagctgacaaggaaggccaagacgaaaaaacgtgccacttcggaaatgcagaatacgatcaagcggatcatagcggtgatcagtattctgatcattccgatcggcattctgctgttccgttctcagatcagtgctcaggggatgacaaggaacgaagctatcgtggcaaccgttgccggaatcatcggtatgattccggagggactggtgctgctgaccagcatctcgtttatcctgggcgtcggaagacttgcaaaaaagcgggcactcgtgcaggagatggaagcaatcgaagcactggcacgcgtcaacgtgctctgccttgacaaaaccggaacgatcacgaccggggaactggaagttacagaggtgcttggccttggagaggtgaaaaaagaagaaataagcgagatcatgaatgagcttacgtttgcttttgaagacagcaacaacacgcaggaagcattaaaacgttattttcaccggatggaccgttttacggtcgttcagaaaattccgttttcttccgaacgaaagtaccgtgcaatcgagttcgaagaaaagggctgttatgtccttggtgcaccggagtttttattgcaggatgacgaagaaggggcggaaatccttcgaaaagtcaatcagtattccgaggagggctatcgtgtcctgttgcttggaaaatgcggttctgttcaggcggaagatggaagtgtcagtgaggtgtcaccgatgggactgatcgtgatcctggactgcatccggaaagaagcaccggacgtctttcagtacttccgtgggcagaaggtagagatcaaggtgatctccggtgacaatccggtgacggtatcgaagattgccggaaaagcaggacttctgggggcagaaaaatacgtggatgcctccacactcggagatgatccgcaaagttaccgggaagccgtgcagaaatataatgtctttggacgcgtgaagccggaacagaagcagaagcttgtccatgcttatcagtcggaaaagaaagtggtcggtatggttggtgatggtgtcaacgacgtgcttgcactgaaggatgcagactgcggtattgcgatggcagccggaagtgatgcggcaaaacagtcggcacatattgtcctgctggattcggattttgcctgccttcggaatattgtaagcgaaggaaggacgatcattgccaacatcgagcgggtcagcgcactgtatctgaccaagacactgtattccatcctgctgtgtgtcatttttattcttctcggacgggcgtatccgtttatcccggtgcagctgtctctgatcagtgcagcctgcatcggtttcccgagttttgtgctgacactggagcataccgaagaggtgacaagtactggatttttgcgtcatgtgatgcagacggcacttccggcggcgattactatggttgtcaccctgcttgtggttcaggttttgtcaccgttctggaaagaaacagaagtgtttacctatacctttgatctcctggtcggaggagcagtcgggatcatggtcgtatttcgtgtgtgcaggccgttgaactggctgagaggcattctctgtgtctgcgtgatcgcagttttttcggtgggtgtgctgctgttcccgggatttcttggaatccacagcatcttctgctggcagatggtactggcgatcccgcttgtgtgcatggtcattcttctgtatcatgagctgatacgtctgatcctgtgctgttaccgaatccgagatcgcatacacgaaaaactggagattttatttccgaagagaaaaaagaaaagaagccggtaaggaaaggaattataaatgaaaaagaaaatagcagtgataggcggaggggcggcaggcatgtttgcagcactgaatgcggcagaacgcgggtgcgaagtccatctgtttgaaaaaaatgaaaaactgggcaaaaagatctatattacaggaaaaggcagatgtaatctgaccaacgcctgtgatacggaagaactgtttcaggcagttgtcagcaatccgaaattcctgtacagtgctttctatggctacacgaatcatgatgtgatcgatttttttgaaaacgccggtacaaagaccaaaattgaacgtggggaccgtgtttttccggtatcagatcattctacagatgttattgatgcacttcgcaggaaaatgcgggaatataaagtgcaggtgcatttaaataccgaagtttccaaggtggaagccaaagatggaaaagtaaccggtgttttgtcggatggagaaaagaaactttttccggcagatgccgtacttgtggcaaccggagggatttcttataaaacgacaggttctaccggagacggttaccgtttcgcagaagaactcggacataaagtgacggaattatatccatcgctggttccgtttaatacaaaagaagcgtgggcaaaaagccttcagggtctttcgctgaaaaatgtggatgtcaaagtgatggacggtaaaaagaaactctatgatggttttggcgagatgatgttcacccactttggcgtgactggtcctctgatcttaagtgccagcagttacactgcgaaaacggcacgaaaaaaagaactttctatgtttatcgacctgaagccggcattgtcaaaagaacaactagatcaccgaatcctgcgtgattttgaggaagcaaaaaacagacagtttaaaaacgcactgggcggacttttcccggcaaaactgactccggtcatgatcgagttgtccggcatcaatccggagaaaaaggtaaatgaggtatcaagagaagaacgcctcggatttgtggagctgattaaaaatttgccattgaccgtaacagggcttcgcgattataatgaagctattatcacaaaaggtggtgtcagtgtaaaagaagtcaatccgtccacgatggagtccaaactggtgcagggactgtattttgcaggtgaggtactggatctggatgctgtgaccggaggattcaatctgcagatcgcctggtccactgcctatgcggcagcactggcgatgagcgaagcatagataccatgcaggaggaaaatatgagttttaatattgcaattgacggaccggcaggagccggaaaaagcacgatcgcaaaacgtgtgtcaaaagagcttggatttatttatgtcgataccggggcaatgtatcgtgcgatcgcagtttatatgatgcagaatcagatcgatatccacgacgatgcggcagtgcagaaagcctgcagcaagatttccatatcgatcgcctacagtgatgacggcgaacagcaggtgatcttaaacggggagaacgtgaccggactgatccgcacagaagaagtgagcaagatggcatccgtgacttccgcaaacccggccgtgcgagccacactgcttgacctgcaaagagatctggcggcaaaagaagatgtcctgatggacggaagagacatcggcaccaatatcctgccacatgcacagctgaaaatttatctgaccgcaagcgtggaaacgcgtgcaaagagacgtttcctggaacagcaggaaaagggagatacgcacacactggaagagatcgaagaggagatccgggaccgcgatcagcgtgacatgtcaagagagatcgcaccgcttcgccaggcagaggatgccattctggtagattcttcggatctgtcgatcgatgaggtggttgagcgtattaaagaatgttacagggaagtgaagcaatga

SEQ ID NO: 85 - DNA, 12849 bp, unidentified
  source 1..12849: mol_type = unassigned DNA
ttaagccttatccgccatcagctgcaccatgaccgccttctgggcgtggagacgattttccgcctcctcaaaaatttcagccgcatgggcctcgaatacctcggcggtgatttcctctcccctgtgggccggtaagcaatgctgcaccatagcatccttgtgggccgccgccatcagctcttcattaatttgatagccggcaaaagcctttttccgtttttctgcttccccctcctggcccatggaagcccaaacatcagtgataatcacatccgcttccttggccgcctccagaggagctctgcaaagctcaaagcagtcgtactccttggcgaaatccagcacccggggatcgggatcatatccctcggggcaggccgcagagacggacatgccggttttcagccctccaacgatcagagaattcatcatattgttgccgtccccgataaaacacattttcaagccttccagcttgcccttaaactcgcggatggtcatcagatcagccagcacctggcaaggatggcagaaatcggtcaggccgttgataatgggaatactgccgtactccgccagagcttccacttcgctctgctcaaaggtgcggatcataatgccgttcaaatagcgggaaagcactcgggcggtatcctgaacgggctcgcctctgccaatctgcatatccttggccgagaggaaaatgggcatgccgcccagctgatacattcccacctcaaaggaaaccctggtgcgggtagaggatttctggaaaatcatacccaaggtttttcccgccaggcgcttgtgctcgattccatgcttcagctcatacttcagctgatccgccaaatttaaggtatccatgatttcctggctgctccagtctaaaagctttaataaatgtttcattggcttagccctccaaaattgatttttctaaaatttccaggccctggtcgatctcctcataggtgatattcagcggcggcagcagacgcagtacggttttcgctgtcagcaccagaagtccgtttttcacacagcggccggctacttccttagcgttatcctttgccagtacgatgccgatcatcatacccagcccccgaagctcctgaacgcccgtcattttactcagcttctcccggaggtaacggcctttttcttctacagaacgtaaaaaactatcttttgctactctttgtaaaacttccaaaccgccggcacaggagacaggatttcctccaaaagtagtgccgtgcattccggcgcccagcacttctcccaaacgagaagcgcacaggcaggcaccgatgggaagccctccgcccaatcccttggccgaggtgatcacatccggttcaatcccatactgttcatagcagtaaagggacccggtcctgccgacgccggtctgcacctcgtcgatcatcagcaggatatccttttccttgcagagggcggcggttttccgcacgaactccttttccagaggcatgactccgccctcgccttgaatcagttcgatcagcacggcgcaggtattttcagtaacacaggaaagcaagctctcaaagtcgttggccctggcgtaggaaaagccttcggtgaagggccagaaatgctcatgaaacacgtcctggccggtagccgccagggtcgtcaccgttcttccatgaaaggagttcaccagcgtgacgatctctgtcctctgtttgccgtatttatcggcactgtattttctggccagcttaatagcacattcattggcctcggctccggaattgcagaaaaacaccctgccaaagcctgtcaggcggcacagctcggctgccaggctggtctgcaccggggaatagtacaggttgctcatgtgctgaatcgcgcctgcttgtttagcgaccgcgctcacccagccgtcgtcgcagtagcccaggctgttaacgccgataccgctggtaaagtcaatatattcctttccctcggtgtccaccgcgacagctccctttccgtaaaccagcgccacgggaaaccgcccgtaggtaggcatcaggttttcctgctcctgccgcttgacttcctcaaaattcatgctgcttcctcttttcttaccgtaatctaaacgaccagagaatggaccggagcatacgcggatccgtccctcaaagggaatcgaattcctgatttgccccccatgcttcatcctccggaaacaggctggcagcgccggcagtgctttcatccctgccagcaaggttcctgccagtgttttaccttccggcctgcctgccgcaaaattcttctgatcctccgccatctgataggcaccagaactctatttacaagaaagcccagaccggcgggctggcgaaactctgccggctgagtagaaaatcatctgaaaagcccttatgctttccttaatagaacatggtgccgatgccctcgtcggaaaacagttcgatgagaatggaatggctgatcctaccgtcgatgatatgggcccggcccacgccctggcgcaccgcatccacacagcagtcgattttaggaatcattcccccgctgatgatgccttccttcttcagcatgggcacctcgctgacgttgaccaccggaattaaggtgccttcgtcatccttatcccgcagcaaccccttgacgtcggtcatcaaaattaatttcattgcccccagcttagccgcaatgctggcggccgccacatcggcgttgacgttataggtttccccgtgatagcctccggcgatagtggaaatcaccgggatatagcccttttccaccgcgtcgttgatcacagccgtattgacgctggtgatctctcccacaaagcccagatcctcggcggcggctttcttttccgccatcagcatccggttgtccaggccgcacaagcccagcgcccggcctcccagctgctccagcagcttcaccaggtctttgttcacctttccggccagcaccatctggacgatatccatggtttccgcgtccgtatagcgcataccgttgataaatttgctttccttgccgattttcttcagcatcgcgctgatctccggaccgccgccgtgaactaagaccacattgatgccgaccagctgcatcagcacgatatcccgcatcatagcgtccttaagctcctcgttgatcatggcattgccgccgtattttaccacgatggttttacccgcccatttttgaatatagggcaatgcctttaccagcacgtctgcccggtcctgaatcggaatttccataactcgtcacgcccattctatctaaaaatatcatacgaaagatctatgtctttttaattctttcactccagcgcccataaaacagtcagccgtcgtatattttatttaggtgcggtaatccccgttaattttcacataatcataggtcaagtcacagccgtaggcctccgcgtcaaaggaaccgtccttcaggtccaccaaaatatcgatttccttttccagcaggatctcctttgccttttcctcgctgaactcgatgcccgcgccatccacgcataccgtgacagcgccctttgccgagcggaacgccacatccaccttgctgatatccacatcacagccggaatagccgatggcgcacagcacccgtccccagttggcgtcggcgccgaacatggcggccttcagcaggctggagcagatcaccgatttcgccacgcctttagcgtccgccagcgttttcgccccgctgaccttacagatcagcagcttggtcgctccttctccgtcgccggccagcagtttggagatttccctgcatacaaataccaggccttccagaaacgcttggtaatcctctgatttttccgtaatctcctgatttccggctttccccgaggccaaaaccgccaaagtatcgttggtcgaggtgtctccgtcaacgctgaccatattaaagctgacatccgcggcctccttgaccgcgcactgaagcatttccggagaaacggcggcgtcagtggtgaggaagcccagcatggtggccatgttggggtgaatcataccgctgcccttggcgatgcccccgatggtcactgttttgccgcctacttcaatttggacggcgatttcttttttaacggtatctgtagtcatgatggcctccgcggcgtcggtgcctccctccttggagagagccgacgttaggaccgccacggaattttcgatgggctcgatgggcagcacctggccgataaccccggtagacgccactaaaacatcctcctggggaatgcccagctctttagccgccagcaggcacatcctctccgccttttccacgccgtcggcgttgcaggtgttggcgttgccggagttggcgataaccgcctgagccttgccgtttttcaggtgctgctgggtcaccagaatacaggcgccctttaccaggttctgagtatagaccgctgccgcagagcaaagagtatcagcataaatcagcgccagatcccgcttggatttatttttacggatgccgcagtgaaccccggaggcggtaaagccctgagccgcggtcacgccgcctggaatttgtttgattggcataattgttctctccttttcgccctgattaaaatgccgggggcaccaatgccagccccgaggcttcctccaagccaaaaatcaggttcatattctgaatcgcctggcctgcggctcccttcaccatgttgtcaatggcggaaatagcgatcaaattgccgcaccgggtatcgatatgcagggaaatatcacagaagttggaatacttgatattatggatgtccgcgttcatgccgtctggcagcaggcggacaaaatactcgtcctgataaaaatcttcataagccttccgcacctgcgccttggtgacatccggcttcagccttccgtagcaggtggataagattccccggttcaccggcagcagatgaggcacaaaagtgacatgcaccttttgcccagaaagccgggacagcgtctgctcaatctctggagtgtgccggtggctggccaccttgtaggcgtgcaggccctcgtttaaatccgggtaatgggtgccctgggaaaggccgcggcccgccccggtcacaccagatttggagtcgatgatgattcccgtcagctcaatcaagccatttgctaccgccggcgccagagccagcggagccccagtcgtatagcagcccggattggcaatgaccctttttccgagaatatccttacggaacagctccggcaggccgtaaaccgccttttcatggagctccttgtcctgataggttccgccgtaccatttctgatattcttcctcgctgtccagccggaaatccgcgcccaggtcaataaacgccttgcctttctcgtcacaggctttggccagctcctgggaaagcccatgaggcagagcggcgaataccacgtcgcatttgtccaccacctggccggcggtttcacaaaccatatcgcacagattgaagtaggcgggatatacctcactgattgcctttccctcaaagctgacggagctgatggccgtaacctccgcctccggatggctcagcagcagccgcaccagctcagagccggcgtagccggtggctccgacaattcccgcatgtatcataaataaatccctcttatctatcgtttgaattttgtgtagtgggagcagacagaagcagcacgcagcgcctgtcccgcggccgccagtcagaagggctgtcggcatggttcaagcgcccggcttgggttcatgccaggcggcgcatagggcggccgccctttatggttttcgtccgcgcgccttttatcagctttcagaggcggcatcctcccgaagcaggcctcgcacccgctttacctgagccagcacgctttccctcgcaggtcctcccagcacgcttctgccgttgacgcagttttctaaagaaatggcctcatagacgccctggtcaaaggcctcgcataccgtttgatattcctccatcggcagagtttccagggtttcccccagttcaatgcaccgggcgaccagagttccggtggctttatacgcatcccggaagggtaagcccttttttaccagatagtcggcgcagtcggtggcgttgatgaaccctccggccgctgccttccgcatattctcaggaagcaccttcatggtggccagcatcggggtaaaggcggtcaggcacatcttcaccgtttccacgctgtcaaaaatagcctccttgtcttcctgcatatccttattataggccaaaggcaagcccttcatgaccgtcagcaaagcagtcaggttgccaaacaccctgccggatttcccccggaccagttcggcgatatcagggtttttcttttggggcatgatgctggagccggtggaaaaggcgtcatccagctctacaaatttaaattcccacgagcaccagaggatgatttcctcagagaaccgggacagatgcaccattacgatggataaggccgcagccagctccatgcagaaatcccggtcggaaaccccatctagactgttgcgcatagtatcagaaaatcctagaagccgggtggtgacagtccggtcaatgggataggtggtagaagccaaagcgcctgaccccagcggattgacattcatacgctttaccgcgtcctgaaacctgctcaaatcccgaaggaacatctcggcgtaagccatcagatggtggccaaaggtgatgggctgggcgcgctgcaggtgggtatagccaggcattaccgtgccggcgcaggcttcggcctggacgcagatagtctcagtcagttctttgatctgttccagcaggccctgggcctcctctctcagatagagccggatatccagcgccacctggtcgttccggcttctggcggtatgcagccgtttaccagtatctcccagccggcgggtcaattcaccttccatgaaagtgtgaatatcttcctgggtcatgtcgatttccagcgtcccggactgtagatcctttaaaatcccttccagcccttggcagattgcgtcagcctcgcttttgtcaatgactccgcactgtcccagcatggtggcgtgggcgatagagccctcgatatcctgccgcgccattttacagtcaaaagagatagaggaattaaaatcattggttttttgatccagttccttttggaaccgtcctgtccataacggcaaattgattcaccctttccccaggctgagcctggactcatttcgcgctcggagggggcggtatccattggccttctcccacgcgccgctgtctgttcgcttccttcagctgtttccactaggctgagcctggacccgcttcgcgctcgggagttggcggtatccattggccttctcccatgcgccgctgtctgttcgcttccttcagctgtttccccaggctgaacctggactcatttcgcgcctagggcttggagatagctccctgttttctaccgcggacgcatcaagaagcaagctcgctttccgcacccaaaagccagggcttacctaataatcacgaatagggcggacagcgtccgccctgaatcctggataaatttattgctgctgatttttggccttcttcatcgcctgaaccttgattggcaagccaaacagattgatgaagccggcggaatccgcctgattataaacctcatcctcgtcgaaggtagcaatctcctcatcgtacaaggaataaggggaagtaacgcccgcgtcgatgatatttcccttgtaaagcttcagcttaacatcgccggttacggtctcctgagtggaatccacaaaagccgaaagggcttcccttaaaggagtaaaccactggccgtagtaaaccagctccgcgaaccggagggctacgccttgcttataatggtaggtgtccctgtcgaggcagatttcctccagcttgttgtgggcgtgatacaaaatggttccgccgggagtttcataaacgccgcggctcttcatgcctaccagccggttttccaccatatcggcgatgccgatgccattggcgccgcccaactcattgagctttttcacgatggaaacgccatccattttctcgccgtcgatggcggttggaacgcccttttcaaagtgcagggtcacgtaggtagccttgtcgggagccttcatgggagaaacgcccaattccaggatctcgtcatatttcggctcgttggccggatcctccagatccaggccctcatgggaaaggtgccagatgttcttatccttagagtagttggtttctctggtaatatttaagggaatgttgtgggcttcagcgtattcaatttcttcctcacggctcttcagattccagattctccagggagcgatgatcttcatttccggagcgaaagccttgatagccagctcaaaccgcacctggtcgtttccttttccggtacagccgtggcagattgcgtcggcgccttccgctttggcgatttctacaattcttttggcgataatcggacgggcgaaggaggtgcccagcaaatatttgttttcataaacagcgccagccttgacggtgggaaaaatgaaatcctccacaaacacctggttcaaatcctcgatgtacagcttggaggctcctgtctttttcgctttttcctccagcccggaaagctccttaccctggccgacatcggcggcaacggcgatgacctcgcagttgttgtaattctccttcagccacggaataataatcgaggtgtccaatccgccggaatacgctagcactacttttttgatctctgccattttaaccaactcccaaaatatttttattatggctgatgttttcattcaacgattcctattatacaccctttatgcaaaaaatcaagagttttatgcataaatattcacacaattggaatttggtgacatttccacaaaatcgaaagaaaaatcggctccgttcttattttttatgatattaaaatgatgcctctttcatatccgccgcaaaagctacatgcatataaataaatttaaatgttataaaacactttttcccgtccaaaatcagcagaaaacgcgaagcttttgtggtaccataatcttctaatttatggtatcataaaattgtaaggagaaaaagcccagcaggctattattttataaaggagagattgctatgtcttttcaagaaatcaatgtccgtgagttttccatgaagccctttaagatgatcggcgaccagtggatgctggtcactgccggcgatcaaattaagtacaacacaatgaccgccagctggggcggcataggcgtcatgtggggcaaaaacgtggcggtaacggtaatccgtccccagcgctacaccaaggaatttgtagaatcccacgactgctttaccctgagcttttaccctgaagaatacaaaaaggcgctttccctctgcggcagcaaatccggccgggagatcgataaggcggaggagacaggcctgattcctgttttcgaccaggctgctccgtactttgaacaggccagcctggtgctggtatgcaaaaagctgtacgcccagccgatggacccggccgggtttgtagacaaagccctggacagccggtggtatccggataaggattatcacaaaatgttcgtaggagaagtcatcaaggtgctggtgaaggaatgagccgcgccgtcatcgtcaccggggcttctcatgggatcggccgggccgccgctgttctgtttgccagaaaaggctattccacggtgatcaattaccatcgttcggaatcagaggccctctctctagcccattccctcacgctggagggctgctctgttctcgcagtgcaggcggacgtttccgaccctgtccaggtaaaggagctgtttcaaaggacagaggcggctttcggcgggctggaaattctagtaaacaacgccgggatttctcagacgggcctgttcaccgactgcacgccccggcagtgggaccgggtcttcggcgttaacgtcaaaggggcttttctgtgcagccagcaggcggcgtccctgttcctcagggagcaccggggaaaaatcgtcaatgtcagttcgatttggggaatcaccggcgcctcctgcgaggcggtgtattccgccagcaaggcggctctcatcggcctgaccaaatctctggctaaggagctggggccctccggcattcaggtaaactgtgtggctccgggcgtggtggatactaaaatgaacgccggcctcactccagaggagcttcaggcactccgggacgaaacccctctgggcgtcatcggcacctcggaggacatcgcccaggccatctggtttttagcttctccggaaagcgattttattaccggccaggtgctcagtcccaacggcggtttcctgatttgaccgcctgcgccgtgtttagtccggccgcttgaaacagcctttgagattccttgaaaatcccggctgtaaaaaagccgccgtcagaacaggtgccgggaggctgcgaatcctattattttttgtttcgccgcaatgttttttatggaaccgcgccgtatctgtaatcgttagaatgacggcacggcgcggttcattttttactgtgccttacgaaaaatttttgatggcaaaaattcgtaacgggctgcttaattttggagaaaaccgtttcttttcctaaaccacttaaaaatcatcctgttgtaaaaacctccggctgggccggaggtttttctaaatcgcttaaaaagcggctccacgccgcacgtttaaaatattgctttttaattcgctgccagatcccttgattttgcccgccgctctccgtcccagtcttttccggcagttttatgacagtgaaaccttcagatgcatatgctcccgggcctgatgccatttgaccggatagcccgcgccatgggagcagaaaaccgaatccggggtgtattccaagtccgcctccgggtcataggaaaaccgggctgccagctcctcctggttctggcacggctcataaccgtcgaaccggaagctgaacatcccttttcctttggtaaatgccgccagctcccggctgtaatttataaaacccgccgccggccctcgtccatttaccgtcactcggttttcctgctgccgcggaggctcaaagactccctgtagccgctggatatcggataaaattcttcccaactgcctgctgtccgcctgaatccggaaagcgtaccagggctccagcaaaatactttccgcctgcatcagcccctggcgcagagcccggtagacggcttcccgaaagtctccgccctcggtgtgtttttcatgcgctttccccgccaaaagagttacccttacatcggtgagaggggcgccgaccagcacgcccctcaattcccgctcaaagacatgggttcggatcaggttctgatagctgcggtcaagctggtcgaaaggacatttgctttcaaaggtgatcccggagcctctttttccgggagaaagagccagatgcacctccgcgtaatggcggagcggctcgaaatggccgcagccaagcactgtgtttccaatggtttcccggtaagaaacctgacattccccgaaccgtattttccgccggaatctctccgccatcagctcctgaaggatttccagctgtaccgtccccaaaatatgcacccggatttcctccagccgttcctcccaggaaacattcagcagcggctcctccgcctccaatagtttaaattcttccagcacggttttcgccggcactccttcgccgtattccacctttgccgttaaagccggagtggtttccagcctcggacggcagggagcttccccgatctgctcgcccggcttgaccgtcaggccggttactccgcacagagacccggccgccgccgtttttccagtctggaatttcaaaccctgataatgccgcagctcgtcgattttctgcggcccatccagagtagcgacctcgtcctttaccgttaacgcaccggacagaacctttaaaaagctgacccggtttcccttttcgtcgtgacgcacctggtacactcttccgcaaaagggctcgtccctttttgcctcatattccgttttcgtcagccggtccatctgctctaagaactctatcacgccctggtcattcagcgcgctgccggaaaaacagggaaacacccggcggctccgaatcagctccgccgtcctgccgtaccacagcttttcgtcatagccggtctccaagtagcgttccagcaaattctcatccagggccgccaggtcctccgccgcagcctccagcccttccgccggaaaccagtaaatatccggcgaaagctgttcccggagctccgccagagatttttctccgtccgcccccggctgatccattttattcaggaagaaaaataccgggatctgatttttttccaacagccgccagagggtcgccgtatgcccctgaaccccatcggcggcgctcaccaccaaaacggcatagtccagcacccccagagtccgttccatttccccggcgaagtctgcgtgtcccggcgtgtctaccaggtaatattggttttctcccagagaaaaggccgcctgcccggaaaacacagtgatgccccgctgcttctcaacggcgtcggcgtctaaaaaggaatcccggtggtctacccgtccctttgcgcggattgcctttccatggtacagaaccgcctcggacaaagtggttttccccgcgtctacatgcgctaaaattccaattgtttttctcat

SEQ ID NO: 86 - DNA, 8900 bp, unidentified
  source 1..8900: mol_type = unassigned DNA
ctactgaagtaatgataatacaccctgattgctctggttagcctgagccagcatagactgacctgcctgtgcaagaatattattcttgctgtagttaaccatctcatcagccatgtctgtatcacggatacgagactcagcagaagatgtattctcagatacgttatcaaggtttgaaatagtatgctccagacgattctgtaaagcaccaagtgcggaacgctgtgtagatacaatgtcaatagctgactgaatctttgtcatagcagatcctgcagaactaaatgaagaaacagataatccacttacaccgatagatgaagaatccatgttgctgatggaaattgcaatattctgtccactcagcgcaccaatctgaaggttctttccactgaaagatccatccaataagttctgtgtattgaactgtgttgtagaacggatacgatcaatttcagatgataaagcatccatctcagactgaatagcgtttctgtcgatagtagtattggtatcgttagctgcctgtgtagcaagctcattcatacgctgtaagatagaatgtgtctcatttaatgcaccttcagctacctgaatagcagatacaccatcctgagcgttgtcagatgccttgttcagacctctgatctggcttctcatcttctcagaaatagaaagtcctgctgcatcatctgctgcacggttgatcttgtaaccagaagataacttctctgaagacttagcctgtgcgcttgttgtgattcctaacattctgttcgcatttgctgcggtcatattgtgctgaactaccatattaattttcctccttgaattaagtgcagcttccatgctgcaatttgatttgtttgtgacagttttctatgcggccgtacgctccgcttcgaattccatccgattttgtaagaaacaattgttatcttgtttacttgctatatatatcggacggggttggaaatactttagcattaattttaattttttcaatttttttctgccgcattttataataatgccgaaacttttccttccagtattgcatggatctcatccagatccttgcctgtgatggatgcaatgttttccggcgacattccgctgtggttcattttaagaataatttttgcttctcctacaacttctcccattgctttaccttccgattctcccagttttctggcatcttccaggtcatccttcatcagttctctcaacgcatcacacatattcgcatccctccttatttcacgatacaactcatcatttgccctgacacttacctgtaacacagcctctacattctgccggtcacgtggtgtattcattccttctgcttttctcagaaattcctccacgtcttctttctttgcatgatttgacaaaatcttcaaactccgatgctctcccggctctaattcctgtgtcacaataatctgcgccggaatcggtaaatattctgtcacataataaatgcccggatacctttcttctattttatgtccatacctctgcaatgtcaaaaacattttctccggtcgggcttccctgaaaatagatattgtcagttcattgattggaactgcatctacatattctccatagcctttgtacaggcacgcatacccgatggtcttgtaaaaatcgtcaatggtcaacgcatcttccgggctcttatactcgatcacattataggttctcataatgtgaccgatttcattcttaatttgtccggtacgcccttcttttatgataagaaggtcgatacggattggttccttgctcagattgtattccggctttaactccagccgttcaatgtcttcatggaattccagccccgcagcggcacagaatgccggatgccactggagcttgtctggtgcatttttcaaattgcttcctcctgtttgtgtgaatcacgattccgcaacatcgcaatttgttttcgtgcacaaatgcttagttttcacctctttccttttcgtttttccctctgcaatcttttcctgtctttatgataacctatttatttttctccatcaagcagtttcttgtatcccaaacacccgaaataatctcatcgttactgttcgcatcaaattgctaacggaatcaatgattaaaaaagtgatgatatattgttttttcttatacatcatcacttctttttactttcttatgttgtttttagatgctgcttataatagcgctgaaactttttccggttccatttttctattttttctccagccccggccactcctggtctttctctgaaagtgtcagcaacgttccatccgtcatgcaatacccttccgccgatggggttccctgatactccccctgcacatccggccactggataccgattgccgggtcattccatgccaggccgccctcgtcgttcggatgccagaagtcattgactttgtaacagaactctgcctcgtcagacagaaccaggaagccatgcgcaaagccttccggaatcagaaactgctttttgttttcctcggaaagttccactccgtaccattttccataggttgcggaaccttcgcgaaaatccactgccacatcaaatacgcttccgcgcacggcgcgcacgagtttgcactgcggatagttgatctggaaatgcagtccgcgcagtacgcctttgacggacatggactggttatcctgtacaaactggatatcaaatccggcttctttcatttcccgttcattgtaggtctccataaagtatccgcgggcatccccgtgtacggccggtgtaatcacacacagcccttcgatgccaccgacatttttttcaactgttatctgtcccactgttttttcctctttttcacatcattctcttaatatttcactctgccttctgcgactgcttttaaatgctctccatacgggctctttccgtagcgtatcgcagaatcaagtaatttttcccggtcaatccactgattgatatatgcgatttcttccggtgcggaaatggtcacgccctgacggtgctcgatcatctgcacaaatgctgccgcatccagaaggctgtccatcgttccggtgtccagccatgcaaacccacgtccgagcagctgcacatttaagtttttctgctgcagatacaggtcatttaaggtggtgatctccagttcgccgcgggcggatggctgcacctgttttgccattttgctcacgcctgccggatagaaatacagtccggtcacggcatagttgctctttggctgtgccggtttttcctcgatggaaaccgcttttccgttcgcatcgaaatccacgacaccaaaacgctccggatcgttgacataatagccaaagacggttgcctgtccctcttgtgcatcctttgcggcattgcgcagaatttttccgaatccgtttccgtagaaaatgttatcgccgagtaccatggcgcaggcatcctctccgataaattcctctccaagcaaaaatgcctgtgcgagtccatccggagacggctgcactttgtaggacagatgcagtccgaattgatttccatcccccaaaagtgcttcaaatctcggggtatcttccggcgtggaaataactaaaatatcacggatgcctgccagcatcagtgtagacagcggataataaatcatcggtttgtcatataccggaagcaattgtttactggttaccatcgtcaacggatacagccgtgtccctgcgccgcctgccaatataattcccttcatcttaaagttccccctgtctctttaattcctgcagataccgtcccagcgcgtcctgccaggttggaagcggtgtaaatccattttctttcagtttctttttttccagtctgctgttaaacggacgcgctgcctttgacagaccgtattccgcggttgtcacgggctgcacttcggtagaaatccctgcctgccggtaaatttcttttgtgaaatcgtaccaggagatgtagccaccttcgtttgttacgtggtaataaccatatttttcggtttccatcatgtcaacaagcagtctggccagatcgtaagtataggttggtgtgccgatctggtcatttaccacgcgcacctgcgggtgattttttgccacttttaacatggtcttaataaaattttttccgtttaatccaaacacccatgcgatacgcacgatgaaatacttcccgagtgtctgtgctactgccagttccccgccaagtttcgtctgtccgtatacgttaagcggtgcgtatgctttgcagtccggctcccacggagtctcgccctgtccgtcaaacacatagtctgtgctgatatagaccattttggcatctactttttttgccgcttccgcaatatgtttcgttccatctacgttgatggctctgacttttgcctgattttcttcgtcctctgctgcatccacagcggtccatgccgcacagtgcacgatggcatccggctgtacttgcatgattgtctgttccactgctgccgcatcggtgatgtccagcggcacatacgatgcacaggattccagtgtcggtgcaatatccgaaccgactgcctgatgtccgcgctttgtcagttcgtttaccacgtcatgtcccagctgtccggcaacgcctgtcacgaatactttcatatttataaacctttctttccgtacatttctttgtaataattctggtattccccgtttacgatgttctcccaccattccttatgatccagataccactggatggtcaggcggataccatctttaaacattgtctccggcagccagcccagctcgttgtggatcttggtcggatcaatcgcatagcgcatatcgtgtccttttctgtcctgcacatgctcgatcaggctctccggcttgccaagatattcacaaatcagttttacgatatcaatatttttcatctcattgtgtccgccgatgttgtagacttctccgacggttcctttgcgcaggatcaagtcaatcgccttacagtgatcctcgacatacagccagtcgcgcacattgagtccctctccgtataccggaagcggcttatctgccagcgcatttgcgatcataagcggaatgagtttttccgggaactgatacgggccgtagttgttggaacagcggctgatcgtcaccggcaggccgtacgttctgtgatatgccataacaagcagatccgcagatgccttggaagtgctgtaaggactggaggtgtggatcggcgtatcttcatgaaagaacagatccgggcgatccagcggcagatctccgtacacctcatccgtggatacctgatgataccgtgaaatgccatactttctgcatgcgtccatcagcacagacgtaccgataatattggtctgcaaaaagacttccggattctcaatggaacggtccacatgggactccgctgcaaaattcacgatcacatccggtttttcttcctcaaaaagtttgtatacgcccggtcgatcgcagatatccaatttgacaaaacggaaatttggctgctccatcaccggtgcgagcgtggacaaatttcccgcataggtcagggaatccagacaaacaatgcgatcctgcggatgttcctttaacatatagaaaataaagttgctgccgatgaaaccggcaccgcctgttacaataatggtcatgagtgtttcctcctgtgtgcgtttacgattcctgtatttgtttccattataaaaggtgacgctaggtcaccttcaagtcttttttatagatttttctaattattttctgcacaggaagattccggcatcttttgtgatatgaaatccatctgccacgcgggcagaaacaaattcccgaaactctttgtactggttcaaaagcagctggttctggtttccgtgacaggaaagaatataggaaatcagcggttccgcttctgctatttcaatcgcatcctcgtatcttcgcatctgaatttccgggaaatacggtgctaacaggttttctccgttttcaagcccgaaccgctcatacagcacctccgctgataaaacgatttctttatggaactgctgcaccagatcggtaatttcccacatatgctgctttccgtaggtactgcatagaaaccgtcccccattttttaagactctccgacattctgcaagcacctgtgggatatcttcacagtaaaacagcacatgatccgcgatcacaagatcaaatatttcctcctcgtaaggaattttttcgcagtcaaattttttataggaaaagcggctgtcctctcccagtgcacgccgggcatcctttagcattccttctgatttgtccgagagaacgacccatagatccgcaggcagctgttctctgttttcggtccatagtgctccatttccacagccgagctccagaatccgcatccccggctgcagattacactgctgcataatccacggaaaccacccctgcggattgatggaatactccctgtgcaggcgaatccgggcggaaatatttgccgcattctggtactggtttttcaggcttcgttccactgccgtcagatggatcagatccagcatactgttccagtcaatcgcctgttccgtctggatggcttctatggtgcggtcaattgcctcatccatcgcctgcatttcgtccattttctgccgcagcagcttcttctgtatccgcatggattcaagaagatactgctgatctgccgaggcaagtgtcatctcccggatatcttccagcgaaaatcccagatattttaataaaaggatctgctggagttttgccagatctgcatccgtatacagccgcgctcctgcggcagtccgtgcacttggttttaaaatattctgtttatcataataccggatcgcgcgaagtgtcacatgtgctttttttgcaaattgtccggatgtgtaatacgcatcctttttcatctacagttctttcacctcatctcgcatttcttctgtcatattctgtacataggtcgtctgggaagaaatttcttccgtatttgcggcaatggttgacaccttctgcgtcatggtattcatgctttctaccagatctttgattgaatccatgctctgtgtaatctttggaagaattgcctcggctttctggtcgttctgtgtcagaagatccttcgtggaatcagacagtgtacggatttcctccgctactactgcaaagcctcttccgttctcgccggcacgcgccgcctcaatggaggcattgagcgaaagcagatttgtctgtcctgcaatggcagaaatatcttcattgctctttttatatacactgatgaaatccgacataatgcggatggattcattcagttcatcgcacaggcgggaaatatcctgaatatactgtgccagattggttgcttcatttgcagattcctcgtttgccgtgttcagttctgcaatattgtcacttaaggcaataaaccgttctgtgatcgcagcaatcttctgctgtcggatttcctgtgcattccgttcctgatcacggatttctgcaatcttttttgcctcttcctctgccagaccccgcacatagtgcacacagttttcttttacgttgactccattgtggatggcacgtaccatgttggtgcagcttgaatatccacaggattcacagtccctgtgctgttcctcgtaagtatcttttttcatttctgtaaacaggcggttcttctcctgttcggacggttcctcaatatgtactgcgcgattggtgtagctgcgcataaaatcgttgatgtccagctttccaaaagcgtccatgaagtttttcagacgttcctccggtgtcagtgtatctgcccacggactcctgcttttgctcttcctgccaaagtgtgccttctcctgtttttcactggttttgctgttccgcagttttgcgattgtcagcatgacatcatccgttccccgtttaggatctgtggcagttccgtagagacagcccttcgcacaatttaagatatctaccataaacggaagttctttattctgctgaatacgttttgcataggaacgcagatattcatatgcctcatgctcgccctctacctgacgcactacctgttcttttccaagaaaatgttctacattctcccgcagtccaccaggcatcggatacaaagaacccagtccgtattccagttcatcggtatatggttcacacccttcataatcgtttccgatatacttcatcatcttttcaaaagttacattataagaaacatatccgccgcaattgggatcggtaatctctaattttttggcaatacacgggctgatgaaagcaatttcatctgtgacctgcatgtactttttcatataaatagcagtacacatcatcgggctgtgtaccggcatcagccgcggaatcagctccggtatatatttttccacataggtgactactgccggacacggctgggaaatgcccccgaaaaatttgtgttccgtaatgtatttcagatatccccaggttgtgatatccgcaccgaacgatacactgcagatatggctgactcccttactctttaaatatcccagcacacgctggtattctttgggataattcgccagaaatgccggtgccagtatcacggaaattttctttcccgatgcaaggtcttcaaagaaacggtccgtatcatcataatagtctctcgcttcatgtgggcagacatcaaaacattccccgcatacaatacatttgtccgggtctaccgttacataaccttcctgtgttgcaatatttgccgtaagtacaggacagctgcgcacgcatttgttgcatccggtgcataaatcagttgtgtaaatcagttccat

SEQ ID NO: 87 - DNA, 5497 bp, unidentified
  source 1..5497: mol_type = unassigned DNA
atgaaaatcctgttggtaattgaccagttcgatcagggaaataacggaacaacgatcagtgcgcgtcggtttgcccaggcgctggcggcggatggcaacgaggttcgggttgcagcggcgggaaagcctgcgagaggcaaatatccgatgccggagatccattttctgccggttgcggattctattatcagaagtcagggcatggtgtttgcaaaaccgaaccgcagcgtactggaacaggcgattgcatgggcggacgtggtgcattttatgatgccctttgcgctttcccgtgtcggactgcggattgcaaaggaaatgggcaaaccggtgacagcggcgttccatgtgcagccggaaaacattacatcgacgattcatcttgggaaaaataaaaaggccaatgagcttttgtatgaatggttccgagatgatttttataatgaatttacgcatatccactgcccgagtccgtttatcgcggggcagttaaaggaacacggctatcaggcaaagcttcatattatatcgaacggcgtatcggatgaattttatccgcgcgtgcgccaaaaggagccggagctggcgcataaattcgtcattttgatgattggacgttattcagaagaaaaacggcaggatgttttaatagaagcggtaaaacgatctgcacattcccacaggattcagctgattttggcgggacagggaccgaaggagcgcagcctgcgctggcagggaaggtcgctgcgctatcctccgatcatgggattttttgatacggagcgactgtgcgaactgatggcgatgagcgatttgtacgtccatgcggcggacgtcgaaatcgaggcgatcgcatgcctggaagcggttgcgtccgggctggttccggtcatcgcggattcgccgctttcagctacctcgcagtttgccctcgatcacaggagtttattcgaagcgggcaacgtagacgatctggcggagcggattgactggtggtatgagcatgcaacagcacggcatcaaatggcacgtgtctatgcggagagcgccaaccagtatcgtctgaaaaacagcattcggaaagcagagcagatgtttgcggaagagattgcggagaccttgggataaatggaatggaggcaacacagggatgattttggtgaaagaccgtacaggatcaaaaaacggcaccgcagacagcaccctggtcggagtgtttgactccaaacgtccgttgtaccggatcgtaaagtggctgatcctgcacatttttccgccggtgtttaggctgttgtacggatttcgggtggtcggcaggataccggaggaaaagatgcagaacggctgtatcagcgtctgcaatcatgttcacaagctggactgcgtgatgctggcatgcgtgtttcaggattatacgatgcagtttttatcgttggaatctaatctccacattccggtcgcaggcgcgattgtgcgtctgatgggcggaatcggactgcctgcaaagctggacgggtggcgaccggttttaaaacgcataaaacaggggctggatgagggtcagatgctgcagatttacccggagggagagctgatcgatggctgtcggacgctccgggcgtttcagccgggcgcgtttcagatcacgtgttggttccggaagccgatgattccgtgcctgctgcggttttatccgcgtttttccaaaagcggcagacgaaaaagggacggaatggagctggttattttagagccggtggacattccgaccgataaaaagggcaagcgcgcggcaacagagctggaaacgcagatccgatgtcagatggaagcggcacggcttgcagttggtagagagggtgcatgaggattgtgcattctattgtttagatagagcaggaaaatcctgcggaaatggagcagaaagtgaaaattacctggcttggtacggcagcaattcgtctggaagcggacggtgagacagttttattcgacccgtttgtacagctggtcggtggggaaaatccgaactgtctggatgactttttacaggatcagacgatctgtgtgacccatgggcatctggatcatatgatggatgttccggaatttctggatccggaaagcgatgcggaggcgaccgtttactgcggagaagtggcggcagagacgctttccgatatggtggagaacaccagcaacgtagtaaaggtgagaccgggcgacgtgatccgactcggggacgtacggattcttgtaatggaaggaaagcatgcaaagcctggaaaaagtcaggtattccagaagctgttttcccgcagatttttgcagtatttcagaaatgcgctggcacttgcatatttgaatccgaaatttccggagggcggacagacgctgatgtacgaggtgcatgcggagggcaaacgcgtgcaggtgatgggaagtctcggactgcaggaggatcaggaatacccgcagggtgccgatcttctgattctgccgttccagggaagcgaatttctggaagcagtagcgctggaggtcgtagagcggctgcagcccaagcggattttgctggatcattttgacgacgcattcccgccggtatcggagcatgtcgatacgagacggtttaaaaagctgatggatgaggaatatccgcagatcaaagtcgtaaagccgacggcaggaaaaacggtggtgctgtaacgggattttataacgtatggagaaacaccagtgctaccggtttgcagtttgagatacagcatgatataataaatagaaagagcggcttttcgtgcagatatcactcaaatagccgtataacattttgacaggtctttgcaacatggaagaattgcagctgcgggggcttatgttacaataggagggaacaaatggaaaaaccgacattagtaattctggcagcaggaatgggaagccgttatggcggcttaaagcagatcgatcctgtagatgacaaggggaataagatcattgatttctcgatttatgatgcagtcagagcgggattcggcaaggtcgttttcatcattaaaagagagcatgagcaggatttcagagagtgcatcggcaatgcagtcagcaaacatattcctgtagagtatgtattccaggagctgacgaaggttccggaaggatttcagattccggaaggccgcgtaaagccctggggaaccgcacatgcaatcctgtgctgcaagggcgtagtgaatgagcctttcgcagtgatcaatgcagatgattattatggaagaagcgcttttgaagagctgtaccgtttcctgaccacacatcacgacgatgaaaaatatcgttacgcgatggttggctatcagctgggcaacactttgacagacaacggttccgttgcaagaggtatttgcgtaaccgacgaaaacggctatctgcaggagattgcagagcgcaccaagatcgtgaagaccgaggatggcgcggcatacacagaggatgatggtaagacctggattccggtaggattaaagactccggtttccatgaacatgtgggcattttctcccagcattatcaacgagctgcagaatgcagtagatcgtttctttgcagaagaagttgaaaagaatccgctcaaatccgagtgctttttgccgatcgaggtagataagctgttaaaggctggaaaagcaaccgttgaggtgcttcattctgctgacaaatggtttggcgttacctataaggaagacaaaccgtttgtgatggagtcgatccagaagttaaaggatgccggtgtttatcctgatgttctgtggtaaaacaataagaaaagtcagcaaaagaatggaggaaacgaaacatggcaattttagttacaggcggcgccggatttatcggcagtcataccgttattgaattacagaatgccggatatgatgtcgttgtagtagataatctggtaaattccagcgagaaatccctggaacgtgtagaaaagatcacaggaaagaaggttcctttttacaaagtggacattctcgacagagaaggcctgaatgaagtttttgcaaaagaaaaaatcgattcctgcattcatttcgcaggcttaaaggcagtcggtgaatccgtacagaagccctgggaatactatgaaaacaatattgcaggcactctgacactggttgatgtaatgcgcaagcacaatgtgaagaatatcatcttttcctcttctgcaaccgtgtacggcgatcctgcgatgatcccgatcaccgaggaatgcccgaagggacagtgcacaaacccctacggttggacaaaatccatgctggaacaggttctgacagatatccagaaagcagatccggaatggaacgttgttctgctgcgttatttcaacccgatcggtgctcacaagagcggtctgatcggtgaaaatcccaatggtattccgaacaatctgatgccttacatcacacaggttgcagtcggcaagctgaaagagctgggtgtttttggtgacgattacgacactccggacggaaccggcgtcagagactacatccatgtcgttgaccttgcaaaaggccatgtaaaagccctcaagaagctggaggatcattccggtctgaacatttacaacctgggaaccggacacggctacagcgtgctggatatcgtgaaaaacttcgaggctgctaccggcgtgaagatcccgtatgtgatcaagccccgccgtgcaggcgatatcgcaacctgctactccgatgcgagcaaggcagaaagagagcttggctggaaggcggaatacggcatcaaagagatgtgcgaggattcctggagatggcagtcgatgaatccgaacggatacgacgactgagaatacaagtaaaagcaacgggacgatcggtgtcagtagaaaagacgctgaccgtcctgttttagttcatgacaatagaatgcttgcagagggcgcatctattgttcatgacaatagaatgctcgcagagcgtgcattctattgtttgaaggagagattatgacacaacaatatcaggagctgacagagcagttggcggcgctggtggatgcagagtggccgatggtcagcaaccttgcaaatgcggcagcgcttttatatgaaaggctggatcgcctgaactgggcaggcttttacctgacggacaatcatgtgctgtggctgggaccttttcagggaaaaacagcgtgcgtgcggattgcagagggaaacggcgtctgcgggacagcgctgcagacggacagcgtacagcgggtcgaggacgtgcatgcgtttcccggacatattgcgtgcgacgcggcatcccggtcggaaattgtgcttccactgcacaaaaacggagaggtaatcggtgtgctggatattgacagcccggaggttggcagattttcggcggaagatgaagagggattgcgagaggttgtgcggattctggaacggattatagtttgctcgtaa

SEQ ID NO: 88 - DNA, 27106 bp, unidentified
  source 1..27106: mol_type = unassigned DNA
gtgagcgcattacgttggttttatgcagttataatttatatccatcatttcaaaaggggcatatttacagtgcctgaaaacgtaaaacagaagcttgtatgtataggcaatatgacgaactttgataaggctacgcttgttcaactgtttcttgttcagcagtcacagcttcaggatattgaccggaagcttcagctgctattggaacaggtcgctgtattgaacaacaaccgttttggcaaatcttccgagaaactggatactgagaatcagatctgcttcatggaagtagatggcaacatcgttttcttcaacgaagcggaagcagttgcttcgctcaatgaatacgctgatgaagatgaaaccaagccaagaggcaggaaaaccaaaggcaaacgagaaaaggatatccggggacttcctgtaaatccggtggaacacaagatgtccgaagaagaactcattgccgagtttggcaaagatggctggtatgaacttgaagacgaaatctaccgacgttatagtttcacacctatgaaagttgaaatagaagaacatcatgtaggagtctacaaatccaagaaggataatcacttcaaaaaagcggagcatccggcatacctgttaagaaacagcttagtatcaccttcgcttcttgccggcgtatggaatgccaagtatgtaaatgcaacgccactctatcgtcaggaaaaggaattccagcgaatggggcttgccattgatcgggcagatatggcacactggacgattttgtgtgcagagagatatctctcaatcttttatgattatctgcatcagaagctttatgactatcatgtgcttcaggcagatgagactccggttctggtctcgaaagaaaaccgaaccgatgggaacaagcattacatgtgggtgtatcgtaccggtaagatgtatgcggacagacagatcatactgtacgattaccagccttcgcgtaatgcaagccatccaagagatttcctcaagatgttcaagggaatctgcgtaaccgatggttaccaggtctatcataccaccgaaaaggaacgcgaaaacttgaagattgccggctgctgggcacacgcaagacgtcgctttgacgaagccgtgaaagcattgccaaaggataagaaaaagtcttcgctggcttatctggcactaaagcagatccaggcaatatatcgcgaggacaataaacttgcagataaatctgcagaggaacgtttgagacatcgtcagctgacagtaaagccactggttgatgcttactttgcgtgggcaaaacagaaccagcagtctgtcccagccaaaagtaaaactgccaacgggcttacctactccttaaatcaggaaaagtatcttagaactttcctagaagatggagaagtgccaatggataacaatgccgcagaacaatccattcgtcctttctgtgttggaaagaaaaactgggttatgattgatactgttgcaggagcctaggccagtgcaatgatttacagcattgctgaaactgcgaaggcgaataacctcaagccttacaattatttcaagtatcttctggaagaaatcccccgacacatggatgaccatggtgtggatttctgtgaaaatctgcttccctggtcagacaagctgccagcggaatgcagaaagtaactttaatgatatgctgctctttggagcggttgtttatgtgggtgtacccactatggagcgtttactatgaatacatgataacctcctgatatttatgctattatcaggtccaggattctgtccgcccccccgggtcagttttaagtataaatcaacagtagcaatgtcatattcacggcagatatcgcatctgcgtttgccggaacgatatagttccaccagttgctgtttgaactcgtcagtatatttacgaggttttcttcgttgttttggttcggtcataatgagtgctcctttgtgtatttattatagattatatgaccttaaaaaatctgtccagttaattgtaacctatccaaagaaaccctctcttaggttatatccgggcatacatctcaccacctacgcttccgctaattttgcaattttatgataattagcaatccattttaccaacgttcttatatcatcttccgtattatatcggcctattgatattcttacagaagaatcaatccgtgcctcatccaatcccatcgccaacaatacatgcgatctatcttgtgacttagaattgcaagcagaaccgatagaaatacagatatcatgcatatctagcatatttaaaagaccttccccatcaataccagagattgcaatattcaaaatgccggcagctctgcttgaactatcaccattaatactaaaatctatttcattttccactaatagcgtacatagtaagctatcaagttcagaaatatggttgtgaatactttccatattggcaacattgtcttcaagtgcttttgccatagaataaatacctgcaacattttcagtaccagatctcattcccttttcctgtcctccgccaactacatacggtgcaatggaacatttcttacttatatataaaaaaccaattcctttaggcccattaaacttgtgtgcacttgcagataacaagtctattcccatttcttttacatcaattttaatgtgcccaacagcttgcactgcatcagtatggactaatgattcaggattgtcctcgtgcaccagtctagcaatttctgtaacatcctgaatagcacccacttcattattctgaagcataacagatactaaggtgggttccttatctaacactgccgccaattccggtatgctaaccaagcatttactatctacaggcaacaacagtacgttcttcccctgtaatcgctggttctctgccggatgtagaattgcatgatgctccaccactgaagtaattactttttttgccttatctgtggccttagtcataacccagttatcactttctgttccgcatgatgtgaaatatatttcctccggctcagctccaatacagtcagcaatgatttttcttgatccttcaagaagtcttttcgtctgccttccgaagcgatatactgaagaaggatttccatatatatgggtagaaacctccattaatgaacttaaagcgacttcactcattgcagttgtagctgcattgtctaagtaaaccattacaatccccttactttaatatcaggcattctgtctgtaaattctcgatctatagccgacagttgctgtctgataatttttcttttttcaaatgctggatcaaagcacatcatcttaaattcctgtggagaaatatccgaggcagttcttacatgcggatataacaacttcaagtatgcagaacacattttaataaccgcatttgtatctcttgtatcagcatttttaggaatatccaacaattcctttactattgcactatagaatgactgagttctgatatatgaaagtatctctgaaaaatactcaacattcaatgagtatccgtttaattttaagtcctcactgattcgaggcaaataccagccttcaataaatccatggaatctgtcaattaacgcatgatcctgaaatgcctccggtaattcttcaaaataatggttattcagaggtctcttgtttgaatccaagtcaatatttcccagtaagattattcctgccaatgatgtctgttttgatttacctactgtgaatgccccctgctccatgtagttctttaaagcaccctgtatttcctctggattatcaaatgaaatagtcttaacctcatccaatgaaacaaattcatatgacggaataataccaggcgtatttctacccatatcatagaacaattttgctctggtaatcttaccgccacttatttgccatccatgcttagaaaggttattaaaaatgtatgatttaccagtacccttaggtgccagttctatcatattaagatttggttcaacaaaaacaagtaatctggtcagaaacaataatttctgatccaacgactcaaatgaagtcgaattaggattatactccatattactgataaggaaatcaacccactcttcaagatcaaagtgttctcttgcctggcagtaataatcaaaatcaggtctatacggactaaacggtttaaatttaaccatttcagcgtagcctttttccttcccatccggttcaacatactgcatggttacaacaccccagttttctccttctttaagaagcccctgctgacgtgctaaatatggtgatactcttccctcaccatttttgattcctatatctggtatttgaaaacgatattctccacttctaatatctgattcaaatattattcttgccagaatctgaatcacatcaccatttaataaacggcttctgatattgctatccttcgttggaatatgcttatcaataaagttatataatccttccgtgtctatagtgtcatcgttagaaaactttttaataagccaatcctttataaacgaaggaacatttacaccagaaaacaggctatatctgtcaggagtcttatgcattgactcttcaggaaatatgtcttttatttttttatctaaattagtcatcgaatccatcatcctccatcatatttttcttagctttgttaacaacatggaatttatattccttacttgcaataattacctttatatcctgttctttaccagatgataattcagcagaatacattccactatcagctactaatttatgtttagttccatcagcctcaataacatatgcttcctctgtatcaggaataattgcgaatgttactttcttgtccagaccagtaacctcaagtttatcgtccacaaccttataaacaacctttttctgaccagtctgtggactggcaacaattaccggtacaagcatttcctcaattgtggcaccaccatggttttcatatttcggccggttatataaagaagtctcattaagagaaataatatatggattgcctggtttcccttcgtcttcataaacaatataatctacggtatctgtaaaatcatctttcgatgcaatcttacagcatcttccctcatgatccgatccatcgaagttatattttttcttggtttcagtccactttgcccttgctgtagcgccatgatctgctgtaataagaatcttctttccgtcagcttcctggactatatctcttatcttttcttctaatatatcaaaagcttttctcagatttattgccgacttgtaaaactctccatgaataactatctggtcaaaatcgaggaaccattctttgtatccaatagatgccatgtattccttattaacgtctgttatggaaggcaaatggcaggaagcatagtcacaatactcaacttcatatccatttataacaagcaactctataatgagcggtgtatattctgcaccaactccatctaaaacgtaaatatcagtctcaccaacatacggtgcaattagtgtttcttgtctctgaagttcataatacatactgtagaggtttgtagaattcgcacatccactcgaataatactgctggagatactggttatctgaatctgcaaccttgctctctctataggcttctaagtagtatttccactcattttttccttctatttcagcctctcctattccaaataaataagaatagaaagacggatatacagattttacttcatccttatccaaaacaccatttttatatagtttaataacaaattctttttcggtattgctcaatccggtatacgcaggcttaaaaatcttggtataatatgaaaaaagacgatttctcatatcctctatcgtttgaccatattgtgtgctcaactctaccaaacatatttcggatacattaccgttcacaggaatgcttagttccttagatattccttcacatataacctcttgtatttctttttccggcgcaattgatccggcgtatttattaagttctttaattattccaattctttcttctaattgaacaggattactcaaccaatatccctgttgccagatggttatcagatattctttttttgaatttgttttaagcaccttaaatactcttgcaagaaaagacattggataaaaaactgctatatagcatctaataaaccatttttcatattgtgagtctgatgtaagccatttcccggcaataacataaattgaattaacatctatacctaataccgccgatgccaactcatgtaatcccttcccagacaacatattagtatagtcaacacataactggttccaatatgcctcatctgttacactgtagcggaaatcaatactttaaatcgcaggccttttcaagatattcctttgaattgtgaacaacatcaatctgaaaagcattatctggcgaggccttctgatgccactcatacaagctttctgagcaacaccatattggagaaccaaaatccaacacttcagatgatctccacagtccaagccattctacacttgaaataattttatttttcgtaatatgatctgagtattcattagccacaaaacatactcttctattcttacctataagctcataatctgaatttaaaaacggatcaagcaaatcttttctggcaaagctactctgcaatactttatacacattatccatcatagaaaaacatataaagataattcttctttgagacgcatttgccccagaaatcccggaattttctatatcaaatagtgagagcaccgtggattcaatatcctttttagaataaaatctaatcagttctgaaaaacccaagacatatgtatccctatcctttgcagaatattccctaataacatggacgaacttagtctttgtcatccaaccatcatctttcttcataagataatcactcagatcaagcagttctccgtttccggctttcaccaattcctggatatcttcctgagtatgattattcatttccataaacagaaaacgcactggatatctacgatatgaacttgtacccttatttttatcttctaaaatcttttgcttgattacttctacatccatatttccgcctattcctcacctaaaaatttcataaccgctgagcatacaacaggatactctttacaaagcttaacaagaatttcttttgcttctccatcattaaactgcttctcataaataagttttgttgttgcctcaatcgttgcatgtgtctttcctatagcaataggttcaatatctattggttcaaaatccggactttcaaaaagatcgtcatctgcttcataatcatcctcttccccagaaatgctgtttacatcagactttcctgcattgttcggatttatatctgtatcatcctctgcactatcaccattatttgaaggcggattcacaggttgcttactctgcaatgcacaccataaaagaacttgtttttcaacgtcttcttctctccagaatacaatagcatctgatagattctgtttaaggaatgccatcaaattagaataattgtccagtttataatttacagttgcaaggcacttatcaacaaaggcattgatacaggccgaatcctgtaccttttctaatgtaagcgctattgttgtcttctgcttttttaagccttcaagtagtctgcttacatcatcttgagttatactatcacctgtcgcattagcaagcttaaataactcatcaacaactgaattgaactcgcttcctttatcaactacatattttaatgcccataacggcgatttatattgtttttcaaatgccgatctcagtgaccactttgtttctgaaataccgtcaccctttactccaaaaacactctgaatcaaatcaatcaactctttttcttctacagttgaaaatctaactctaagtttagcatcagctttttgatccaaccaattataaaatgcagcattaacaatatctcgcatgattgtggttgacaccaagcttccttgatctgcaagatacatttttccaatatatctacggaaaactaatgctactgcagccatgcaaatatagttgttgtaataaccgtatggtggctgtgttaaaaacttaaactctgagccgatatcgactactgttttatttcttagttctgcaatcttatcgtcaatgactttaaccagaaccgtcataggaacatttacatcataggttccaatatagtctaatttctcgtcaaaaatccaatttccattcttatcttttaaaaggtttattacagcagattcctgaccaccaaatgcctctatgtctgatctacttaacgcatagcaaactttttcaactgtctttttagcatatgtagtcttccaagcagtactagcgttcgctattttagataacttctcagcgccatctgtaaatatccttccaacgcttgttattacacctgaattgcttacagacttaaaacttgaagtattaactctctctccgtggaaaataatagttgccgctccatcaagcaactcagttttccatttttccatccacttcatagccctcttttcataaggagtaggatcttcaacctttgtatcttttgcgacagtttcacgtgctttagcttcaataacgccttcaaatctttgctgtccaagcgttgtgtctgcaattacgaacacaatatctttcattgtttccctttgcgacaatgcttgaatcaaatttttctgattttcgagagtagcttctggacgatttgatttcttatcataggttggtgtatcacctctaaaaacaataattgcaatcttcgctgcataatcttttgaaaaggctttcagtagttttgactccattgatattgccgacaaacttccccataccaatgaaaactctgttattctattaaatccgtccgcattagaaatagcctttgtaatgtcatttctataacctatatattcatcaagcaaagaactaacatcttcatacttcaaatacagcttgtcctttgccgcctggattttttccataggcatagccgatgaagaaacctcatatacttcatccggtcctttaagaactatctgcttttcatcaatagaatccaatgctcttgtaatagcatcactgctccattcaccacttaatacatgaagaatattctttttgctaggattaactaaactcttctcctgatcggcaccatccatctgtgtcacacgattcaaaagattcaaaagaagtattaccttaaatgcagataattcaggcacatcggtatcttccagttttgttgaatacatagagaacttataaattattgcatcaaaattatttgttctatcctcagaaaatgccttaacaaagaaatcccacactttatcagctgtaagatatttaacatcatctatatcctgttgtatgaaatgtttaaatcctttattctcatcattcaaaaactcgaaaatacttctttctgcagaaccaatagctctcgaaacaaaagttgcaagatatgccgtataaggatgaaatggatataagtgttgaataatatccttagtctgcgcagacttatccataggtgcaacaatttcatctaatgcctgcttaacttctatctgtccagctatacgatcagtaattaactgcgaatattttggctgatcactaatcttcaaggcattcgaaaggatatgatatgttgttatatcctgcatatcatatttgaggccgaggaatcgtgcctttgccatcgttttctcatcttccttaagttccttatagctatcggtagcctccatgctcttgtgtgtaatcaagaaaacatacactccgatgtatttatccttatcatcttttcttggagccttactaagttcagcaatatcctgcatacaatttaggatactacgacgttcagtaatctccagcaaagaggtaaactcatcccagaaaataacaaggtaatctgccacattttgtttacgaagagcatccattacttcggtaagccactgtttaatatctggtgttgcttttatcatattagactttttgagagcaatgttaatctcctttaggacattaacatcaccaatttccagagcttccttcagctcatcaattgatgaagcatacctatccagctcgtttttaagcatgctttcccaaaaagaagaaaacttcttatcttctaacatttcaataactgcttggaaatctgatttaactgtaatattcacaccagcatcatttaactgctgtgtaactgctctctgtattgtatattttaattcttcagtatctacaatggagtacgtacctttaagcacaactgggaacaccctttccttctttcggaaattaataagcatccccttaagctgcggattagccaatttatcaatataatctgtaatatcatccaaatcgtcacttaataaatgcttaatcacagctgttgaatggctctttcctgtaccatacgtaccctgtacccaaatagacttgtgttgatcacctgttaacgaagtaaaggcattcacaatctctttaaggtttgactcaaatttttcatttgtaataaactgtttccaataattctccttctcctctgtcatattgaaggtagaatcaaagaaaggttcaatttctattatctctgagtacttcatgtcatcctcctaaataaataatgtgcagccttcttccttaaactgctcaattttttcagtcaatgtatccacatcggtatccaacacttctgccaaatgttctcggcagaaatactgtttaattttcttacccaatagttttttacacaaagctacatcatccttctcaagttctgtatcacaataataacatttctccatttttacatcctctttatcgctgcggcaagtgcttcatctggagtcatttcttcattaagatgaacattttcaagaccccccgtcaaatctgcagtaagtattcctgcctgcgtcaatcctcttagcgcagggataagattctccggagtcattccaaatactgtgtaaggattaatgccctctggaagaatcagatcgctaaccgtgatatcaaaacactttgaagcatgtgcctctttatataacaaatatgctaacgcatgcatagaaacatacgccggtgaaatcctcttaacacctttacaactatttccagacatttgaagttctgcaacatatatattctgcggatcttccggttctgtagaattatgtcccaatggggagtatctcaacatagtaatcaatgcgttagtaggatttttaattgtattatcgtttaatgtcgggaagccttccctcataatagccacaatatcatcccttgaataattcacatcaagctttattgatttcacaaaactgttaactattgccgaattatacgcaaggccaacccagataatctgccatgctgccaacctattatggtcatacaacctcttaaccatatcaaatttgtctgaaattttcttttctttatcatctatcatttctgcttcacggagccagttgatagcagctggtatcatcttgcttccaagattcggatatgatccaaaccaatcattgccgttattgaagaaaacatctacccattcatctcttaaaccaaatgtagaatatctatcaataccacttgttctcatattggaagatttaacaagcattccaccctcattaatctgtttcctgtgtgctattatgcagcctcttgaactaacttcaaggcacttatggcagtgaacacacatgtttttgtttatctctaccttatctcttaccgtaagagctcctgtcgggcattctgcctcacatacgccacagagttcacaaccagctgttttagtaagcacacgagaaagcattccatgtaaagcaggcttattaacagtaccttcaactataaatcttacagtcttaccagattcttctacactaaatctaaagaattctccattaaaattcagttcacccttggtaattccattctcaacggttgagatatattcacaaagagcagttaaccatattctccaatctgattttggctgtgtaacaacacactcaaaattcggttctttacttataaggtctacacgagacccatctggaataagtcctcgaccacctgcatttttctgccaattgtttgaactaatataattatttatcttttctttggaagtaagccccaagttttttgccatctgctcaataactgctacatactgctttgaaatttccggatatattcttcttatcaaatattcagaccaatcagatgcaaaaggacatactccgcatcctacacgagttaatcccattctataagcaggattcagttcaattcctcttgagaacatatataagaatacttctgaatcattccatctgaatatcggtctgcagttaaaaagatttggatgcttaacatttgcgccaattctttcatatgcagatctacgtgcgctttcatcagaacgaactccttcataaactgcaacctttggctgcttgtctgtattgtgtaattctttcattgttcttctaaaaactgtggtcttcattacagagcaacaccatctattaactctgctaggtggaccatactgcttccacaaatccagcgcatgtctatcactctttgcatgatacagtttgaaattagggaagcgatatttataatcttcttccgtatacgcaacaatgtcataagtacaaggaagttccatatcagtatcctgaaaaacagccttaaatgattctaccggtaaaactctagtcacaagatccagaataacctgagaatctttaccaccagaaaaagcaacaacataatcatcgacttttcctttaaacgtttcatagcaccccattatgaagtccattgcctcattttccattgtttcaatagcttctctattgatttcaagcatcttatctacatctactggttcgagagtactaaaagtaaaatccgaattataaatcacatctggcttgctatagatacctgcccctcttctctcaaaaaaaggctgacctttataataatatcgtgcatcaatattccagcaaattggtaaatccgtcttaggcattctatattttttattgacttcgagcatctgtaattcctgcaaatacacaggtcttggtgcaggaatagcttcatcatctgttatattgtcactcaaaataatgccattattctgaacattccatttaactttaaacatacttgtctccgtttctaatagccataagctattggtttattttttaatccaaaaactctttggcatcggatatatttttgtggccattatttttcatccactcgtcaacctcattcacgtcaaaacgccacaagcgtcctttttgatgtgcgggcataccctctttttttatccagttcattacagtatctctgcttatatgtaagtatgcgcaaacttctttcattgaaagccacttgttttcttgcattgtattaacctctctttagaattcagttcagggagtacacatattcaaatgtacataaaatacccataatataccgaattatatggtatcacaatttcacgtccttttcaagatttttcttgattaaaatcagttatagttgtataataacgtactttgcatatttccgatgttttttgtatttttttattgttttattaaggttaatttggtgtatttatccccatctgccacttatcatgtccctggatactttttaccgcttgtctcagtgtatttgctcttccatgctgatgatatggatgctgaaatctatgcttatgaaacaaaaccagcgattcatcctgcggatactctgtataatgcaaataccaataatgaccggtgttcctgctctgtattgttacatccttcccatcaagcataatcacattaaaatactgcttgtctatctgagataaatgttcctgattaaacatctgctctcccttctgctgcaaaccatgtagccaatgcctttttcaaaatacactccattgttttctggtcctttccctcgaaatatttctttggatatcttctctgacaccttgatattcataggtctgtccttaggctctactgtctttgtgagatatctactgaccatagtaaattaagattgtttctttgtctcgacctcttctctcgcatgatcaaccgtaataatcagctttctatcttcacatttcaccagaatcggagcttccaaattcttcaagccataatccctggatcctcaacattggggctgacttgtagccacaaccactgaaactacttactttcaattttctgtaatcttttctttttcttgtcataaatttacccctttcgttctatattctatgttgtttggaacttcattatagtacatagccgcatgtcccgtcaaacaaaatttgtatagtcgcatgtccattttaaaaacacatggtcttatgtccatttttgtgttatactatttttgaaaatttaacccataagggcagattgtgagattagataaatgagtaaagagaaaaagactgggaggaaattgacgcaggctcgcaaagaagccaatgccagatataatagtaaattcgtagaagtaaaagtccgtatgacgccggaacgcagaactgttgttcaagaacatgcatcttctatggaagaaagtaccaccgctttcatcaaccgtgcaattgatgagactatggcccgtgaccaagaaaaaaaatcaagttcttaaaacaaaaaagttggttcatcccactatttggggcaaaccaacttctcttatttcttggaaaaactgacagtttcaagtataacgcgcatctagttttcaaacttatcattccaaacctgtctttcactttttgtcttaactgcttctgaaatttggtcatccgtcaaacaataaccttgttcctgcatccttacaatttcctctagttctgctagtgcaagcctgtttgcatcttgtacaaaaccatcgcctatgtattcaacttttcttaatattcgaactttaataacatagcctttttcaagatattcttttattcgcttttgtacaccattcttcctaacaccacttaaataatcagaaatatgccctcctttaaacattctacagaaaatatttattgacttaccaacataaaatggtatttcttccatatcttttacggcataaaatccatatactcctctgatacaactgtcaggatttatttcctcttgtacatttatattaatagattttgccatctcgattttttgttcatacgtcattcttcttgccatttttactcctccgtaaacttcaaaagttttgcattatccatgcttcctaacaaatatcgcaaaatctaaatagtaaccgccacctttatcaccccagcccgtctattctcaaataaatcataagcttcttctatctgagccaacggatatgtgtgggtaataagcggtgtagtatctatcttgccctgttcaataagcgcaagagtttcagcacagtcacagccgtctactcctcctgttttaaatgtcagattttttccatacatttccggtagtggaagcatttgtgcattttcatagagtgcaactattgtcacaacagcgttaggtcttgcacatttccaggcaagttcaaaggtgctatctgctcctgcagcctctatgacaacatctgcaccaccgtgttcactttccttttctacaaaatccacgcagttctcaggctttacagtaagaacctcaggataatgcttgttgataaatgcaatcctgctgtcatccgtttcgcatacgatgattttctttggatgttttagcataacgcacagaagtgtacatatgccggtaggtcccgcaccgataatcaaaacggtatcatcctctgtgatttcggaaatgcgggctgcccaatatcctgtagcaagcacatctcccactagcaaagcctgctcatctgatacagcatcaggaatcttgttgagtccggtatttgccaaaggtacacggacatattccgcctgccctccgtcgattcgacagccgagtgcccagcctccatttttatcagtgcagttattgacatagccatttttacagaaaaagcattctccgcaaaaggtttccacattgacagttactctgtcgcccacattgacatttgttaccgctgagcctgtttcttccactatgccaaccatctcgtgtccaactgtaataccttttaccgcacggggaacagccccatgcttgatatgaatatcgctggaacagatgctcgcaagtgttactttgacaatggcatccgtaggttcaataatagtaggtttctctttttcaattagggcaaatttgcctttatctacataggtgtatgttaacatttctgtttcctttctgaatggtaaagtattctaccgcactcaggcagattgatattcttattgtaccatattcccgactatcattcatctacattttctcatataaaaaaacatgccaccataccctctcaggtacagtgacatgtctccatctccggctattttgcttcacgatacctcttgcaccaaagttcttttatccgaaaactctgcttgcaagtatgaacacatcttttgcactgctcaaagtaatctatcttaccatttccgttcaaaaaatatgcccagtaccttttctctttatccgtcataggatcacctgctcttcccctgcttaggaacattgggcgcctttacttctggcacctttgcctgctctccctttgcacaaacagccacaaatgcttccgcaccatactgatactcggaaggttccgcaacagcagatacgaaagatacatcttccataacctcttcggtatgtttctctgtatcaacttgcttatcattcatgcggttaatctctacatttcttgccaaatcctccaccttatcaatggatgcatccagacgaagtaccatggattcatacaccttcttctgccatttccatgatttcttgattacctccgtcttggaaaatctcttctcctgcccggaataatcctcctcttccctgtcggcgaaggttctgaacgtattcgccaccttctgtccggcttctctcattcccttaccaaatgcatcaatctttgagatagtatgctccgtatcgacaattccctctttgaccttattcctgatgcctataagtttatctttcaagcccacaaattcgcaaacacggtttaaggcttccttgcctcgcatcttaaaatcagccacaatccctccggctttatgcctgatatcctcctttacttcaaagagctggtatggataggttacaattaactggacagattttttaaggtcatataatctataataaatacacaaaggagcactcattatgaccgaaccaaaacaacgaagaaaacctcgtaaatatactgacgagttcaaacagcaactggtggaactatatcgttccggcaaacgcagatgcgatatctgccgtgaatatgacattgctacttctctgtttgacaaatgggtaaagcaggcatccaattccggctctttccatgaaaaagataaccggactccagagcaggaagaactgatccggcttcggaaagaaaaccagcagttaagaatggaaaatgatattttaaaacaagcggcgctgatcttaggacgaaagtaaatgtgattaaagcaaatgcccacaaatactctgtatcagcaatgtgtcgcgtcctacaggtaaacagaagcacctattattatgaagcagcagcaaaaaaagatgaatcagaactcactgcagacattcaggaaatttttagaaaaagccggaaccattatggtacacgaaagatcaagaaagaactggctgattgcgggaaacaggtattaagacgcaggattggacggatcatgaaacaggaaggtctgatatcaagctatactacagctcagtttaagccgcaaaaagacagatgtaatgaatcaaaagtggcaaatgtgttgaactgacaatttcaaaaccagccataccgtaatgtggtggtaagtgatttaacttatgtaagggtaggaaaccactggaattatatctgtgtactgatagacctttttaacagggagatcgttggatacagtgcaggagaacataaaacagcagagcttgtaaaacaggcatttcggaaggtagaaggcaatctgtcggaaatccaatccatatcttccacacagaccggggaaaagaatttaaaaatgagacgattgaggaactgttagaaacgtttcaaatagaacgttctctgagccataagggatgtccttatgataatgcagtggcagaagccacgttcaaagtcattaaaacagaatttgtgtggaatgaaaaatttcacacactagaagaactgaagataaaactatgggattatgtaaactggtataatcatcaccgcatacattcttccttgggatatcaaacacctgtacaatacagggaaaataacccaaaaaaatttgtctgaaaaagtgttgacaatccagtttactccgattattaaataagtgcaacctcaatatttttgtctattcgacctacttcaatattcttatctacccaaccttcaaaattcatcgattttatacggctttcagggcattttttagtttcaaaaactgtaggtcataaagtgcggaaaagccttattttaagccgtttttcacacttttaattatgtactttagtcaacaatacgacactctcaacgtggctcgaggcgatagcaagtacgtcaggcctcctcggtcgtaagcggaaactgctcaaccgccaaaatccgctctttggtcattcgtggtaactggtcaaggcgttttttcggtatttggtcgttaacgggaagtggtcaacgaagagccctttccagttcgccctcactgtagccaaaggtataaccctcgtccttaccattagaagcccagatcaaagcagcgtcatatacgctgaggctctcgccgtcatcgtcatcatccgattccccgaaaggaatcactctgccacacttcgggcattcccagtttccgtctccgatgtactccatatctacaccgcatccgtttccacatccataaggaattataatctcgtacctccgatttttatttttgcatcttcttatttgagttcttccggattcgcagtaagccagttacggatatcgttctttttgtctttgaagagctgctccctgctgccctggaatacaattatcgtggactggcccttgcgtctcaattctgcaaagtaagagcaataattcaggaacatcgtatcgtgctcggcaataataaaggccttcttgttttttgaaacctgactgtatatcagtccgagcagtctcgctgtctcccgtttgcccagtccttttgccggttcatcaagtcctatcatggagtacttattatcgtttaatgcctcggcaagctttattctctgattttctccgcccgacagagtttttactttctggctgagcttcaaatagccaagtcctaaatcagagagaagcttcagcattttatccgctttagcggaaatattcataccggaagcaataagctcatcaatggtcatttgctgtatgtcatatatattgacaccatcgactttccactcgagaacctcctgcagatatccggtaccattacatttatcgcaggtaccaaagagcttctcctcataaaaactgccgatttcaattacaccagtgcctccgcatttatcacaggcacctttgcctctctgagaaaaataacctttatccttcccaagtgcttttgcataacaggttcgtatctcgccaaggagcttcgtgtatgtggccactgtagtaaatgagtttccttttaacggcttctgcgaaacatacaggtaatcctcataatacttggggagaatttctctgagaatcgtcgtcttgccgcagcctgacattccgcagagacccagtacagatccatgcggtatttccagcgcgcttcctgcataatcgacataatccgaatccagcactcgggtgtcacaagatgttctcttgaaaaactggtaaggcagagaaccttcctgaagcttcatatactcgtttttactgatcaggtaaccgccgttcttgcccccgtcatgtccaagatagatattgtgatcagctttttcgatgaccttatcgttatgctctaccacaagcaatgtattcttcttgcgcatctcatccatgatgcctatcgtaaagtcaacctctgcgggatacaaggatgctgtaggctcatccagaacgataagtaaatcatgcatctttcctataagaagctgtgcgatgcgaagcctttgcagctcacctccagacagcgaagctattgatcttgtaaggctgagatatcctaacccgaccttcttgcatgcggtaatgaaggtgagaatattatccagagcgggctgaacattcttgccggcactcttcttcagtttcagcaaatccttttcaagagtatcaagatcttccgtgtagaggctccccacggaaaatccttttgacagttctttcgctgcagtcttcgctcttagcctgctgccagagcaacaatcacacttcttttgagcacagtactgttcccgattatgagagaacatatcatcagactttttctccaaaccggttatcggtccgatatagcagctggtcttggatcttgacctttctccggctttgtacttaaatgtctgtttaagatttcccgtgccgtacagtaatttctccttctgtttctcggtcagctccttgaagcgcttattactgtctattccgcattcatcacaatatgcaatcaaaagctgtctgaagaaatctacataggttttctgccagcaccggaaaggaacctctgaaatctttttgtcataatcaataatactgaccggatcaggctgtagcttatagccaagcccctggcattcccggcatcgtccatccccgttatagttaaaatcacttagaggaagccccatgatgcttccggccacgtatataacaaacttctgcaaatcaaaataactcatgacagttgatctcggattcacattaaagttcagctgccttaaaggaaccgacatgatcacatcgtcataggaatccacatcataatcaacctcgaccttgttgtcgttggtcattttgtcgtactcagcctggctaatcccggaaatcgtgctgaaagcaagacttgatttgccgctgccactgacacccgcgatacatgtcataccgcccttatacaaatcgacatcaatgtttttcagattatgtgttctgattcctttgtaagttattttttgcatgttgtcacccatagataattgtcatccaattcatcttccattttttctattccactatagtctaatcgccttgcggagaaaagaagctccataccggcttcctccagcatttgctcaacctcggagataaatggaacgtgtaggtaaaattcactgccgtaatcctcaagctgttcatctcccagctccagctgctgttcccagctcatattaccggtatctatgccaagggtctctgccttttcgctccagtaggacttcttcaccttattatcaagatacggtgtcgtaaaaatgaacttcccatcatcctttaggagcctgcaaacttcctttactgcggagaggcgttcctcatagctttccagaagcatcagcccattgaaagaaaaaataacgttatcgaattcctgatcctcaaaaggcgcagagaggatatttccaacacggtagtcaattgcaccgttcacggcttttgctgcggcaatcatcttttcggcataatccattcctgtaatctgatagcctctttcgtacaggggaatagtcacacgccctgctccgcagcctatatcaagcgtcctaccttcggtcttaaagtatttctctatcagtatctcttcataatgaaacagtcctgccgcgttgaagtctgtatagtaattaacgatttctgtttcattatagcttttcttgtttgaatttactgtactcatcctgtctactccaaataatccagcaacaacttcctgtactgattctccttgaattcaggattgcagtctaccgcaagcatgtcgccatgccggttcatataatctattctgcagccgccagcgcaaatatatctgagctcacatttactgcatttagctataaagtccgtagatgttttccggttcagctcgttaaaatcctcgaatatctgaaccatatcctcaccaagaccgcgatagtatgatgaaaacttattgcacggataaatcctgccattggcatctataacaatatttgttccgataccgcagtttttgaaccggacattccttccgctacttgacgcctttgaaacacccctgtcctgaagctggctgacaagcaaaatcatcagtttatcagcctcatacttattgaatccggtaaaatccattgtcagagcgtttccggtcatctcaatgtcatcgttaagacgtatctcaagattctcatattcaaatgaatcgacaaagtttattaagttttcgcggatatcatccaccgtagaagggaggatggtgattgccagggtaattttaattccggtagttttcaacaggtcgatggcgtgcagagctttggcatagttgcctctgcctcttatcctttcatacggctcctgtgtaaccccctcaaagcttatctgtatctcctgacagcattccgctatggttttatagttgttttcgtttatcagcgtaccattggtgaaaagagatacattatgatccctcaatccctcaaggagctgtatggtgccggtatggatcagcggctctccgccggatacgacaatatccgtggagccgtttatcttctttatcctttcaacaacggccaaaatctcatcaaccttcaattcctgcttatccactataccagcagacacaaaacaatgagggcagcgcatattacagttgttggtcattgtaatgtgcacctttttctttatggactcaaccgggtcttcctcttcagaagtggcatcctcataaaactggcaatcctcaactttcgtcaaaaagtccgtaaatgcaagaacgcagtcatcctctgtatttccagggaatgctgcgtaatactcattcaaaccgtctattattgtattctctgaaagtatcttaaaaatctcgtactcctgatcatcgagtacaatccagttcggatattcaggagctatgacaatatgatagccatcaatatccttgcttacagtgttgtgaggaaaatccacttttgaattggcatcaaattctctactcatatattttcccgtatgtctaaaaagtcccgggaacttgtcccgggatcttctcggcttttagtatacccagattagcagtcttttctcttgtgagttgttctgcactgagatctctggcaatgaacacgaaccgagttttctttcttttccggaaccgtaatcgtttttacctgcttgaacatactttgcctcctattgtcatttttgtcttgaatcaacaatctttgcgcttgtgcgtcgtacggcactgcatacgctggccgacgacaatgacctgactcttgtttttacttggtaccacaatgtttttcagacctttgaacatcttttgcctcctatgcttttctaccatacaacactacgaaatacagtatagcaccaattctgtgattctgtcaacggtttcgcaaaataaaattttggcaaaaatatgttcaattttgccatatcaccataaaatagagcgttatcaatgtttgttgtggtcaagcttttttgtaacactatgacctaatttctgccacagggattatgtacccccgtagcgtgcctcataaggtgttttgtaattattataagaatgcggacgtacatgattatattgcacataagcaaattcttcgactgctgtgtagagttcatcctctgtacaataataatgctgatatataagatcatttttcaatgtattgaaatatctttccataggggcattatcatatggatatccagctttgctcatgctttgttcgataccaagctttccacagaatttcgtaaattcttttgatgtgtactgacttccttgatcggaatgcagcagaagtttactcaattctattcccggttgtgaatgaattgctttttcaagcgttcttttcgctaaatcagcggttattcttttatccgttatacttgcgataacacttctgtcatgaagatcaataatggtgcaattataacgcttgctaccatctgttaaaaatagataggtaaagtcagtacaccatttttgatttattgcatttgcatgaaaatcctgattcagcttgttttcataaaccttgtgagcaataccatgttcatacgccggtttcttttttctggatattgaaaacagctgcatttcagtattcatatatttgtgaaccgttaaacaactgatatcgtaccctttacgaataagataattataataagcatttggacatatattaaactttctgaggaaccatctcagtccaaatttattgttgaatttctgaatgaatcgataatcctctaatcgatttccttcgcaaagaatgccgccgtttttttaagaagtcgttttccttttggagttctgcaagctgtcttttcagtttaaggttctccttcatgaaatcataatcggcttgggcttcttcatttatctggcattcttcacgaaattgttttgtccagttggatatacttgcttttgatactccgtattcagctgcaagtccttttatggagcgtcccccctcaagatgaaggcggacaatcttcttcttgaattctggttcataatgttggttcatctgtaacatacctcgtttcctcctaagattatatcttattaggtcggtgtgttacaactatagtttagcacaacagtccacgcttgtatgaaccagccatccagcaatagggccgacttttggtgaacttgcatatttatataagctttcagcatcgttttcttcccacggacgcaaaataagtctttctgtttctaaaaccactatgaacctccaatgtctcgttttttatcccatttacttctttgtcttttcttccaactcaagcagatacctgtcatagtccgacatgaacaatctgtcttgaatgatacgatatttttcaaactccgtttctgcgtgtagtttggctatttcagcagaaacctttccggcatcctgcaaaatgccataatcaaacatttcaataaagctgttgagtctcttttcccaatcctccatagtaagaggaatacgccttaaggtcatgttttcagcaaaatccaaatatgccgttaccatacggttcaactgatgcaattcgttttcactgagataattctttgcaatcgttacatcactctttttaatcttgccatcgggagcatctgcccatgtagtaagtcccatatgctccttttggtggtcggctcgctctacaatcaattcagcaaccgtgtgaccgtgaaccgcaaaatgcattttgttctggacggtcgcataaaaccttttcgttgttgcagcggttttgtcatagtctatggcagtggcataaatatctgtgattttctgatagaactttctttcgcttgcacggatttctcggatgcgttctaactgctcatcaaaatacttgtccgtaagataagtacctcgtttcagacgctcatcatccataacccagcctttgatggtgtagtcctttacgataccgtttgcccacttacggaactgcacggcacgttcattgtttaccttgaagccgacagcaataatcatctgcaggttataatggttcacttctcgctgaacctgcctggaaccctcggtttgaactatccgaaattttcggatagttgccgactcttctaactcgctatctgaatatacttttttaatgtggtcactaattgtacgcacatcaacatcataaagcgtagccatcattttctgtgtcagccatatattttcatcttcgtagcgcatttcaatgctatcttcctgtcctccgacagaagcaacgtaggtaagatactctgctgcacttgaacgaatgcttatttcatttttcttctttgccaacgcaaactacctccgattgtttagattgtgtcaacagtggtgacactttttatacagagtcacaaattcgaactgaacattacaccttttttatcggatgtctaattacggttttccatttttccgcagcaacctttcttgcatctgacatataaatctcatgatgtaatctttcattattaatatcggtaacatacccattctgctctaagtaagcatccataagcgcaacagttgccggctcatcatcgaatgggcctaaatgcataatttgaacgcaaagtccttcatcgatagtgagaaattctgcagagaaacaatcaagttttttcttcttcgttgccgtttctaccgcccaatcaaaatccgctttagtaacaaaatcaggcaatcgaataacagaaatccagttgaaagcagatttatttgcataatccacaccatcaacatcatcttgccaccaaaagccttcaagcggcggaacaacatactcaaagaaaccctcgattttgtaatctgtcttatagctcatttttaatgtatatgcgacagcatacagcacactaatggcttgctgatatgctccaccttcttcatttggatttcccttacctctgacagcaatatagtttgcctttggaacatttactatctctggcttgttcttcggcatataaaattctttatattctttcttaaaatcaaaagccat

SEQ ID NO: 89 - DNA, 5372 bp, unidentified
  source 1..5372: mol_type = unassigned DNA
atgaatatagcgattgtaggaaccgggtatgtaggacttgttaccggaacatgttttgccgaaactggcgtagacgtaacttgtgtagatgtaaatgcggataagattgctaatctgcaacagggtattattcctatttatgaaccgggattggaagatatggtcttgcgtaatgtaaaggctggacgtcttcatttcaccacctctttagagagttgtctggacaatgtggatattgtgttcagtgctgtgggcactcctcccgatgaagacggaagtgccgatttgcgttatgtgcttgaagttgccaagacgattggtgctaatatgaagaaatacaccttggtcgtgaccaagagtacggtgcccgtgggtacggcccggaaagtaaaagcggctatccgggaggaattggagaaaagaggggagtcgatagatttcgatgtggcttctaatccggaattcttgaaagaaggtaatgctatcgatgactttatgagtccggaccgtgtggtagtgggcgtagagtcggaaagggctaaaaaactgatgaccaagctttataaacctttcatgctggttaacttccgcgttatcttcatggatattccttctgccgagatgaccaagtatgcggcaaactccatgttggccacccgtatcagctttatgaacgatattgccaacttgtgcgaactggtgggagctgatgtaaatatggtacgtgacggaataggttccgacagtcgtatcgggcgtaagttcttgtatccgggatgcggttatggtggatcttgtttcccgaaagatgtgaaggcgttgattaagactgccgagcagaatggttattccatgcaggtgttgaaagcggtggaagatgtgaacgagaatcagaaaggcattttgttcgagaaactggtaaaagtattcaatggagatttgaaaggcaaaacagtggctttgtggggacttgcattcaagcccggtacggacgatatgcgtgaggctccggctttggtacttattgagaaattgaaacagtcgggttgcaatgtccgcgcatacgatcctgctgctatggatgagtcccgccgccggataggagagtcggtttattatgcgcacgatatgtatgatgcggctcttgatgcggatgcgttgattctggtaaccgagtggaaagagttccgtcttcctacctggggagtaatcaagaaggcgatgaagcagcctgtagtgcttgacggacgaaatatttatgatggtgacgaactacaggaaatggggtttgtttatcattgcatcggtcgataaataaaaaaatagagagaataaccatgtacaaacgtttttcgataataatgttggctgttgcgctgtcttcttgtggaactccgcaacaaaaagcatccgctctggaagaaaacaaggaggcaaaatctttgttggaaggtatatggttggacgataatacggaaacggcattactgagggtgaaaggcgataccctgttttatgcagatgccgctacggctcccgttgcttttaaaattataggcgattcgttgattacgtatggtgcacggactaatggttataagattgagaagcagggggagcatattttttggtttcattcggctgtgggagatgtgatacgcctgcataagtctgatacggagaatgattctctggcatttatccatactcgggaaatccctgtttataatgaagttattaagaaagattcggtggtgacatacgataatgtccgttatcgcggatatgtgtacattaacccgtcaaagattaaagtaatgcgtccgggagtttcggaggaaggacttggggtggataatgtatattatgacaatatcatacacatttgcgtgtatgaaggcaggaagagtctttatgccaaagatatcaccaagcagatgttcaagggggtggttccggatgatttcttgcaatgggctatattgtcggatatggattttatgggggtcgattcgaaagggtatcattatcaggccacggtgtgcatacctgacggcgcgtcttgttatatggtcaatatcactgccggcaaggatggaggacttgcattcgagttggtaaggtagtcgtggtggctatgtcattttttttatttcgcgattactatttggtcgctatcatgctctatagagaataccctgaaaaatccttcaaaagcttcagcctgctcgcaaatgccctgcccatcggtattccggctgaaggattgggcttgggaattcttcagccggagattggaatccttcagccggattggtattcttccgattcttggggaattggttttcctgaaggatatttttcggctgaaacatttcacaatgcatatccttcagccggaatgccgatgggcagggcgtttgcggaatggctgaaagatctgaaggaaaaataaggcgtttcggcatgtagatgccgttatgggaaaaaacaacaggtcaaattttaaaaagctcttgttctttcaatgaaaacgtcctgttcttttttttaaagaccttgttcttttcagaaaagaacaggacgtttgagaggttagtaacgtacatgccggaaggttagtaacgtgtcaccccatacgttactaatgtgtggggtgtaaggttagtaatgttacaggtgaaagattatatatcctacaagcaatacatataatggatgtttgtgattgcctcgcatctattttgcagatgagccatgaagtgaccctcttcataaaataaaattggaggaaaacaagtccgtcttcctccaatggtttttagatatcatctcttccgtctattcttttggggtgtttcttctattattggcattgggcttgcccgtaccgttctttttccccttataattgccttgttttctggagcctccacctttgtgattgctacgaccggcgccacttcgcgggttgtattcgggcgcttctcccaattcctcgggaaccgggattttatagatgttcctacccaggaaattttcaatagctttgaattgggtctgctctttctcactgacaaaagtaatggcgcaaccatcatggttggcacgagctgtacggccgatgcggtgtacataatcctcgctgtcatgtggtacatcgtagttgattaccaaacgaatatcgtcaatgtctattcctcgcgaaacaatatcggtagcaatcagaatattgattctgccacttttaaattcacgcataatctgttcccgttgggactgctccaagtctgagtgcatttcacctacgttcagtttcatccgcttgaatgcttgtgtcacctcctttactttcaatttggaagaggcaaagataatgacacgttcgggtgtttgatcctggaaaagggattgaataattcccaatttctggcgttcataacagatataagccgtttggataatcttttccgcaggttttgaaaccgctaattttatttctaccggattgtttaagatcgtttttgccaattgttgtattttagccggcatagtggccgagaacatgatggtctgacgttctttcggcagatatttcactatttgcataatgtcatccgagaatcccatatccagcatacggtccgcttcatcaagaataaagaaagaaactttagacaagtctacgtaacctaggctgagatgacttatcagacgtcccggagtagcaatgactacatcggcccccaaagttaaacctttcttttcttgctcgaagcgcacaccatcgtttcctccgtaaacagccacgctggatgccggtagaaaataagagaaaccttccatttgctggtctatctgttgcgctaattcgcgtgtgggtgacatgatcacacaattgatggcatcttccggatatccgcctttgcttaattgattaagaacgggcaaaaggtatgcggcagtcttgccggttccggtctgtgccactccgatcaaatcttttccttcaagaatgaccggtatggtatgttcttgtacaggagtgcattcttcaaatctcatggcatctaatgcctgaagcaccccttcttctaaatttagttctgaaaatttcatatatatagttacttctttctttagagtttgccgcgttcttccaggtaagagtccttgaagcccaggaaatagaggacgccgtccaatccgatcgtattaatggactgttgtgcgttagccactactttgggttttgcatggaatgctatacccagaccggcttcggacaacatgggcaagtcattcgctccgtctcctacagcaatagtttgtgctatgtccacacgttctacttgagcgatcagtttcagcagttcggctttacgttttccgtcaactacatctcccagatatcttccggttaatttgccatttactatttccagttcattggcatatacgtaatctatgccgaatttatctttcagataattgccgaaataggtgaatccaccggataggatggctattttgtaaccatatcttttcaacacgaacatcagacgttccacaccttcggtgatgggaaggttttctgcgatttctttcattacgctttcatccagtcctttcagcaaagccacccgttctgtgaagctttctatgaaatcaatttctccacgcatggcgcgttctgtgatttctcgtacttggtcacccacaccggcgcgttcggctaattcatctatacactctgtctgtatcaatgtggaatccatatcgaaacaaatcaagcgtcgcatacgccggtacatattgtccagctggaaagaaaagtccatttccaggtcactgctcagtttcattaacgcctgttgcatctcttccctttggcggggggtgccacggacggagaattcgatacaagcccgtacattcgcttttcgttcatccaatggaatacgccctgtaagacgtttgatagcatcaatattcaaaccttgttccgccaatattcctgtgactgccgcgatttgtttggctgtcagcttgcgtcccagtaaagtcaggatgtaccggttcttgccttgcatgtttacccattcctcatattcttccacagtaacgggatagaaacggatattgatgcctaatgcggaagctttaaatagcaactctttcatgatattccctgaatctttttcctggcttttgaataaaatgcctaatgacagggtgctatgaatatcggcctggccaatatccaaaatggtaacatcatattttgacaaaatttccgtaatggaagcggttaatcccggccggtcaagaccggtaattctgattaaaataagttcagtattattattcat

SEQ ID NO: 90 - DNA, 9794 bp, unidentified
  source 1..9794: mol_type = unassigned DNA
gtgatcgcgcaggtcaacacggaagaacgccgtgcccgctttgcaaacgcctgccggggcaaaccggtgctgggggcaacgctgccgctggacctcgcgctgttcggcaaaagccagccctggcggttctacgccgggcccacgctggcgctggaactgagcggcagtatggcatggcttgccgggcacgcaaaccccgaagaactggccagctttctggccttctgcgggtgcgagagcgtgattctggacgaagcggaatgcctgccgccaaacggctggcagaaagccgaaatgctgaccgtgttcggccttgcccccggcaggacgctgccgctgcccgcagcagacgaagctctctgggagcagctgacccttgaccgggagccgcctgccatggcggtggcccgggcgctctacccggcggatactgcccggcaggaggatttttactccgaactgtgctcgaagcgcgcccgcggcaaagcccttgcatggacgctgcagcgggggagcgagacggtctgcactgtgggtgcctatgccctcgccaacgggcaggcctacatggcctgcgggcagacggcccggcctttgcgcggcaaaggcatcggtgggcgcctcatcgtccggatggcaaatgagcttgctgcagaagggtaccgcccggtttttctctgcagcccggaacgagtgcacttttatacccggctgggatttgcaaagctgggggagtatgcaaaatataacaattaaggaaccactataatgtcaattctgaaccactttttcgattacaaacccgaagttctggcgctggacgaaaaggccatggaactgtgccagccctacttccgccatatggaggagatccgcgattttaaccagctcaaaatgctgaaagcctttgcggatacccagatgtcctccaccgatatgctgggcaccaccggctacggcctgtgggataccggccgcgcaaaactcgagcagatctttgccgaggtgatgggggccgaggatgccctcgtgcgcagccagttccagagcggcacccacacgctggccgtggccctgttcggtctgctgcgggcaggggataccctgctggctgccaccggccgcccctacgatacgctggaaggcgtcattggtctggacggcaagggcaagggcaccggcaccctgatggattacggcgtgaagtatgacgaagcacccctcaaggccgacttcaccccggactacgacctgatcgcccagaaagccccgggggccaaggtgtgccacatccagcgcagccgcggctacctgcagcgcaatgcctttgatctggacaccatcaaaaaaatcaccgacaccgcccgcgccgcaaacccggagattatcatcttcgtggacaactgctatggcgagttcacccagacgcaggaaccgtgtcagatgggtgcggatatcgcagtgggcagtctcatcaagaaccccggcggcggcattgcccccaccggcggctacatcgtgggccgcaaggaccttgtggagctgtgcgcctaccgcctgaatgctccgggtttgggcaaggagctgggctgcacgctggaaacgccccgtgatatgtatctgggcttctactacgccccgggcgtggtgtgcgaggccatcaagactgccatttacgcccagtgcatgctggaactgctgggcaagaacccggtgccccgttactgcgacgaccacaacgacatcgtgacctgctttgacgcgggcactgccgatgccctgatcggcttctgtcagggcattcaggcggccagcccggtggacagctatgccgccccggaaccttccccggagccgggctacaccgatgaagtggtcatggcaagcggcagctttacgcagggcagcaccatcgagctttcctgtgacggcccgctgcgtgagccctacacctgctacctgcagggtggcctgaacttcgccgccagccgtgcaggcgtgctgctggccatccagaaagcgtattttaaggattgagtcaagccgatcagctctccccggtgcgggagagctttttgcgtaaaacagtagaaaaggggaaagtatatgcctgttttaagtggccgtgtgggtacgtttacagattccgtcatccgccgcatgacccgcatcaataaccagtacgattccatcaacctttcgcagggcttcccggactttgacccgccccagcagctgctggatgcgctggcaaagaccgcctacaacggcccccaccagtacgccgtgaccttcggcgcgcagaacttccgcgaagtactggccaaaaagaccagccctgccctgcaccacgaggtggatcccaacaccgaggtctgcgtgacctgcggcggcaccgaagccatgatggcagccatgatgaccatctgcaaccccggcgacaaggtgatgatcttctcgccgttttacgagaactacggggccgacgccattctttccggggcagagcccatttatatcccgctggttccgccgacttatgagtttgatatttctcttatcgagaaaggctttgccgagggtgccaaggcactgattttgtgcaacccttccaacccctgcggcaaggtgttccgccgggacgagctggaagccattgcaaagctggcgatccaatacgacgcctttgtggtgaccgatgaagtgtatgagcacatcatctatgcgcccgctgagcacatctgcatggccagcctgcccggtatgttcgagcacaccatcacctgcaattcgttgtccaagacctactctatcaccggctggcgtctgggctacctcatcgggcccgccgaggtcatcgagggtgcccgcaaggtgcacgacttcctcaccgtgggcgcggcagcacccctgcaggaggctgctgtggccgggctgcagctgccggaaaactactataaggaactgcaggccctctacaccgcaaagcgcgaccacttcctggccgggctggaccgggtagggctgaagcacaatatcccgcagggcacctatttcgtgatgatcgacatctcggacttcctggccctgccgcagttcaagggctggaccgacctcgagttctgcgagtggatgatcaaagagatcggcgtagctgccgtgccgggttccagcttcttccgggagccggtgaaccatctcatccgcatgcactttgcccgcggcaccgacgtgctggacgaagccatccaccggctggaaaagctggcagacctgctgaaataaaagtgggctcgccctctccgtcattgcttacgcaatgccacctctcccagagggagaggcaagaacgtaacggttaggcttttggcttttcccatgggagagccgtcgagcaaaagcgagactgagagggcgaggacgcttacaataaaacattgtaacgacacaacagcgccgcaggagattcttgtctcctgcggcgctgtttctttcccttacttctctatacacaaaactcaggccgttacgcggcggggcatggctgcgggcattggctccacaagagcgggatgcatcccctcgcggtagtccaggtcgccctgatccataccgcgcagcaagacctcggcggtggcaatgttggtggcaatgggtacgctgtgcatatcgcacaggcggagcagattctgctcggtgatgctggcggcatccgctttcagcgggtcacggaagaacaacaccagatccacttcgtcgcaggcaacgcgggaagtgatctgctgcacgccgcccagtttgccggagagatagcagtgcacgggcaggccggtcgcctgtgccagcatccgtccggtggtgccggtggcaatgacggtatttctggacaaaatggcgctgtaagcagtgcagaactgcagcgcaagctctttgcgggaatcgtgtgcaagaatggcgatggtcataatgctctctcctttgttctcagtatagtgttgtgagcggcggacggttttatacgattgaatgaaaagcaggtgaaatcgttatcaaattttccgatatagttttaccgcaccgatatagggcttgtcaagaggttttttggcatttttaccgtgtaaaaccgtgaaagtaatactttaactttgtgataaatgcagaattgttggatacaatcctccatgcaacagagcaagattttataaaaaagtgaaaacatgatccaaaaattgtttttcggatgaatacaacttgcacgcgaaaaacaaaaaagcagaccgaagcgggctgcatcggtctgcaggagaaaaaacttttcaaaaaattgtatcaagaaaggaacaaatggacaaatgacgcacgcgccggtcagcggatctgtccgttgccgtggatgacgtacttgtagctgcacagttcttccagccccatggggccccgggcgtgcagcttctgggtggagatgcccatttcgcagcccaggccgaactcgccgccatcggtgaaacgggtggagcagttgacgtagacggcggcgctgtccactgcggcagtgaacaggtcggcatgggcctgtgtctgggtcaggatggcctcgctgtggccggtggagtgctcagcaatatgcccgatggcatcttctacactgtccaccaccttgatggccaggatgtaatccagaaactcggtgtcgaagtccttcggcccggccggggtgcccgggatgagggccgcagcgcgcgcatccagccgcagttccaccgggtgcaggccccgggccgcgcggtccgggccgagacgctgcgcgagacgcggcaaaaactctgcggcgatggcagaatgcaccagacacacttcctcggcgttgcacacactggggcggctggccttggcgttctcgatgatgtccagcgccttgttcagatcggcagtgtcgtccacgtacacatggcagatgccggtgccggtctggatgcaggggactttggcgttctccacgcaggcgcggatgagcccggcaccgccgcgggggatcagcaggtccacatagcccacagcggtcatcaaggcgttggccgaagcgtgggtggtgtcctcgatcaggcacaccgccgtttcgggcagaccggccttgcgcaggccctgccgcagagcggtgacgatggcgtgggcactgcgccaggcttccttgccgcagcgtaggatgcaggcgttgccgctcttgatggcaagggcagcggcgtcgctggtcacgttggggcggctctcgtagatgatggcgatcacgcccatgggcacggcggtcttttcgatgaccaggccgttgggccgctccacccggcgcagcaccttgcccaccgggtcgggcagggcagccacttcccggatgccctgggccatggcctcgatgcgctgtttggtcagggccagccgatccagcatcacatcgctgatgtgtcctttggcggcagccatatcctcggcgttggcggcgaggatggcggcctgattctgtgcctcgcacaaagcgtctgccatgcccagcagggcggtgttgcgtgcggcgttggaagcaagtgccagcgcacctttggcgctgcgggcggcttccaaaatttgctgtgttgtcataggtcagacctccttatggcctgcaaaacgggtgcctgcgggcttgcctgcagcgatgtcgtacaaaagctccgggtgtgcgccgttggcgatgaccatgtctgcgccgctgccggtcaccatgcgggcggcacgcagtttggtggccatgccgccggtgccgagggccgaaccggccccatcggccagcgccatcacctcaggggtgatctcctccaccagtgggatgagctttgcatccgggtgggtgtgaggattggccgtgtacaggccgtcgatgtcgctcagcagcaccaaaaggtctgccttggcgcagcaggccacgatggcggccagcgtgtcgttgtcgccgatggaggtgatctcgtcggtggcaacggtgtcgttctcattgatgatgggcagggcacccagctccagcaggcgggaaagggtgttctggaagttcacgcgccgctcggtgtgctccacgtccacgccggtgagcaagatctgcgccacggtgtggttgtaggcgttgaacagccggtcgtaggtgtacatcagctcacactgacccacagcggcacaggcctgcttggtggtggtgtccttggggcgggcaggcagcgacagcttgcccacgcccatgccgatggcaccggaggataccagaatgacctcgtggccctcgtttttcaggtcgctgagcactttgaccagctgttcggtgtggcggatgttcagccgcccggtggcgtatgccagggtagaagtgcctactttcacaacgatgcgcatgtttccgttaaccctttcccatttccttcgttttattgtacgacgcgatcactgcgtccatcacggcaccccgcaggccgtgctcctccagcacgcggacgccctgaatggtgctgccgccggggctgcacacggcgtccttgagctcgccggggtgtttgccgctttccagcaccagctttgcgctgcccagcaccatctgggcggcatattcctgtgctttggcacggggcaggccgcaggccacgccgccgtcggccagtgcctcaatgaactgatacacccatgccgggccgcagccggaaacgcagctggccgcgtcgatgaggctttccggcacagcgtccagacggcctgccggggccatgatcttcaaaaattcctgttcttcctcggcggtgacattggcagagcaatactggatcatgccttcgcccaccgaagccggagtgttgggcatgatgcggatgactgggaaatcttcaccggccatctcctggatgcgggcgatggaaaggcctgccgccatgctgcacagcacgaagcgccccgggcgctcgtccagcgtgaacttgagcggctggagcagcgcttccatcatctggggctttacggccagaaagattagatcacaccccccggccacttcggcgttggtggctgttttgcagcccagctccttggcaagggcctgcgccttggccgcggtgcggtttgccagaaagaccttcttcgggtcaacggccttgcacacggcgcgggcgatggcaccgcccatgttgccgcagcccagaaaaccaatggtatccatcataaatcataccctcccttatggcaggcatttcacgtctgcttgctcccattctaagcgcatggaggggtaaaatcaagggcctttgctgcatttttgctcaggctcgtggaattgacgattccggggccggaaggaaaggctttatttggctgaagtgccctttgcggcggcggaaaacagcatggcagccataccgatgccgtatggcacacttcacggaggaacccgacgttttgcgatgcagggtggaaaatcttacaaagaattcaaaaaacagcccaaaaggacacttgaaatactgtgcacttttgcggtaaaataagatatggacaatcttctcacgggattcaaccgcacacggcagggagacactctgccgggaaaggatggtttttgtgtcacagacaaccaaacgggcactggaggcatcgctgaaaaagctgctgctggaaaagcccctgaacaagatcacgatcaatgatatcaccgaggactgcggcgtgaaccgcatgaccttctactaccatttcaaggatatctacgacctggtggactggattctcgtggaggatgccgcgaaggcgctggaaggccgccagagctttgagacctggacggaagcttttctggacattttgcaccagatccaggagaacaaggtgctggtgctgaacgtataccgctcagtggggcgggagcaggtggaacagtacttttataaaatgttggacccgatgctgaaggactttgccgaccgcgagtgccgcgatatcaccgtgcaggacgatgacaagcagttcgtggtggatttctacaaatacgcgctggtgggcgtggtgctggaatgggtgcgccgggacatgaagaccgacccggcggtgatcgtggaacgtatggggcggatgctgcagggcgatatgcgccgggcgctgtgccgtctggccagcaacaaaatacacatggtgcaggagaactgaacgaaggcctgcgcggcaaaattttatcataatctgcgccgtgatgggttttccatcacggcgctttttctgtttatggcaggtttgccttaaaaatggtatgatgtcagcaataaaaaaggatttccgaacatatcgcttggaggaaaaggataatgaatacttcgattgagaatctgacacataaaatgcagcgcgccgccgtcggcaagatggtggacgtggtgctttctcatgccgataaagatcgtcagaagaccatgggccagctggtggacgtggcaaagcagttctacggcggggccttcagcgatgagacctacgagcacgcaaagcagaccctgaccgacccggacagcaagtggtccaaactgatcaactgcgtgctggaccagaccgaccccaatgtggcccgcaccatggcgctgaacctgggctacgaggccttcttccgcggcaccaagatgatccgcgagaaccgcgtcaagtaccagtgcaacatcccctggctgatcctgttcgaccccaccagcgcctgcaacatgcactgcgtgggctgctgggccggtgagtacggccataagaacaacctcagctttgatgatatggacaagatcatcacccagggcaaggagctgggcgtgtatctgtacatgctgaccggcggcgagccgctggtgcgcaaggccgatatcctcaagctggccgagaagcacaacgatgtgcagtttgccatctacaccaactccaccctcatcgacgagcccttctgcaaagaggtggtgcgtctgggcaacatcgcctttatgctgtccatcgagggcaccccggagaccaacgacgcccgccgcggcgacggccactatgccgctgtcatgcacgccatggacctgctcaaggagcacggcatcgtgttcggcacctccatctgctacacccgcgacaacatcgaggccgtcaccaacgacgagttcatgcgtttcctgtgcgagaagggggctcactttggcttctacttccactacatgccggtgggcaacgatgcggcgccggagctgatgcccaccccggagcagcgccagtacatgatcaagcgcatccgctacctgcgttcctctgagtgtgatatcccgttctaccccatggacttccagaacgacggcgagttcgtgggcggctgcattgccggcggccgcaactacttccacatcaactcggccggtgacgcagagccctgcgtgttcatccactactccaatgccaacatccacgaccagagcattctggagatcctgcacagcccgctgttcatggcttaccacaacggccagcccttcaacaagaaccacctgcgtccctgcccgatgctggagaaccccgagctgctgcagaagatggtgcacgagaccggtgcccacagcaccgacctgcagtcccccgagacggtggagcacctgtgcgagaagtgcaagagctacgccgccaactggcagcccaccgccgacgagatctggtcccacaccaagatccgtgagagccgctacgagaactataaggactggaagccctcgcagcccattgaaaagtaa

SEQ ID NO: 91 - DNA, 12484 bp, unidentified
  source 1..12484: mol_type = unassigned DNA
ttatttgttgtcccgtaagtcttttaccctgacggcttttccttcgctctgcggcaaggaacctttctttaccaaccgtaacttcggagttaccagaatctcgtctttcagctggcgggtaatggctttgctaatcttttgtagctcgatgtaattgtcagtagagaggtcgctaagttcaacttccacaatcatctcatcctggttattgaccgtttcgagcgtgatgaggtaattgctgcccaattcggggaattgtaccagcaccttttccacctgcatggggaagatattgactcccttgatgatgaacatatcgtcgctacggcctttgatgcggtctatacggatgtgggtacgtccgcaagggcacttgccgggcaggatgcgggtaaggtcgcgtgtacggtagcggatgaggggcatcatctctctgtccagcgttgtcagtaccagttcgccgatttcaccttccggtacgggttcgccggtttccgggttaatgatttcgaccaggtagcaatcttcccagaagtgcatgccgtcttgttcggtgcactcgaaggctacgccgggaccgttcatttcagtcataccaaagctgttataggctttgacgccaagcatgcgttcaatctttctgcgttgctcgtctgtgtggggttcggcaccgataacaagcgttttcagacttgtgccggcggggtccatcccttcttcctggaatacctctgccaagcggatggcatagctgggaatggcatgcagggcagtggtcttgaagtcggtgatgaactttatctgacgcttgctgtttccggcagcggcaggaacagtcagcgcacccagacgttcggctccatactgaaagcccagtcctccggtgaacatgccgtaaccggagctgttttggaaaacatccgtcttacggatacctaccatatagaggcagcgtgccactaagttagcccaagagtccaaatcgtgttgggagtgtacgatgaccgtcggcgtgcccgtagtgccactggaagaatggatacgtactccgtcctcacgcatatcgcctgctactaatccaaaaggataattggcgcgcatatcggccttggtagtaaacggtatcttacgtatgtcttctatagaccggatgctgtcggcagtgatgccatgctcttggaatacctttttataataaggagagttggcggcaatgctgacagtcttttttaaccgttgcagttgcagttcgcgcaactgctcacggggcatcgtttcaatctcttcttcccagtatttgttattcatggtatgttgaaatttagagtcaattatagtttacatcagtttttcagcaatctctttgccggcagccaacgctttgaggttcagctctacaatggcgtcgcccttgcgttggaagatttcgcggatgctgtcttgcacctttgcgtagtcgatgccgaggaaggggatggtggcgcccagcagtacgatgttcgctacgcggggagagccgacttcttttgccacttcgtttacgttcagcatgattttatgcggcagcttgttgatttcggccttgatgtcttcttctgccggatagttgggaatgttgatgaagggggcttcattggtcaccagccaaccttcggggctgaggtaggggaggtagcgcagtgcttccatcggttccagggagatgatgaggtcgcattttcctgtgggaatgaggtccgaagcgatgggttggtcgctgatgcgcaggttggactgcacgtcgccgcctcgctggctcatgccgtgtacttctgcctgcttcatgtagagtccgtccttgagggctgctttgccgattacggtggcgatggagaggataccttgtcctcctacgccggaaagtatgatgtcttttttcatggctttacttgtttctttttttgcgtgctaatgtttggatacattctctgcgggggatgatgacggatacgccgtggtgctcgatttcttcccggatgatttgcttcatctcttcgtagtttttcttcaagggcactacgacgcggatgtgttcgggagctacaccgatgccggcgcagatggcttccagacgtccggtgccggcagaatcttgtcctccggtcatggcggtggtttcgttgtcggagatgacgatggtgacgtcggcgttttcgttgacgcaatccagcagtcccgtcatgcccgagtgggtgaaggtggagtcgccgatgacggctacggcaggatgcaggccggcatccgaagcacccttcgccatggtgatggaggcgcccatatccacgcaagagttaatggcgttgaatggggcattggctcccagcgtgtagcaaccaatgtcgctgaacaccttataagtgggatattcttctttcaatacttgggtcagcaccgtgtacatgtcgcgatggccgcaaccctcgcacaaagcgggcgggcgcatctctaccagagaaggaacgctgaattcagccttgttctccttgcctacggcacgtgccacgctgtccgggttcagctctccgtctcgtgaaagagtgccgtccaaacggccttttactttgatgccgatgcccagatagcctttcagctgtttttctacgaacggttgtccgtcttccagtaccagaatctcgtcacatgcttctaccagctgcatcagctgtttcttgggcaacgggtattgtccgattttcagtaccggatattcgcaaccttcgggatagttctccatcaggtagttgtagccgatgccacatgccacgatacccagctttttgttggggccgtcggtatatttgttgtaagcggagttttcagaagctttgataaattcgtcctggcgttgcagcaatgctttgtaacgtttgcgtgcattacccggcaggaggatgaactgacgcgggtcttcgctgaaggaaatctcattctgcggttgttgctccttgcgctctacgccggaacgggagtgtgccaggcgcgtaaccatgcgcatcaggatgggttcgccggtctgttcggagaagctgaatccgttgtacgccatgtcgtatgcttcttgctggttgcttggttcgtacatcgggatgagggagaagtcgccatagaaacggctgtcctgctcattctgtgaagagtgcatactggggtcgtcggcagcaatgactatcagaccgccttttactccggtaatggcggaattgatgaaacagtcggcagctacgttcatacccacgtgcttcatgcacaccagtgaacgcttgcctgcaaaggacatgcccagggcagcctccatcgcagttttctcgttagagcaccagcggttatggatgttcttttcggcagtaatcggtgccatctgaatatattcggtgatttccgtagaaggagtgccgggataggcatatacacccgaaagtccggcatctaatgcagcttgtgcaatggcttcatcgccaagtaagagttgcttgctcatatctgaatatttaagtgttagtcatggattaatatttgacgcaaatataggattttgcttttattttatcagcaaattacttaaaaatctttctttcgtttaatgcattccaatattttcttgcatttttcatgtgctcggcataattggatgcaaagttatgggtgcccgagaagtcctctttggcacacatatagaggtagttgtgtttcgtataattcagcacagcatccagcccgatgggtgaggggatgcgtatgggaccgggaggtagtccggtgttgagataggtattgtagggggattctactgccagatgggcattcgtaattctccgcaagccgaagtcctgcaaggcaaatttgatggtagggtcggcttgcaggggcatgccggtgtgcaggcggttgatgtagagccctgccaccattggtttttcgggattgttgtttgtctcttcctcaacgatggaggcgagggtgcagacttccgtcagggtcattccgatggcggtggctttgtctaagcgttcctggttccagaacttctggtgctctttttgcattctttcgaagaactcttctgcactcatgtcccaatagacttggtaggtttcggggatgaagaggcagggcagggtctctttgttgtatcccagtttttgttggaatgcggagtcgttcatcaatccggctatttcggtggagtctatcatgagctgtttgcctacgctgcgtgccagccggtccagtgtgcgtacgctgccgacggtgagattcgtaggttcttgatatccgcggtacagacggctgaatacgtgatatacgttttcccccggccggatggtgtagcgtccggtgtgtatattttcggaatatttcttgtattgggccatccagcggaagccggtgaagcttcgaggatggccttgttgttccaccttattatatatggagtcggcggtgtcgtcgcggtctatatagatatagactgtctttttcggatggaattgcggggcaaacagatagtagtatactgttcctgcacaagctgctccaataagaatcagtgcgacgaatgttccgataatgattttcttcttttccattttgttttactgcatctttagtcgggcaaagttagtaaaaaatggagtgaaaaccatcaagtcatatcagttaattcgatagctgacaaaggctatgcgtttgctgtccggtgcccatgagttgacattgatggtgccttgtccgccgaaaagctttaacaatgtcttgggttctccaccgtttgcgggcattaggcgcagctctacgttcttgtttgccaggtgctctcccggttccaggtcacctttgtagtaggtgatgaatacaacggattttccgtcaggggagatgtgggggaaccaggagttacgggtttcgtcaaaggtcatctgggtctgttcggagccgtctgccttcatgcgccagacttgcatgagtccggtgcgtacggaattgaaccagatgtattgtccgcagggggaatattccggtccgtcatccagaccttcggcagtggtcaggcgggtttcttcacctccttccgccgggatggtatagacgtcatagttgccgtttcgttcggcgcaataggcaagctctttgccgtcggggctccaaccgtggaggtagctgggagccataggtgttattaaacggggagtgccgcccgtgatgggaagtgtataaatgcgcgatttatagtcttctttcgtcccgtggctgatggctatctgctgtccgtcggtcgagaggacgtggtcgttgttgcagttttgggcaaatccggtgtttatcagttccggttcggcaggcgaggtgggggaaaggcggtaaagctttccttcgctgttgtatagcagccattgcccgtcgggcgtccaattgggagcttcaatccggtagggaaattcttttacgacggtccggttaccgttggttacatccagtatttcgaggacgctggtaatctcgtttttttgttgagcggttgcggtcagtgcaacagttgcaaagaaggggattagatagggtttcatgttcatatcgtatttaataaatctccgcaagatacattttttattggaaactacatagtcggagcatgcttttttcgaagagaatctgtagtgatggtcgaatgcgtagtgcttatcatatgaatagtctccgggattcttgaaatagttgtccacatactgccagttgtcggtgtcgagcggcgtgtgcgaagtcatgtacgatagggagcttttgtctctactatcttgctgtccagactaatcaggtctttgcctaagcggacaatgcgggcatgtagtcggtgccgacttccccctttccgcctccaccgaatgacaaccatcctgtaccttcgtcatctatcacggcacccgggtcgaaaggagccctgcagtggcctaatccttgggtgaactggctcaccagcatacgtcttaccgtccgattccacccgcgatacgatggatggcgcccatgaggctataccccatggcgagagggcctttacgtcaatcagtccgtgataagtccaatttaccatgtcatcggtggacagcatgaccagtgaatgggatgtattggtatgtgtttttgccgtcttttcccacactgtccagttgctgggtgtcattggttccatacacatagagccttccgttgtattccaccgatgtcgggtcggccacaaaaatgaaatccaacagcgggttggcgtttccactgaagaattggggtgattctaccggacgcgtgtctttctttcttgaatcggaaagcgcccacacatcgtttcctgcggatatagccgccagcagcaaagccgctgtaaataatttgattcttttcatttgtttatagtatgttatagaaacctatggtagccttttgattttggcttgtgttcttcaatcacctcaatcctttatttaagattgaaaaatcgggttattgaaaagttgccgcaaatattgggaattactatgtataatataaggtgtattatgtttttaataatgtgcctatatgtttcaagttatcattgtaatcagatggtgctgttttaaacttgctttacttgctttgggataattatgcggctatggattaaactgtttggaagggcattatgttttatgcaaatatattggtagaagagcgtttttttattctaacgattcttgaaaagaaaaagcactgattattccagataatcagtgcttgaatatcgagccgctagccagacttgaactggcgacctacgcgttacgaatgcgttgctctaccaactgagctatagcggcaataagcttttgtttacggggtgcaaaggtacatctttatttgaaaaggcaaaaagaatctctgttttttttagaaatattttagtgggataattttctatttgaatgtcctgaactttattgccataaaaattggataataaaacgaaaagaagcatctttgtcgtaggtcctatagcaagtaagtctgatactgattatgaatttaagaatctattataaatatctttcttcacgcatagcgtccaaatggacggtgctgttggtagatgtaattatcgttgtgatttccatgctttctgcatgttttttgcaatataggctttcgtccgtatcttatgaaatttctttatatgtatggctgaccatttgggctgtcttgtgtaatatctgtttctttcatattctccgtacttatgtgggtgttatccgtttttcctcttttgtagatatttatcgtgtgttttggagtcttacgataagctatgctgtactgtttttagggaattactgttggtctgtttcggggcttggagaaactttgccgaacagcattctgtttatagcatatatgttcaccttctctctgatggcttgtatgcgcattgctgtgaagatgctttatgaagctattgcttttgatgcacgtcattgcgtgaatgtttttatttatggattccatgggactggagtcaatgttgcaaaatccttgagagttagtcgtaataatcattatcgcctgcgtggctttatttcggacgaacctgatatgataggtaaacatacgatgggatgcagggtatatcccaatgatgagcagctgtttgaccgtctaaagaaaaagaaagtggatacaatcattatctctccaagcaaggtgtcggatttggaaaattccggaatgctggataaactgttctctcatgatattcatgtaatgaccgttcctcccttaagcgattgtatggacgatggactgataaaggacattcaaatagaagattggctccgtagagaaccggtacaagttgacgtgcgtaaaattacggcccatatcgaggggcgtagagtaatggttacgggagcggcgggagctgtaggaagggaaatcgtccgccagttggctacactgaatccttatcagttgattctggtagatcaggcagaatccccattgtatgatgtacagttggaattgtctgatcattggaagaatctggaggtccgtgtattggttgcagatgttgctaaccgtacgcgtttggaggctatatttgaagaaacacgtcctcaacttgtttttcattctgctgcttataagcatgtacaactgatggatgattttgtgtcggaggcaattcaaacgaatatatcggggacagtgaatattgcagacctggcggtaaagtatagagtgtcccgtatggttatgatatctgctgctaatgcacgtcatccggaaaatgctatggaatatagtaagcgtgtggcggaaatatatgtgcaatcatctgattgcaggttgaaacgcgacacaggggaaactgatatgttcatagtacgtttgggtgaggtgtatccgacgaatactcattgtttgattaccttgtctgaagcttgtatgctcaccctggaagtgggagtcatgggggatgggggagaagtgtacattgtgggagggcctggggatggacttttggattctgtaatcagtgaaaagataaagcgtgaaaaggcatctgttgatgattatgaacatgtgcgggaagaagtgctggccttggtgcaacatagttatactgaaaaaaaggctattttgattggactaatgaaaaaaatagtgccaattttcccgctttcttctacccaatgaaaagacgtgaaagtgacagctttttaatgctttttctgaaacttagaggtggaataaatgtatattataaaaataatatattacctttgtgcccgatttatatttattacaagaactcaaaagattaatcagaatatcttatgcgtagattaataacactattctttttggtatttactttgtcaggggtagcttttgctcagcagatgtcagatgatcaggttgttcagtatgtaaaaagcgctcagcagatgggcaaaaatcaaaagcagattactactgaattaatgcggcggggagtgacaaaggaacaagttgaaagaattcagaaaaagtatgaaaactctaaatctggaagtccgcagagcaatacccaagatgagaagcgttctcgtcaacgtggtgaaatgagtggcgtagtcaaagggctgcgtacaacttcggaaacttattctgccagacaaacggatgttgcaggggattctttacaaatgatggataatcgttccttgtctcaagagaaggaaacagaggatccgacttcgcaaatttatggtcataatatttttactaacgataatttgactttcgaacccaatgtgaatgttgctactcccgagaattatcgtctggggcctggtgacgaggtgattattgatgtgtggggagcttctgaaacaacgattcgacaaacaatctctccggaaggaagtattcttgtgaataatttaggaccggtttatctgagtggcaaaactgtaaaggaagccaataattatttgaaacaagaatttgccagaatatattccggagtaaccggaaatgttccgtctacccaagttaaactgacattaggagaaatacgttctattcaagtaaacgttatgggtgaagttgtggtgcccggaacttataccctctcatcatttgcttccgtatttcatgctttatatcgtgcaggtggtgtgaacccgattggtagtttgcgcagtattaaagtgattcgcaatggaaatacaatagcggatttggatgtttacgatttacttatgaaaggaaaaatgaaggatgacatccgtctgcaggatggtgatgtaattcttgtggatccttaccagtcactggtacagatattaggtaaggtaaaacgtccgatgttttatgaaatgaaacccactgaaaccgtaggtacattattgaagtattcaggtggttttacgggtgatgcttataagaaagcattacgtataatccgtaaaagtggacgtgagcatcaaatttataatgtggatgagatggattattccgtattccgcgtagatgacggtgataagataacggttgattccgttttacagcgttttgagaatcgtgtggaaatccgcggtgctgtatatcgtgaaggtttgtatcagttggacggtacgatgaatacagtgaagcagctgattaagaaagcggaaggacttcgcggagatgcattcttaaaccgtgctataatcgatcgtgaacttgaagacttgtcgcatgaggttatacaagtagatgtgaaaggtttgctgaacgggacggctgcagatattcctttgcagaagaatgacattttatatattccaagtattcatgacttgaaggaagaagctacacttaccattcatggtgaagttgccaatccgggtacatatctctattctgataaaatgacagtagaggatttggtgttgcaggctggtggcttgttggaggcagcggctacgacgaaagttgaagtggcacggcgtatgaaagatacgaagagtacatctttcagtactacagtaggccagaatttctcttttgatttgaaagatggcttattggtgggagaaggaagccaggatttccatcttgaaccttttgatgaagtttatattcgtaagagtccgtcttattttaaacaacagaatgttatggtgggaggagaagttctttttagcggtaattatgcactatcgaaaaaaaatgaacgtttgagtgacttgatagctaaggctggtggagtgactcccgatgcttatgtaaaaggagcgcgtcttattcgtaggatgaccgaagaagaatttcgccgtaaagaagatgccctgcgtatggcgcaagcgggaggtggagattccatatctgtaaaaaaattggatttgtctgatacctattctgtaggtataaatctgggagaggctttgaagaatcccggttcagatgctgatatggtgcttcgtgagggagatgtgttatttgttccggagtacgtaagtacagtgaaaatcaacggtgctgtaatgtatccgaatacagttttatataaaaagggtgaaagcttgaaatattacatcaatcaagctggtggttttggtaatgatgccaagaaacgtaaggtctatgtaatatacatgaatggtacagtttctcgtttaaaagcagggaacaagaaagccattgaacctggttgtgaaataattgttccaagtaaagaacagaaaaagaagatgactactgctgaaattctgggaatgggaagtacgacagcttctattgcagcgatgattgcgactatggttaatctctttaagtaatttgaattatgagcgaagaaagaatacaaaacataacctctccacaacctgaggaacaagaaatagatttgatagaactggcccagaaagtatgggctagtcgcaaattggtttttaaggcgtgtggtatcgctgctcttgtaggactggttgttgcatttagtattcctaaggagtactctacaagtgtgacattggctccggagagtggtggcaaatctggtggtggaagtatgggagcccttgcagccatggcgggtatcaatttgggcacttcttctggtgaggatgctttgtcacccgaactttatcctgatattgtaagttctactccttttctgattgaactgttcgatgttaaagtcaaggatcagaaagcaaaagtagacacgactttatatgcttatttgaaagaagaacagcgttctccttggtggagtgcaattttctccgctccttttaaggtgttaggatggacattgtctttgtttaaggatgaaccggaagagggggacgcaaagctggatccttttcgtcttactagagatgagtctgccattgcagatgctttaagtaaacgtatctctgtttccgtagacaaaaagacaggtgtgacaaccttgtctgttactatgcaggatcctttgatatctgcttcgctgacggataccgtgatgcattgcctgcagaactacatcacagattatcggactaataaggctcgtcatgatttggcatttaccgaaaaactttatggagaagcaaaggccagttatgaggatgcccagaagaaatacgcaaattttgtagatgcaaaccagaatataatattactgagttatcgcgcagagcaagagcgtttacagaatgaaatgaatttagcctatcaagtatatacacaagtgtctcaacaattgcagatggcaagagctaaggtgcaggagattacaccggtatatacggttgtccagccggctacggtacctttgaagcctgcaaagcccaataaattgatgattttgatcggcttcatgttcttggcaggtgtcggcagtgtgggatggatattatttgtaaaagatttattaaagggatggaaaaagcaaacaatatga

SEQ ID NO: 92 - DNA, 6612 bp, unidentified
  source 1..6612: mol_type = unassigned DNA
ttcctgaatccgctttacatcacaggcacgatagcagtagaacggcggcacagccagatttccttttggttcctttggcttttcctcatagctcgtaatcagatccgagttatcgagcgtgatgattgctgttttctgctgctttttcagttcgttttcctcatggcacatcacacaggaagtattcttttccttggcaaaatcaacgaactttgaaaggctgaaatccagcacattatcgccagccataaccagcaaatcatcagccagattcagcttttctaccgccagttgaatatctttgactgctcccagacgagtttcattggtgcttgtaccatcgtcgatcacagtaatctcataaggccgcgtcttttgcttattacttttccaatcctcaaaatgctgtgcaaacttgtggttggaaatcaccacaaattcgtcaatgtcggtggtgtccaccagatcatccaccaaccaatcaaggatggatttctcgcccactttcagaagcggtttcgggaaattctctgtcagcggataaagccgtgtagcatagcccgctgccaaaatcaaacatttcatctatgtactctccttatagttccacgccatcggcactctcacacaaatggaaactatactttccattcagtgctgggaacgctttcagatactctgctgtcaccctcgcttcaatatcttcggccttgtccgggtcaatcaatgccatgcagcaacccttgaagcccgtaccagagaagcgcccaccgtagataccatcggtatcggtcatgatctcatacagttttttcagttcatcgcagccacactcatagctataaatagaggattttccgctttcaaaaacaagctgaccgtagccctccaaatcacctttacgccacagttctgcacccttttcggcacgagcgaactcactgtaatagtgctctgcacgtctgcgccacaactctggcaaacgatctttataggcttcaaagacctcaaacggtacatcacggagccgggtgtttgcaaaggtatcgtagtccatccctgcatagcccatcagtgcataggccgctgccttgcactcatcttgccgcagattgtacttagagtttttcaaagaacgttccaaaccagagaagaaaattgcaaccttgtagggcttcatcttctcgctggtagggatcagttcatagctgtcatctttcgtgtcgaggtacagtagatggtttttcttagaaagaacttcgcagctctggtcgagcttgccgcaagaaacgccaacatactggttttctgctgcctttgcggtgagaatcatttccatcggcttcaaatggatgccattcactttgcacagtgcagacaagaagcaaataatgaccgaagccgacgaggacaaaccgccaatcggtaagctgccttcgatgatacctgacagaccaactttcaggcggtacttttctcccagcatctttgcagcaccacgcagatgatcagcccagtcaccctgcttttcatccggcactgcatttacaaagaactgggcacgcttcgggaagttcaacgactgcagttccaccacaccattctgtttcgggtggtaggccatgtggattcccttgtcgattgccagaccattgatttttccgtactgatggtcgatatgcgcacccagtggactgatgcggtacgggcagaacgccacatcaaacggttcttgatgatataattccttgtaaacctcaacacacttcatcagacttttctatcctcaacaaattcagtataagattggcggctgccctttcttttcaacaacacatcggacatagccttcccacttttgaattatttgtgtccattctttagatgcaaagtacgcgtctatatcactatccaaatcaaattctggcatataaacgcccagcacacctttttctaatatgccttcttctactacgcccttttctcttataattaataccggtagtcccaactgaaaagccatcgctggttcaatttggcaatatggactcgtcagccactgatttgtcaaatcgtacgcattttcgcctatatcgctatccggttttcccgttcctttcacaattaagcttcttctgaatgcgattgctatcaatccatttgattccagcaacaatcttcttattgctgttagtggggcatccatatcataatccgtcacgcctaatgttcttggttgcagccctctattttctaaataactgacaactttttctataaactgcttttgcttttctaaataaggctttggatagctcaaaaagacggaatctttcatttgcgtcctccagttacatcttataaaaatttgcataccactcagcaaacttccgcaagccctcgcgcaaactggtagagggcttatatccgaagtcacgctccagcgcactggtatctgcataggtcacaggtacatcaccaggctgcatcggaaccagtttcttgtgtgcttcaaagtcgtaatcttccggcaggacaccagcacggatcagttcttcctgcaaaatctgtacgaagtccagcagattttccgggttctgattaccaatgttataaactgcatacggaggaacgggcagaccatcttcaccatttttacgttccggcgcaccctgcatcacacggacaacgccctcgacaatatcatccacataagtaaagtcacgcttgcagttaccgtagttgaaaatctgaattgtttcgcctttcagcagcttgttggtaaagccgaagtacgccatatccgggcgaccagcagggccatataccgtgaagaaacgcagacccgtggaaggaatgttgtacagtttagaataggcatgggccatcagttcatttgatttcttggttgccgcatacaaagataccgggttatccaccttatcatccgtactgtaaggcacttttttattactgccatagaccgaagaactggacgcataaaccaggtgttccaccggggtatgtccttcatcgtaagagtgacggcaggcttccagaatgttatagaagccaattaggtttgcttccacataggcatcaggatttgtaatggaataccgaacgccagcctgcgcaccgagattcaccacgatttccggcttatactgctcaaagatagcttcaatcacagacttgtctgccagattaccttttacaaaactgaaattttcaaactgctccagttcattcagtcgagcctctttcagccggacatcataataattattcatattatccaggccaacgatcttgaccccctccactgtggagagcagccgctttgcaaggttcgagccgataaatccagccacacctgtgatgaaaacgctcttgtttttcagatcaattttggtcttattttccatcataattttcttatcctcccttgttgaatcccccacttatttcattatacggcaacaagcctgtatacagattgcagccacaatccatacgcaggcctgtctttttattctccacgccccaacaagcacaccttaaacgtcttaaaaataatcttccaatccactaaaaagctacgttctttcacgtatttcacatccaaatccatccactcctcaaaagagaggtcattgcggtgcggagcgatctgccaatagcagctcaggcccggcgtcacatacaaacgctgcttctcataatccccatactgctccacctcgcggggaagtgccgggcgggggcccacaatactcatgtctcccttgaggatattccagagctggggcagctcatcgatgctggtcttgcggataaacttgcccacacgggtaatgcgcgggtcgtccttgattttgaacaccggaccatccatttcgttctggtccagaaggtcgtccagttttgcctctgcgttcggacacatggaacgaaacttgtagaacctgaacggtttgccatctcgtccaatgcgctcctgcgaaaaaataggcccggcagaagggtcatctaccacgatagcgatagctgttgccagcatcactggcgacaacaccaccagcgccagtgccgataagaccacatcctgcgtccggcgtccgacccaatataaccgatgttcccgcagattctgctttcggtcgatgacgaccggcttttcaattccaattacttctgtactcatttttacctcttcacactctgtattttctcgcacgatccccgctgcgcgcattcttacccagcctttgctacgggttccttttccattaccgccccatcaaacaattcttccagtaattgtttctggtccgcacttaatttgggagagttatctcgcagcagccgtttttggtcatatacccaccggctcaaccagatgccatccgcagttttgtacttggccgggattttcagatttccatgagccttcttatatttctgcgccagtttataccggtgctgccacgggtcaggcttgtcccactgcatcccaatagcattcagccgtgcgatgcgttccggtgtcagcacaccacaccctttatcggggttcagccgcgtgtaccgctgccgcttgacccaattcccgaggttgtaaccgcccggtgacacatattctgccgggacgttcagatcaccgtgggcatcaaagtagcactttgcctcctgatagccttcgttccactggcgatcattgcggttgccccagtacatcccgatccggttgagtcgttcgacctgctcgtccgtcagctttcctttcgggtacgcccattgctgacttgtgacccattgccccagccgttcaccagccgctgtcacataggaacgtgggatattcaggttgccgttttcctcatagtaggccgcagccagcgcataagctttttcccacttggcatcaaaaacactccacaccatgccgatctcatcaagctgcgcaatgcgttcttccttcaaattgccattcagcttctgctgccgtgttttgatgagccacttgcccagagggtagccgtccgggtccacatactttccagctaccatcagattcccataggtatcatgatattttttcgccttctcaaagccacgctgccacgcgctctctttctgatttccccaggccataccaatgctgtccagccgcgcgatctgctgttccgtcagatttccggagactctcccttcgcgcaccccgcgctgtgtgacgagccacaccccaaggctcaggccagcaggtgtcttatactgcttcggcacttttaagtcgccgtgttccgcatagtagatgcttgcctcagagaaatagtgctcccaactggaagaaaggctttcctgcagccgttcaaacagtatccggcagtcatgcacctgctcgatgacctcgaaccgctcggtgacgatcttgtcaccctcgccgttggcatacagacggtggacggcctcctgcatctcgctttgcagaccggaaatactggtcaagccttcaaaattgttgaccacatcgagaatcagcggagctgcggtatccccagcggtcagggcgcgtccgatctgctgcttgtagataatgggcgaaatcgtgggcctgaacaggatgaccccggaaatcccctccacatgaacgccctcgttgagcatgtcgatgcagaacagcagcttcagccggttgctggtgtccgttttgaagtccacaaaggccttatcggtgttcgggtcatccgagtaggcttcgtacaccacaacatctggattgacccctgcgaaccactccggcacgtgggataccatctcgtccatgtgctctttgttggcgcagaacacgatgtattttccagatttgtttgtaatatgatgggcaaagaccctgtccaagccgtctgcctgctccagtgcgcggcgcaacgcgtccagatatttctggttcacatcctgaatgcccggtgtccgcaggttgtccacccgtgcctgatactttgcaagcgctttctggtactgataaacggtcgtcacgtattttggcgcaggcaaaatgcccctgacgactgcttcgccaagggtcatgtcgctcgcaacacggttgtcaaaaagctcttcggccatgtcgcggttattatccaaatatcggatgtttgtcgccgtcagcccaagaagttttgcgtccgggcataactttaatagagccaccgtgctttcgccccagcattccgcaccggcacggtggaattcatcgagtataatataggcgggcttctgcgctgctatttcgcccagctgcgcctgcgtacagcacatcagtttggcgtaggtgtaaaagtgaacattttccaacggaaactccgggtcgttccttttcaggctctctagctgggtcttaaagatatactcactgggagaaagccagatcacgaccttctccgggttgtcctcgatcagcttgaacgcaatatagctctttccggtgccggtgggatgaacaatggcagccttgccatactgctccatcatccggatcgccgcacgatatgctttttcgttgtgctcaaacagacgcaatgccactctgctcaccccttcccgcaa

SEQ ID NO: 93 - DNA, 6539 bp, unidentified
  source 1..6539: mol_type = unassigned DNA
gcaggctttagagaagtctgcggaatggagtacgatatgaaaatcctgttggtaattgaccagttcgatcagggaaataacggaacaacgatcagtgcgcgtcggtttgcccaggcgctggcggcggatggcaacgaggttcgggttgcagcggcgggaaagcctgcgagaggcaaatatccgatgccggagatccattttctgccggttgcggattctattatcagaagtcagggcatggtgtttgcaaaaccgaaccgcagcgtactggaacaggcgattgcatgggcggacgtggtgcattttatgatgccctttgcgctttcccgtgtcggactgcggattgcaaaggaaatgggcaaaccggtgacagcggcattccatgtgcagccggaaaacattacatcgacgattcatcttgggaaaaataaaaaggccaatgagcttttgtatgaatggttccgagatgatttttataatgaatttacgcatatccactgcccgagcccgtttatcgcggggcagttaaaggaacacggctatcaggcaaagcttcatattatatcgaacggtgtatcggatgaattttatccgcgcgtgcgtcaaaaggagccggagctggcgcataaattcgtcattttgatgattggacgttattcagaagaaaaacggcaggatgttttaatagaagcggtaaaacgatctgcacattcccacaggattcagctgattttggcaggacagggaccgaaggagcgcagcctgcgctggcagggaaggtcgctgcgctatcctccgatcatgggattttttgatacggagcgactgtgcgaactgatggcgatgagcgatttgtacgtccatgcggcggacgtcgaaatcgaggcgatcgcatgcctggaagcggttgcgtccgggctggttccggtcatcgcggattcgccgctttcagctacctcgcagtttgccctcgatcacaggagtttattcgaagcgggcaacgtagacgatctggcggagcggattgactggtggtatgagcatgcaacagcacggcatcaaatggcacgtgtctatgcggagagcgccaaccagtatcgtctgaaaaacagcattcggaaagcagagcagatgtttgcggaagagattgcggagaccttgggataaatggaatggaggcaacacagggatgattttggtgaaagaccgtacaggatcaaaaaacggcaccgcagacagcaccctggtcggagtgtttgactccaaacgtccgttgtaccggatcgtaaagtggctgatcctgcacatttttccgccggtgttccggctgttgtacggatttcgggtggtcggcaggataccggaggaaaagatgcagaacggctgtatcagcgtctgcaatcatgttcacaagctggactgcgtgatgctggcatgcgtgtttcaggattatacgatgcagtttttatcgttggaatctaatctccacattccggtcgcaggcgcgattgtgcgtctgatgggcggaatcggactgcctgcaaagctggacgggtggcgaccggttttaaaacgcataaaacaggggctggatgagggtcagatgctgcagatttacccggagggagagctgatcgatggctgtcggacgctccgggcgtttcagccgggcgcgtttcagatcacgtgttggttccggaagccgatgattccgtgcctgctgcggttttatccgcgtttttccaaaagcggcagacgaaaaagggacggaatggagctggttattttagagccggtggacattccgaccgataaaaagggcaagcgcgcggcaacagagctggaaacgcagatccgatgtcagatggaagcggcacggcttgcagttggtagagagggtgcatgaggattgtgcattctattgtttagatagagcaggaaaatcctgcggaaatggagcagaaagtgaaaattacctggcttggtacggcagcaattcgtctggaagcggacggtgagacagttttattcgacccgtttgtacagctggtcggtggggaaaatccgaactgtctggatgactttttacaggatcagacgatctgtgtgacccacgggcatctggatcatatgatggaggttccggaatttctggatccggaaagcgatgcggaggcgaccgtttactgcggagaagtggcggcagagacgctttccgatatggtggagaacaccagcaacgtagtaaaggtgagaccgggcgacgtgatccgactcggggacgtacggattcttgtaatggaaggaaagcatgcgaagcctggaaaaagtcaggtattccagaagctgttttcccgcagatttttgcagtatttcagaaatgcgctggcacttgcatatttgaatccgaaatttccggagggcggacagacgctgatgtacgaggtgcatgcggagggcaaacgcgtgcaggtgatgggaagtctcggactgcaggaggatcaggaatacccgcagggtgccgatcttctgattctgccgttccagggaagcgaatttctggatgcagtagcgctggaggtcgtagagcggctgcagcccaagcggattttgctggatcattttgacgacgcattcccgccggtatcggagcatgtcgatacgagacggtttaaaaagctgatggatgaggaatatccgcagatcaaggtcgtaaagccgacggcaggaaaaacggtggtgctgtaacgggattttataacgtatggagaaacaccagtgctaccggtttgcagtttgagatacagcatgatataataagtagaaagagcggcttttcgtgcagatatcactcaaatagccgtataacattttgacaggtctttgcaacatggaagaattgcagctgcgggggcttatgttacaataggagggaacaaatggaaaaaccgacattagtaattctggcagcaggaatgggaagccgttatggcggcttaaagcagatcgatcctgtagatgacaaggggaataagatcattgatttctcgatttatgatgcagtcagagcgggattcggcaaggtcgttttcatcattaaaagagagcatgagcaggatttcagagagtgcatcggcaatgcagtcagcaaacatattcctgtagagtatgtattccaggagctgacgaaggttccggaaggatttcagattccggaaggccgcgtaaagccctggggaaccgcacatgcaatcctgtgctgcaagggcgtagtgaatgagcctttcgcagtgatcaatgcagatgactattatggaagaagcgcttttgaagagctgtaccgtttcctgaccacacatcacgacgatgaaaaatatcgttacgcgatggttggctatcagctgggcaacactttgacagacaacggttccgttgcaagaggtatttgcgtaaccgacgaaaacggctatctgcaggagattgcagagcgcaccaagatcgtgaagaccgaggatggcgcggcatacacagaggatgatggtaagacctggattccggtaggattaaagactccggtttccatgaacatgtgggcattttctcccagcattatcaacgagctgcagaatgcagtagatcgtttctttgcagaagaagttgaaaagaatccgctcaagtccgagtgctttttgccgatcgaggtagataagctgttaaaggctggaaaagcaaccgttgaggtgcttcattctgctgacaaatggtttggcgttacctataaggaagacaaaccgtttgtgatggagtcgatccagaagttaaaggatgccggtgtttatcctgatgttctgtggtaaaacaataagaaaagtcagcaaaagaatggaggaaacgaaacatggcaattttagttacaggcggcgccggatttatcggcagtcataccgttattgaattacagaatgccggatatgatgtcgttgtagtagataatctggtaaattccagcgagaaatccctggaacgtgtagaaaagatcacaggaaagaaggttcctttttacaaagtggacattctcgacagagaaggcctgaatgaagtttttgcaaaagaaaaaatcgattcctgcattcatttcgcaggcttaaaggcagtcggtgaatccgtacagaagccctgggaatactatgaaaacaatattgcaggcactctgacactggttgatgtaatgcgcaagcacaatgtgaagaatatcatcttttcttcttctgcaaccgtgtacggcgatcctgcgatgatcccgatcaccgaggaatgcccgaagggacagtgcacaaacccctacggttggacaaaatccatgctggaacaggttctgacagatatccagaaagcagatccggaatggaacgttgttctgctgcgttatttcaacccgatcggtgctcacaagagcggtctgatcggtgaaaatcccaatggtattccgaacaatctgatgccttacatcacacaggttgcagtcggcaagctgaaagagctgggtgtttttggtgacgattacgacactccggacggaaccggcgtcagagactacattcatgtcgttgaccttgcaaaaggccatgtaaaagccctcaagaagctggaggatcattccggtctgaacatttacaacctgggaaccggacacggctacagcgtgctggatatcgtgaaaaacttcgaggctgctaccggcgtgaagatcccgtatgtgatcaagccccgccgtgcaggcgatatcgcaacctgctactccgatgcgagcaaggcagaaagagagcttggctggaaagcggaatacggcatcaaagagatgtgcgaggattcctggagatggcagtcgatgaatccgaacggatacgacgactgagaataaaagcagcagaacccgaaatagctaaggcaaagaaggaacaagaggcaaaaattagtagataatactgatttttgcctttttgaatatattttatcgcacatattaaaggaacgatagaatggtaaagtttacttgtaaatagccctatgataaaataattagaagtagtgttgggcacttgtaaaaggtaaaatatttataaggggtgtttatgaaattagaacaactgatcggtgaagcaaccgaatatgacaaaaaagcgatgctggagataaaaaagccgaaaagttggctgaaaagtgtaagtgcttttgctaatggcgttggtggtgtgctaatttttggcattgccgataatgattctgtggtgggagttgacgatgcaaagaaagctatggaagttattagtgagcagataaagacaaaaatggatccaattccagaagttctgctaaaagcacacgaaatagatggcaagaagattataacactggaggtatatcggggcgatgagactccttactattatgtaggagaaggtaattatacggcttttgttcgaatcggcaatgaaagtgtaattgcggctgcgatggatttaaagagactggttttacggggaaagaacagaacttatgatagtctcgttacggattataattttgatgattattctttttccaagttaaaggcagcatattataaacagacgaagaaaagtatggaaatcaaagattttgaatcatttggtattattgacaggaatggtatgttaacgaatgcaggagctttgtttgcggatgaatctcctgtttattgttcgagattattttgcaccagatggaatggtattgacaaagcatcaggagttattgatgcactggatgatgaagaatatacaggcagtcttatcctgcttttggaagagggcatgaattttgcgcgaagaaattcaaagaaaatgtggaaaaaagagtctgatcggagagtagaatatccggaatatccagagagaagtatttttgaaggattagtgaatggattagtacatcgtgattatttagatatgggaagcgaagttcatattgatatttttgatgaccgtttggaaatatattcccccggtggaatgtatgatgggacgcttattcaggacagggatattggtaacgttccatcaaagcgcagaaatccagtggttgcagatatttttagtcgacttgattatatggaacgaagaggaagcggttttaaaaagattatgcaggcatatgaagtagaaccgaactatacggaagacaaaaagcctgttttttattcaaatgcaacggaatttagagttatcctgaaaaatcttaactttaagaatgaagttttgaacgaaaaaaatgaagttttgaatgaagttttgaatgaggttttgaattctggcagaacagaaatggaaataaaagtaataaagaaaatactatattcgccaagaattaaacagaaagaattagcggaagatgtaggtgcttctgtaagtactgttcaacggattataaaaaaattagtgaaagaagaaaagatagttcgtatgaatggaaaacggaatgggtattggaaagtcttttag

SEQ ID NO: 94 - DNA, 13122 bp, unidentified
  source 1..13122: mol_type = unassigned DNA
atggagaaaagaggatggtcagaggcagactttgtatttgtcataggtgatgcctatgttgaccatccatcatttggtccggctatcataagcagattactggaaagatatggatataaagtgtgtataatagcccagcctgattggaaaaacgacaaaagcattgatgtttttggaaagccaagactgggttttttggtgtgcggaggaaacatggattctatggtcaaccactactccgtatcaaaaaagagaagacagaaagatgcatattcaccaggcggagaaatgggactcagacctgattatgcaacaaccgtgtattgtaatcttatcagaagaacatacaaggatgtaccgatcataataggtggtatcgaggccagcctcagaagaatggctcactatgattattggtctgacaaacttaaacattccatacttgtggattcctctgctgatattctgtcatatggaatgggcgaacacagtatgatagagatagctgaggctcttgacagtggcatcaatgtcagtgatatcacatatgtgaggggaacctgctataggaccaaggatatatcaggtgtttcggaggatgctatattgcttccggattatgacagccttacacgagacagactggagtacgccagaagcttttatacacagtatataaatacggatccatactctgcaaagacactagttgaagggtatggtaacagaggatatgtggtgcagaatccacctgcttacccacttacacagatggagatggatgatgtgtacgatcttccttacatgaataactatcatcccatatacgagtcaaaaggtgggattcctgcaatctcggagatcaaattcagtctgacgagcaatagaggctgttttggaggctgtagtttctgcgcacttacatttcatcagggaagaatcatccagactagaagtcatgaatccttgataagggaggctgagcagatgacgcacgatccagatttcaaagggtatatacatgatgtaggaggtccaacggcgaatttcagacataagtcatgtgcaaaacaggatagatatggcgtgtgtacaaataaacaatgccttttcccagaaccgtgtaggaatctgaaggttgatcacaaagattacattgaacttcttagaaaacttgaggctattcctggcgtgaaaaaggtgtttataagatcgggaatccgatttgattatgtaatggcagatagcagtgatgagtttttgaaagaactctgtgagaagcatataagtggacaactcagggttgccccagagcatgtgtcagacaatgttctgaagatgatgggaaaaccgaagaatagtgtatatgagagtttcatagccagataccagaaggtgaatgcgcgtacaggcaaaaaacagtttgtcgtgccttatctgatgtcgtcgcatcctggctctacgcttaaagaagcagtggagcttgcggagtatgtgcgggatatagggtatatgccggaacaggtacaggacttttatccaacaccatcgaccatttctacatgtatgtattatactggagtcgatccgcgtacgatgcagccggtatacgtgccgcataatccgcatgagaaagcaatgcagaaagcactcatgatgtatagaaagcctgagaattatgaccttgtaaaagaggcactcataaaagctggaagacaggatcttataggctttgataaaaaatgtctgataaggcctagaaaaatggaaaacagttcaggacatgaacatagaccttccaagggtagaaatcagagtagaaattgcgtatgttcgaataatacaaggaaaaataatacaaacaacaaaaattataaagaggcacctcaaaaaaacaaaaaaattaaagataatgtcagatctgtgggtgaaaacaaaaggcataaaagaaaataagcagtaaatggtgatattcatttttggttgcgtggtacatgcttttgtgctagaattatggcagattgtgtgaacctttagattgtcgtgtactgttttgggtgaacaacgtgaatatacaatatatggcgatcaaaaagatttattatatatgtagtcttatgtcacactaaaatttttaaacaatattttttaaaatggaggatttgaaaatggcaaagaagattgttttagcaggcgcatgtcgtacagctatcggaacaatgggtggatcactcagcacaacaccagctgcagagcttggttcaatcgttatcaaggaggctatcaacagagcaggagttcctgcagatcaggtagaccacgtatacatgggatgtgttatccaggctggtcagggacagaatgtagcacgtcaggcttcaataaaggctggacttccaatcgagacaactgctgttacagttaacgttgtctgtggttcaggtcttaactgtgtcaacatggctgcacagatgatcgaggcaggagatgctgatatcgtagttgcaggtggtatggagaatatgtctatggctccttatgctatgatgaagggccgtttcggttacagaatgaacaatggtgtacttgtggatacaatggtaaatgatgctctctgggatgcgttcaatgactatcacatgatcaagacagctgacaatatctgtgagcagtggggtcttacacgtgaggagattgatgagtttgcagcaaagagccagcagaaggctgttgcagctcaggagtcaggtgcatttgatgctgagatcgttccagttatggtaaagaagaagaaagagatggttgagttcaagaaggatgagggaccaagacctggtactacagttgagacactttcaagactcagaacaatcaatcctaacggatttgttacagctggtaacgcttcaggtatcaatgatggtgcagcagctatcgttgttatgagtgaggagaaggctaaggagcttggcgttaagcctatggctacatgggtagctggagcacttggcggagttgatccttcaatcatgggtattggacctgtagcttcaaccaagaaggttatggctaagactggtctcaagattgaggacttcgatgttatcgaggcaaacgaagcatttgctgcacagtcagtagcagttgctaaggagcttggatttgatgttgacaagcaggttaaccctaacggtggtgctatcgctcttggacatccagttggagcttcaggatgtcgtatccttgttacacttcttcatgagatgcaggcaaagggtgctaagacaggtcttgctactctctgtatcggtggtggaatgggttgctcaacagtcgttaagatcgaggactaattcaaagcgatatatataattcaaaacggagctgactacattccatgcagccagcttctgtaaatcagtataaaaaggagatacatcatggagtttgtaacatacgaacaggatggatacgtaggaattatcacaatcaaccgtccaaaggctctgaacgcactcaatagtgcagtccttgaggagcttgatgctacattcaaggcagttgatcttgatacaacaagatgtcttattcttacaggtgccggcgagaagtcatttgttgccggagctgatataggtgagatgtcaacactcacaaaggcagagggagaggccttcggcaagaagggtaacgatgtgtttagagctatcgagacatttcctatcccagttatcgcagcagtgaacggattcgctcttggcggcggatgcgagatatcaatgagctgtgacatcagaatctgctcagagaatgcaatatttggtcagccggaggctggtcttggaatcacacctggttttggcggaacacagagacttgcacgtcttgtaggtgcaggcatggctaagcagcttatctacacagcaagaaacatcaaggcagacgaggcatacagaatcggtcttgtgaatgctgtttatccacttgaggagctccttccagcagctaagaagatggcagccggaatcgcagcaaacgctcctattgcagtaagaaactgcaagaaggctattaatgatggcttacaggtagatatggatcaggcaattgttattgaggagaagctttttggtgactgtttcgagacagaggatcagaaggcaggaatgggcaatttccttgagaaagacaaggagaagaagcttaaggttgttcctttccagaataagtaataattaacagttctgatattaacatttagaatatgtgtcagtttttctgtgaaaaactgacatgtagcaccagccatttgccgtaggtaaattttgtatggctggtgttcaacagggtggggaatctgataaaggtaaaccatcctaaatgtgtgatataagtattatggtagcatgttaaacgaaacgtatatgaatttctcatgtttaccggaaaaaaagatttaggaggacataaaaatgaaggttggcgtaattggtgcaggaaccatgggtcagggcattgctaaggcatttgctcaggttgacggatacgaggttgcactctgcgatatcaagcaggagtgggctgaaggcggtaaggacaagatcgctaagggttatgcaagactcgtagaaaaaggaaagatgacacaggagaaggttgatggtattcttgccagcatcactccaggtcttaaggaagacttatgtgcagactgcgaccttatcgttgaggctgctttcgagaacatggaagtaaagaagacaacatttgctgagcttgacaagatctgcaagccagagtgtgtattcgcttcaaacacatcatcactttctatcacagagattggaaatggtcttacacgtcctatgatcggtatgcatttctttaatccagctgacagaatgaagcttatcgaggttatcgcaggtgttaatacaccagctgagactgtagagaagatcgttaagatctcagaggagatcggtaagactcctgtacaggttaacgaggctgctggattcgtagtaaacagaatcctcatcccaatgatcaacgaagctgcattcatcaagatggaaggtgtatcagatatagctggtattgatgcagctatgaagctcggtgctaaccatccaatgggaccacttgagttaggtgatttcgtaggtcttgatatctgtcttgcaatcatggatgttctgtacaatgagacaggtgacagcaagtatcgtgcatgtccattacttcgtaagatggtacgtggtggcaatctcggtgttaagagcggcagaggattctatatatacaatgctgatcgtacaaagacaccagttgatgctcagtaatagtgctaagtaatataatatatttatggaggaataattagaatggatttcgctttagacaagaagtatgaaatggcgcagaatttattcagagagttcgcgcagaatgaagtaaagcctcttgctcaggaaattgacgaacagcacagatttcctagagagacagttgagaagatggcaaagtatggtttcttaggaattcctgtttctaaggagttaggcggacagggctgtgatattctcacatatgctatgtgcgttgaggagctttcaaaggtttgcggtactacaggtgttatcgtatcagcacacacatcactctgtgttgatcctatcgtaacatttggtacaccagctcagaaagagaagtatgttcctgatcttgcttcaggcagaaagcttggtgctttcggtcttactgagccaggtgctggtacagatgctcagggacagcagacaaaggctgtacttgacggagacgagtgggtacttaacggatcaaagtgcttcatcacaaacggtaaagaggctgacgtatatatcgtcatcgccgttactggtatcgttgagaagcgtggcagaaagatgaaggagatatctgcattcatcgtagagaagggtacacctggatttacattcggtacaaaggagaacaagatgggtatctgtggttcttcaacatatgagcttatcttcacagactgccgtattccaaaggatgcacttcttggacagaagggtaagggattcaatatcgctatgcatacacttgacggtggacgtatcggtatcgctgctcaggctctcggtattgcagagggcgctctcgagacaacagttaactatgttaaggagagaaagcagttcggcagatcaatcgctcagttccagaatacacagttcgttcttgcagatcttgcaacaaagatcgaggcagctaagcttctcgtatacaaggcagcaagaaagaaggatgagtaccagagcggtgctaaggtttcttactcagtagaggcagctatggctaagctttacgcagctgaggttgctatggaagttactacaaagtgtgttcagttacacggtggttacggttacatcaaggagtacgatgttgagcgtatgatgcgtgatgctaagattacagagatctacgagggaacttcagaggttcagcgtatggttatttctgcaaacttattaaagtaatataggaggtacttaacgtgaaggttatagtttgtataaagcaggtacctgatacaaagggtggagtacagttcaacccagacggtacattaaacagagcagcaatgcttacaatcatgaaccctgatgataaggcaggacttgaggctgcacttagattaaaggatcagtatggtgcagaggtaacagttcttacaatgggtcttccaaaggctgctgatgttcttcaggaggcaattgctatgggagctgacaagggcgttcttgtaacagatcgtgtacttggtggagctgatacatgggctacatcaacaacaattgccggagctctcagaaagcttgattacgatctgatcatcacaggtcgtcaggctatcgatggagatactgctcaggttggaccacagatcgctgagcatcttggaattcctgtaatttcatatgcacaggagatcaaggttgacggagacgcagttatcgttaagcgtcagtatgatgacggatatcatatgttaaaggctaagatgccttgccttgtaacagcactttctgagttaaatgagccaagatacatgactccgggtggaatcttcgatgcagttaatgcagagatcacaacacttggcagagcagaccttgttgatgttgatgattcaaacctcggtcttaagggctcacctacaaagattgctaaggcttcagataaggtaagaaagggcgcaggcgagaaggttgttcctgattctccagatgaggcagttagctatattgttggcaagttaaaggataagcatgtaatctaatatagtaaaggaaaagtggtgaataaaatgggcgcaatgaacgcagaagaaatgaagaactacaaaggcgtatttgtctttgcacagcaggtagataataagttaagtggtatttctttcgagcttatcggcgaaggaaagagacttgcagaaaagcttgatgagaaggtaactgcagtacttatcggttcagatgttaagggtcttgtagatgagcttgcagagtacggcgcagacagagttatcgttgttgacgatccagagctcaaggattacagaacagagccatatgcacacgcacttgcatcagttatcaatgagtacaagccagagatcgttttagttggtgctacagcaatcggtagagatcttggtccaacagtttcagctagagttgctacaggtcttacagcagactgtacattacttgagatcggtgatttccctcttgttgcacttccaaatcaggagcagaagcacaatcagcttcttatgacacgtcctgcattcggtggtaacacaattgctacaatcgcatgtcctgacaaccgtccacagatggcaacagttcgtccaggtgttatgcagaagcttgacaaggtagctggtaagaaggcagaggttatcgagtataatccaggattcgtaccaaacaacaagtatgttgagatccttgagatctcaaaggctatctcagatatcaaggatatcatggatgctaagatccttgtttcaggtggtcgtggagttggctcagcagagaacttcaagctccttgatgatcttgcagaggtacttggcggacaggtatcatgctcacgtgcagttgttgattcaggctggaagccaaaggagcttcaggttggtcagactggtaagacagtacgtccacaggtatacttcgcaatcggtatttcaggtgctatccagcacgtagctggtatggaagagtcagacatcatcgttgctatcaacaaggatgaggatgctcctatctttgatgtagctgactatggtgtagttggagatctcaacaagatcgttccagctcttacagaggctatcaaggcagagcttgctaacaagtaattaacaggctgtttgctatatagataattttgaaattatcaactatgagaaaaacgcttcgcgagtttctcaagttatcgcggcagtcgccaaggtctcgtgcaagcacggactttggctcgttgctcgcgtaaattataaagtccccctcttggatttgatgttcaagagggggactttttgacgtggaagattttgatgtggaagattttgccatggaattttttggagagtagattacatagctaacaataatggcttgtttttgtattttggttagttttaggcgtattttccacaaaattatctctttttaatcagtttcataggaaatgtgacaatatcatgtaagtttgtatctttttgcattatattttggatttgggtacaattttgtgctctaaaaaataaaaaggcaaaaataaaaaacaaaaatctgcaattctgttacaatcagaaattgggaatccaatacaagtgtattgtaaataatacaaaaataatgtaatattaattagtttgaatatagtagataaagagagtatgcatgtgaagataggtacagtacatgcgaaagcaagtgcaaatgaggataaacacaaatggcaggtacagtaagtacggtatgcacagtagtagaacatgcagaagagaggtacatatgaaagagaaagatagcgttattgataacgtaaaatcagctgatagcaggaaaacatctgataaaaaaataatatctgataataaaacaatgtctgctactggaaagccgtccgctggcgagaacagagagaataagatgggcgtgatgtcagagggaaagcttctgatgtccatgtcgttgcctatgataatatccatgttgttccaggctatgtataatgttgtagatagtgtgtttgtatcaaggttcagcatggatggtcttactgctgtgtccactgcattcccgatacagaatctgatgataggggttttctcgggactgggagtcggttttaatgcgtttatatctaaggcccttggtgagaagaagtttgacagggcaaatgaggttgccagacagggaatattccttgaggcgataggatatgtgatatttctgataataggactattttttgcaagaacatttatggtgagccagacaggtgatgcgcaggttatccagtacggaacggaatatctagaggtgtgctgctgctgtgcttttggtatagctttccagatgacatttgagagactcttgcagtccacaggtcgtacaatgtacagtatgataactcagatacttggtgctgtcatcaatcttatacttgatcctatcatgatatttggactccttggatgccctaggatgggtgttaagggggcggccatcgcgacagtatgtggtcagtgcatagctggaactttggctatgatcttcaatatcaagaagaatccggatctccatatcactctgaggaaattcagaccacatggagagataattggcaagatactcggcgttggcgtgccgtcggttatcatggttgcaataggttctgtgatgaattattttctgaatcttatactgttttcgttctccaagttggcagttgctgtatttggagcttacttcaaggttcagagtatggcgtttatgcctgtgttcggattaaataacgggatgataccgataatttcatacaactatggagcgcaaagaccggacaggatgaagagaactatgaagctgggagttatggtgggctgttccattatgctgttctgccttgttatcatgcaggcattccctggacagatactcaagatatttgatgccacagatgatatgctgtccatgggaatccctgctgtcaggatcatgagcacagcgtttatatttgcgggattttcagtaacatgttctggaatgttccaggccgttggaaagggtgtatacagtatgatagtgtccatggcgagacagctctttgtcatacttcctgtagcgtatttcctttcaaaggcaatgaacagtgtgaatggcgtgtggacggcgttccctattgcagaaatcttcagcgtaattatatcaacatttcttcttctaagagtgtataaaaagatagtaaaacctttggaaagaggacagatagagtaaaataagagaatgatatacggaggaaatgcaataatatagacatagcgcgtggcatttgtattgtgatagaatactatatagtagtatagttttcatatgatgaacgcagttttgcatttgtcgcaaatagatggcagaaaagaaatggaaagagagcggatatgggaaaaatgatatatatggatcatgcggcaacaacggcggtgagacctgaagtgctcgatgccatgctgccttactttacagaaaaatatggaaatccctcaggcgtgtatacatttgcgtccaaaaataaggacgtaataaatgtggcaagggatataattgccgattcccttggggcgaagcctgaggagatctacttcaccgggggaggctctgagtcggacaactgggctcttaagtccgttgttgaagccttccaggataagggaaagcatataatcacaaccaggatagaacaccatgccattcttcacacatgccggtatctggagaagctgggttttgatgtgacataccttgacgtggacgaaaaggggctggtgaatacggataagctgaaagcagccataagaccagacacaatattgatatctgttatggcagccaacaatgagataggaaccatagagccaatcagcagaattggagccatagcacatgaacatggaattctgtttcacacggatgcagttcaggcgtatggacagattccgcttgatgtaaatgccatgaatatagatttgctcagcagcagcggtcataagcttaatggtccaaagggaatcggatttctgtatatacggagtggaataaagcttggaagctttatacatggaggccagcaggagcgtgggcgtcgtgctggaactgagaatgtaccgggaatcgttggaatgggcaaggctgccgagcttgcggttctatctatggaagatagaatgaaatgggagacagacataagagatcatatgattcatagaatcttgtcggagataccatattcaaggctgaatggacatgagaaagaccgacttcctaacaatgtgaatgtgagctttcagtttgttgaaggagaaacgatccttatcatgcttgatatggtgggaatatgcgcttctgcaggctctgcatgcacatcaggttctgttgatccatcacatgtactgacagctatcggtcttccgaaggagatatcacatggtgctgttagacttacacttggatatgagaataccatggacgaggcagatgctgtggtagataatctcaagaggattgtggaaaatctcagaaagatgtcacctgcatatcaggattttgtcagtagaaataaataatttgcaaaatacatgctcttgaacataatgcaggataaaagatagcattaaaataaaaatatactacagttattatttattataaagaggaaatgaagttgattgatacagataagaagacagtatgtgtaggtatgtcgggcggagttgattcgtcggttgccgcacttttgctcaaggagcagggctacaatgtaataggagttaccatgcagatatggcaggacgaggacagggacgtggtgagtgcccatgctggatgctgcgggctgtcagcagttgacgatgccagacgtgtggcgtcgcagctcgatattccgtattacgttatgaacttcaaggaagaatttaagaagtacgtaatagactattttgtggacgagtataagcatggcagaaccccgaatccatgtatcgcctgcaacagatatgtaaaatgggaatcgctgctcacaagatgcatggcgattggtggtgattatatagccacaggtcattatgcaagaataatccagctcccaaacggcaggtatactctccaggaggccaggggaatagataaggatcagacatatgcactctacaatctcacccaggaacagcttgccaggactctcatgccagttggagaatacagcaaacctgagatcagaaagatcgcagaggatcacggacttatggtggctcacaagccggacagccaggatatatgctttgtgccagatggagattacgccggttatcttgagaacgaagcaggacttaaggcggttccgggagattttgtagacatacatggcaatgtgatcggaagacataagggaatcatacactacaccataggacagagaaaaggacttggacttgcgatgggacatccggtatttgtggtggacatcatacctgagacaaatcaggttgtgataggagagaacggagacgtattctcagagaggctcacatgcaacagactgaacttcatgtccatagcggatctcacagagcctatgcatgtcaaggcgaagatcagatataaccacaagggaagcatgtgcacgatcaggaagatagatgaagatctggttgaggcggtatttgacgaaccggtcagagctgtgacaaagggacaggcagttgtattctatgagtgtgaccatgtgcttggcggcggaagtatctgctga

SEQ ID NO: 95 - DNA, 7981 bp, unidentified
  source 1..7981: mol_type = unassigned DNA
atgatcagagtaggaatcatcggagcaaccggttatgccggaggagaactggtaaggatcctgttaaaccacaaggatgccaaaatcgtatggtacggttcccgaagctatatagataagaagtattatcaggtataccagaacatgttccagctggtggaggatatctgcaaggatgacaatctggaagaactggcgaagcaggtggatgtgatctttaccgcaacccctcagggatttctggcgggccttttgacagaggagattctctctcaggtgaagatcgtggatctgtctgctgattaccggatcaaggatgtggccacctatgaaaaatggtacggcatcgagcacaaatctcctcagttcattgaggaagcagtatacggactctgcgagatcaatcgtgacaagatcacggagaagaccagactggtagccaaccccggctgctacaccacctgttcgatcctgactgcctatcccatggtcaaggaaggcatgatcgatgtgaacaccctgatcgtggatgccaagtccggtacctccggtgcaggaagaggcgccaaggtgcccaacctgttctgcgaagtgaacgagaacatgaaagcctacggcgtggcaagccacagacatacccccgagatcgaggagcagttaggctatgcgggcaactgccaggtgaccattaattttaccccgcacctcgtacccatgaacagaggaattctggcaaccgagtatgcaacactgaagagaaaaccggacggtacacttcctacctatgaggaagtaaaagctgtctatgataaatattatgcaaacgagaaattcgtccgtgtgctggataagggcagctgccccgagaccaagtgggtggaaggcagcaactacgtggacatcaattttgtcattgatgagcgtaccggccgtatcattatgatgggtgcactggataacctcgtaaagggtgccgcgggacaggcggtacagaacatgaacctgctgttcgggcttcctgagagcgaaggcctggagctggttccctgcttcccttaaagcagatacggaaaggattagaaaggataaaacacatacatgaacaaacagtttacgatcaaacccatgaccatagaagattatgacggtctgcatgccctctggatgaccattcacggcttcggtatccggagcatcgatgattccagagaaggtgtggaacgttttatcaaccggaatcccggcaccagtgtggtagccatcggggaggatggagccgtagtgggcggcatcctctgcggccatgacggacgacgaggctgtctgtaccatgtatgtgtcagagaagattaccgaagacttggcattggcaaagccatggtcgtccactgcatgaatgctctgaaagcggaacatatcaacaaggtcagcctgatcgcttttacccagaatgacatcggaaacgctttctggaaatgcattggatggacaaagcgggaagacttgaactactacgactttactttgaatgaagagaacattacggcgtttaataaatagatgccaggattgtggaagtgcgtagcacgaagcaatccgtaggcatcaaagtcgggggcttttgaccccgacatcataaataaaacggaagcgaaaggagattattccaacatgaaacagatccagggcggtgtgaccgcagcaaaaggctttgaggcagcaggtgtggaggctgccattaaatatcagaatcgtaaggatatggcactgatcgtgagtaaggcaccttgtaccgtagccggtacttttacctccaatgtggtaaaggcggctcctgtactgtgggataagcagatcgtggaacattctgcatttgcacaggcagtggtagtcaattcgggaatcgccaatgcctgcaccggcaaacagggactggactgctgtgaagcagaagcgaaatgtgccggagaactgttgggcgtgcccaccgatgccgtactggttgcatccaccggtgtcatcggtatgcagattcccgtagacaagatcaccgccggcatcgagaaactggtggcagccaaggcagatactctggaggctggctccgatgcagcccatgccatcatgaccaccgataccatttccaaggagatcgccatcgagacacagatcggtggcaagactgtgactctgggcggtatgtgcaagggttccggtatgatccatccgaatatgtgcacgatgttaggttttgtaaccacagatgtgaaaatttccaaggagatgctgcagaagtgcgtcagcgcagatgtagtggattccttcaacatgatctccgtggatggcgatacttccaccaatgatacactgctggtgctggccaacggtatggctggcaacgaggagattaccgcagagggcgaggattacgacaacttctgcaaggcactgcatgagatcaccacattcctggcaaagaaaatggcaggagatggcgaaggcgccacagcactgttcgaaaccaaagtaataaatgcagtcagcaaggaagatgccagaactctggcaaaatccgtgatctgttcttctctgaccaaggcagctatcttcggacatgatgccaactggggacgtatcctctgtgcactgggttattccggagccaaattcgacccggaaaatgtggatctgtattttgagagcaagagcggcaagattcatatcttcggtaatggtgtggcatgtgattacagcgaggaagaggccacgaagatcctctccgatccggaagttaccgcactggtggatatgcatatgggtgaggcagaagctaccgcatggggctgtgatttaagctatgattatgtgaagatcaatgcggactatcgttcctaaaaaaagaacgaccggaaagataaatgacaggcggatcacggtatctgcggaaatgaggataaaaatggaaaaagatatggaacaggtaatgaaaaaagcagaggtgctgatcgaggcgcttccttacatacagaaattcaaccgtaagatcatcgtggtaaaatacggcggcagcgccatgagcaatgaggaactgcagaaaaacgtcatcaaggacgtaacgctgttgaaactggtaggtttcaagcccatcatcgttcacggcggcggtaaggagatcagccgctgggtcggcaaggtcggaaaagaggcaaagttcgtcaacggtctgcgtgtcaccgatgaggagacgatggagatcgcggaaatggtactgaacaaggtaaataagagccttgtgaccatggtggaagagctgggcgtgaaagcagtaggtgtcagcggtaaagacggcggcctgcttcaggtagagaaaaaatattccaacggtcaggacatcggttatgtgggtgagatcaccggcgtgaatccggatattctctttgacatgctggagaaggattacctgcccattatcgctcccattggactggacaaggattatcacacctacaatatcaatgcggatgatgcggcctgcgctatcgcaaaagcagtacatgcggagaaactggcatttctgacggatatcgagggattgtacaaggacatcaatgacaagtccacatttatttccagattgacagcttccgaggcagagggactgatccacgatggttacatcggcggtggtatgctgccgaagctgaacaactgtacttctgcgatccgcaacggtgtaaaccgtgtgcatattctggatggacgtctggcacactgcctgttgctggagatcttcaccaatcagggtatcggaactgcaatcgtatccgatgaggagtgaaaaaagtgtgcagaataagcctggcagcttattccgcacccggctatttgtgccgcaggcgtcacaaagtagccattatcgcaaaaccaaattagaaatttggtttgcgtttccttgacgaaaagaacgtctgcggaatggagaggaaaaatgagcgacaccatgaaagaatatattgcagaggcggaaaaagacctgctgcatacctataaccggtatcagatcgttctggataagggcgaaggcgtacatctgtatgacaccgatgggaaaaaatatctggatttcgtagcgggaatcgctgtatttgccctgggctatcagaacaaggcatacaacgatgcgctgaaagcacagatcgacaaggtgatccacacctccaattattattacaacgtgcctgccatcgaggcggctcgtaagatcaaaaaagtatccggcatggatcgtgtctttttcaccaattccggtgcggaagcagtggaaggtgccattaaggctgccagaaaatatgcgtatctgaaggatggctgtaccgaccatgagatcattgccatgaatcactccttccacggcagaaccatgggagctttgtcagtaacgggcaatcccaagtatcgtgaggcgttccagcccatgatcggacatatcaaatttgcagaactgaatgatttccagagtgtgcgggatcaggtgacagacaagacctgtgccatcattatggagactgtacagggcgagggcggactgcgtcccgctaatgaagagttcttaaaacaggttcgtgatctgtgcgatgagcgggatatcctgctgattctggatgagatccagtgcggcatgggacgtaccggttacatgtatgcatggcagcgtttcggcgtgaagccggacatcatgacttctgccaaggcactgggctgcggtgtaccggtaggtgcatttatgatgacggagaaagtagcacagcattctctgacagcgggagatcacggaaccacctacggcggtaaccccttagcctgcgcagcagtggaaaaagtgcttgatttattcgaagaggaccatataatagaacatgtgagagaggtggctccctatctggaacagcgtctgaacgaactggcagacaagtatgactgtatcaaagaacgccgtggtgtgggactgatgcagggactggtatttgaccatccggtaggagacattattaacagagcattggagaagggattaattctgatcaatgccggtgcggacattatccgcttcgtaccgcctctcgtgattacccgggaaaatgtggacgaaatgattgctattttggacacctgtatcgaataagaggtttaggtgaatttatgtttttgaaaaaaagaattatcgctacagcagctgtgattgccatggctgctgcagctgtttacggaagtacgcaggagatgagtcagacacaggagagcggaagcggactgcaactgtttcgaggaaaggagacaatctattgctggtattccgatgaggcattgtccggttatatcaatgcggcagcagtatccttcggagaacagaacaatggagtccgtgtgattcccgtacttacttctgacagtgaatatctggaagctatcaatcaggagaccctgcattccgatcagataccggatatctacctgttgagcagtgactctctggaaaaggcttatctggcaggactggcatcgaaagtgcctgacactgtgggaatctgcaatacagaccatttttcccaggcggctctgtctgcggtaacctatgatcagaagctgatcggttacccggtttattttgataccagtgcgttggtatataatgaagattatcttcgaacctgggcaacccagcaggcggagaaggaactggcgggaagcagtgagaatgatgaacccataggggaaggagaagagatcatcgaggaagattctcttccggaagaccagaccacggaacaggtgacagcggatgaggcagcggtaaatgcgctggcagagcagtatttcgcggaagcacttccctccacagtggatgatctgctgaatattgcagatacctttgatgcaccggaaggtgtggaaggtgtcatgaaatgggacgtgaacaatattttctacaactactggatcgtaggcaactacatgatcgtaggcggtgatcccggggatgacagaaatgatattgatatcaataatccggagaccattcagtgtctggaagtgtacaaggcactgaaccagttcttctttattgaatccgatacggtgacttatgattctgtgatccaggactttatcgatggcaagaccatgttcaccatcggaaccacggatgtggtcaaacggctggaagaggcaaaagcggacggcagccttgcatttaattacggaattgcccgtatgccggatgtcagcgccgaactgcagagcagatctttgtctgttacgggagcggcagtcatcaacggctattcggaacacaaggaactggcggactgcttcgcagcgtatctggcagaaggatatgcggacggcctgtatgaacgctccggcaaaatgccggcaagtcttcaggcggcagagaatgcagacaacggtgcgcttatgatctttgccgatgaatatgcggacagtgtgtcattgccgaagatgctagagacgggaaatttctggatgcagctggaagtactgttttccaaggtatggaacggtgacgacgtgactactctggtacagcagctggacgagaccatagccggacaggtaggtggtacagagaaataaaaccgttacaataaaatatgaatgaacgaaccggtcacaggatagactactactaaaaagaaaaggtggtagaatcctatgatcggttttttgattgctttagtttccggtgcgctgatgagcatccagggagtgttcaacacccaggtgacgaaatccaccggcatctggaccgccagtgcatttgtgcagtttacagcattgctggtatgtctgggggcatggctgtgtacggagcggacttcattcttgaagatagcgcaggtggagcccagatatatgcttttgggaggggccatcggagcctttatcacctacactgtgatccgcagtatggatgccctgggaccggccaaagcggtaatgcttattgtggtcgctcagcttgctgtagcatatattatcgaactgttcggatggttcggtgtggagaagcagccctgggagtggcggaaagccatcggcatggccgtggcgattgtgggtattgtgattttcaagtggaaatgatccagggctatcctcgtagcggcaattttgcgaatgggttctgaatcgtgaccacaaatgcgaaaacggcttgtaaattccgtgcgattccagtacaatgaaagttaacagcatagagaggcaatcccctgaaattttgtgaaggaatcaggaaaatggaaaggggactatgatgttttcgataaggttttttaaaacaaaatatgcaggtttgatcggaatgtttttcagtctggtgatgttcatgaccggctgtcagaggaaggatgaggccattgtgctgattccatccggagaagatgtggcggaatttccctcactggaagcggtggaacaggcagcggagcctgcaggcagcagcgtgacagtgcaggaaccggcaaaggctgaaccgcagatgatatatgtctatgtctgcggcgcagtgcgggatcccggagtcgtggaagtgccggagggcagcagagcggaggaagccctgcgactggtcggaggtatgacagtggaggcggatcctttttatgtgaatctggcggaaacggtgacggatggtcagaagctgtattttccaacgttggaggaagcggagactctggaagccgaggtaaaagcgacggcggagggacttgtgaatatcaacacggcatctgcggaggaattgtgtgcgctgccggggatcggagcttcccgggcggcagatattgtgcgctaccgggagcaaaacggagcctttcagacgaaggaagacattatgaaggtatccgggatcaaacagaacgcgtatgacaaattgtgtgataagatcacggtacaatga

SEQ ID NO: 96 - DNA, 18408 bp, unidentified
  source 1..18408: mol_type = unassigned DNA
tcagcggaacaatgcctccccgttcaccggttccccgttgtgggtcagagcaaagtatacgttgcttccttcggcgctgtagtatttcgtgggcgctgccacactgccgatggtgtcgccgggattcacataggagttctctttcactgtgatctccgtcagctgtccataagtggcctcatagccgtcacccagatccagggtcaccgccttgccgatctcctcattttcgaagatcgaagtcacttttccctgcgcacaggcggtcactgccgtaccttcttccgcggaaaaaatggtggcgggattgtatttatactgatccagtgtagcaaaataagtgctcttgtccatagagtaatgcatcagaatatcactctgcaccggttgctgtaatccgtcgctttctgcaaagtgcagtgtcttctcaacgaccacatccccgcctgctgtctgctttcccccggtctcttccttttgtcggtcggcatcggaattctgctgctctttctgtgcggcctccagcagggtctcctgatccgtcagccccggaatctctacgttgccggagcctacctcctggggcatatagtccagatcatcctcggtgacaggagttcccgcgatctcatttcccgctgtattatttgccgtcagtccggggatgttctcgtcctccttcagaagatgttcgtcgttattctccgtgatctcctgtaatttgtcatccgcattgttgggaagcgcagtgaagtccaaggtataaccatcatccctggactccacattctgccccttcatatagacccctgtcatggtcaatgctgccagtacaaaggctgaagaggctaacattataatacgttctttgttaataccgctctttttatttcttctcatatcctatccgcatccttcctgttccctgagtcaactgcctgctatacaatcgtttcaaccactttccctggtttatcctatagtcttgcccgattcatgggttttattcagaatgtcttcgatatgaaatttgcatttatttggaactattcagagccatgtaaatagcgtcgaatgtttgcattcgtaagaacatttgatgctatttatagggcgaagtaactgaatagttatatttattctatgcctgtgcggcataggcagccatatccacgtgctgtaccgtacccacatttccgttttcgtataagaaaataccggtcttgcggaccacagcattggtcgcattggcattggtagtgccgtcctgagccttacggtctccctgcagggtaaaatccgtagaaacgttttgcagacagatagcaccgacacccttgtcagaaagtttgtacagtacgtcgttgccgttttcatccttgcaccagatttttaattttgaccagatggaatcgttctcatcgatccagccgttgccatcctcatcatactgcgccagatctgtaaagccatccccattccgggtgccgaacagctcactgccgtcgttgatagtgccgtcaccgttcttgtccagtgccagatagccgctgccattcagcacggagatctcttcttccttgccatcggcatccagatcaaaataaaaggtctgatccgacacttctgccacatcagtatccaggttgatcaccagcggatcatggagcgtgaattctgctacattgagttgctctttgtagtattcctcgcatctgcggctcatatttacatttacattaaaattgatctctctgccatccttggtccgtacgcttcccacggtggaaaaactggtatcctcctgttctatgttccaggtctcgctcacatagttcaatattttcacacgggacgtgaccagattgaacacgtctgacgcaggtgttgcggttccctgtgtgctgccggaattcgtctgggtattatttacgctattccctgtattccagctgtttccggtctgattaccgctgctccatccgttttcctgcatccagtcccgcaaagtgctgttcctggacgggaataataaatcaaaaatataacgcaccgtatattcccggatggtagacaatgtctgttcactggcactgcttcgcatatcccatctggcagaagataccagcaaacgactctgccagtctttggctgtcatcgtggtgttctctgcagtgttctcctgttcctccgtgttctgtgtggtatcctcaccattcggtgtcttctgtcccttagtggatacatctgtcagacctgcctgataatccgttatctcaaatcgtctgacgcttgtcttagaagcgtgatagcttctggcggaatccattcctatgcttgcggaatcaattctcaaatctgtaattttctcctttccccgacctcaccacgaaccaacagggcgcgcttcctgtaacgtttaacagttcaccgccgcatgtattcataaaagcgcctgctccgcagtcgacgccgctaagcggctcatcttttatttcatacatgcggcgctccgctcatgcaatatcatatgttctgctttgtgtgccagcatccacgcagaacatatgatattgcatggctgaactgttaaactaaaaaaagatggtaaagaaacagaatacatataatatgcctctgtctgattaccatccgtggtgtcattatcaaactgtaaaaaataagtagcaggaagtgactggccttgtcacctctctactacttatatcgtccgctatggacattttatttagtgttaatttactgctgtttgggctgagtgggagcgccaggggttccgggtgcgggaggcaccggtctgccggctgctttcagctttgctgcgatcatgctggctaccatttctctggtcaccacgatgttgccaccgaagggattgatcacgaatcccagcgccgggctgatattgccctgtgcatctttgcgcagcagcattcccgcataatcgtcaaagttcatggcgaaagtctgctgattctcctcatctctccacctttttagctctgtccagtcagtgaacgccatgaagaacttccgaccgtcctcggtggacagcatcgggaactgtactttggcatctcttgcgatggtcacccggccgttttcatcgggcacaggcaccggatcgatcacgaccggagacaggaactttgctttctgcagttcatccaggaacatctgtctgtgttccggggtgtcctctgcttttaataattcaatggatcccaccatcatggggttggataccggtttgttaaattccatattttttctccttacttctcattgtaactattcagcctctcttcgcgaaacgcatctgcgatggttcgtcacatgtctctgaatagttacactcggttatagttgatcaggcatcccttcaggatgatctgacgttcttcgtcggtcagctctcccagcttcagggtgaattccttcatgccttctcctgttgttaccacatatgccttaatttcctcggccttgtcttccacggctttcttaataccaggaatgaacaggtaatccagattcttgaaaggcaggtctccgggctggatcaggaaaggaagcatgccccagttgatcaggttggaacgataacgcttggtggcatactcgttggcaatatttgcccagccgcctaataccttctggcaggaagcagcctgctcacgggcagagccgtctccgggcttcactgcgaaaatagtggaaccgaatccggtgttctcgcgacttgcatcgggatactgtttctttacttcacccataacatccttcagtaccggaactgcctgacagggatgtccgccgttcatacgctctttctctgccttctggatctccttggcacgtcctacatactgcggatccttacggcttaaagtgaactctgccagtcccagaggattggagcggtaggaagaggtctcaccggatggaatcagctcatcggtagtagttacgggatcgtggatctcggatactacctgcagtatcagattctcaggcagggcacccatagcgggccagtccttgatattggggccgaactggatctctacgctctcgtctgccacaccgtgggaatcgaagacacggttcttgtaaatattgctatcgaaatgatatttgtattttccgaaatctccatcgaagtccgttgcggaagtcagcacacccttgttggctgcggtggctgcgatggaacgggcatccatcagagctacggaagcgatctggccgttctgcagcttggagccttcacggttcgggaaatttctggtagagtgacggatactgaatgcgttattggcaggtgtgtcaccggcaccgaagcagggaccacagaacgcagtcttcatcactgcaccggtctctaagatggtagccgcacagccgttgcggatcagctccatgtatatgggcatggatgcgggatatacgcttaaagtaaactcatccgcaccgatgtatctgcccttcagaatgtcggcagccgcacagatattctcgaatccgccgccggcacagcctgcgatgataccctgatctacaatgaacttgccgttctttactttatttttcagagtgaagtctacagcaccgtccagacttactttcgcacgcttttccgtctcatccagaatatccatcaggttcgcattcagctcttcgatggtgtaagtattgctgggatggaacggcatggcgatcataggacggatcttgtccagatccacctcgatcaatccatcatagtatgccacctggccgggattcagttccttatagtcttcggtacgtccgtggatctcatagaactcacggatctggtcatcggtcttccagatggaggacagacaggtggtctctgtggtcattacgtcaatgccgatacggaaatcagcactcagggaagccacgccgggacctacgaattccattactttattttttacatagccattcttgaatactgcgccaatgatagccagtgccacgtcctgaggacctacacccttcacgggagcaccctttaagtatacggctaccacgccgggcatgttgatatcataggtctggttcaacagctgttttaccagttcgggaccaccctcgcccatagctatggtacccagtgcaccgtaacgggtatgggaatcggaacccaggatcatcttgccaccgccggctaacatctctctggcaaactgatggataactgcctgatgagggggtacatagactccgccgtattttttcgcacaggtcagaccaaacatgtggtcatcctcgttgatggtgccgcctacggcacacagggagttatgacagttggtcagtacatagggcatggggaacttctgcagtccggatgctctcgcggtctggataatacctacaaaggtaatatcatggctggtaagcttgtcgaaacggatcttcagcttgtccatattgccggaggtattatgctcctgcagaataccatatgccatggtgtttttcgctgcttcttctttggagatcgtaatgccggtcttcgcctgtatctgactggctgcttccggggtatccgctacgatgtccgtaccgtttaccaggtaagcgccgccctgtgttaactgaatcatgctcgtcctcctgttattccacttcttatgcgtaatgtgcatctaaatgtgcactcctttcattatactggattgttttctcagatgcaatgatcttataggatgtttttgccactgtaccacgctaaattttatttttctccgggaaccattcctcttttgttccggtgttgctataatatcctcagaaattatgccattttccgaaaatctatacgaaaacgacagttgtcggccgaattccggcggcagcggaaaggaaccttatgaatgtagtaatagctatcgattccttcaagggaagtatgacctccatgcaggcgggtttgagcgccgccacagggatcaaacgtgtttataaagatgctcatattaccgtccgtcctctggcggacggcggggagggcaccgtcgatgctctggtaaacggctgtgacggccgtatgacacaggtgcaggtcacaggcccttccggtcaccccgttgtctgtccttacggcatcgtcgacgagacccataccgcaatcattgaaatgtccggtgccgccgggattacccaggtcagcggagaggaaaagaatcctctgaacaccaccacttacggtgtaggcgaagtcatcaaagatgcaatccagaacggctgccggcattttattgtcggtatcggtggcagtgccaccaatgacggcggtgtcggaatgctgcaggcacttggctttggctttctggataaaaacggaaatcagatccgcttcggagccaaaggactggaggatctggaatccatcactacggatcatgtgcttcccgaactcaaggaatgtactttccgcatagcctgcgatgtctccaacccgctctgcggagagcagggatgttccgccatctacggaccgcaaaagggcgctacttccactatgatcctgcagatggacaaatggctggcttattatgccgctctggccagagaacagtttcctcatgccgatgccaaatatcccggtgccggtgctgctggcggtatggggtttgcttttcttaccttctgcaatgccacactggaatccggtattaagatcattctggaagaaacccatctggaaaaatatatccgggatgcagatgtcgtgatcaccggggaaggccgccttgacggtcagacggttatgggaaaagctcccatcggtgttgccaagattgccaaaaaatatgaaaaaccggtacttgctttttccggctgcgtggccaaagaggccgttgcctgcaacgcagagggcatcgatgcctttttcccgattctgcggaacgtggtatccctggatgaggctatgcataccgacaatgccatgaccaatatggcggataccgtagagcaggtattccgggcgcttcagatttttcaccgttaagaatcacaaaaggacatgacccaccggccatgtccctttgtatgtttcaatattgttttattattcttcatatccattcggattgttcttctgccatctccaggagtcttcgcacatctctttgatgccgttctcagccttccagccaagttccttctctgccagagaagcatcggaatagcaggtggcgatatcgcctgcacggcggggtttgatcacgtaaggaatcttcacgccggtagctgcttcgaagttcttcacgatgtccagaacactgtagcccacaccagttcccagattgtagatcttcagtcctgcattctcctcaatcttcttcagagcctttacgtggccctttgccagatcaacgacatggatgtagtcacgtacaccggttccgtcgggggtatcgtaatcatcaccgaagacacccagctctttcagcttgccgactgctacctgtgtgatataaggcatcaggttgttggggataccgttgggattctcgccaatggtaccgctcttgtgagctccgatagggttgaagtaacgaagcaggatcacattccattcgggatctgccttctggatatccgtcaggatctgctccagcatagatttcgtccagccgtaagggttggtgcactgtcccttggggcattcctccgtaatgggaacaaatgcggggttgccgtatacggtagcgctggaagagaagataatgctcttcacaccatgttttctcatgacatctaccaaggtcagggtaccggcaatattgttctcataatattcccagggcttctgtacggactcaccgactgccttcagtcctgcaaaatgaatgactgcgtcaatctgttccttgctgaagatctcttccagagcttcacggtccagaatgtctgccttatagaaaggaaccttcttgcctgtgatggcttctactctggggatcactttctcacttgcattgcagagattatccaatacgactacatcatagcctgcctgctgtaattccactacggtatgactgccgatgaatccggcaccacctgttaccaaaattctcatacactctctcctatccgccgtgcataggacaatactatttgttcactatggcggctgcacaatctctcatctgtcagagccggatgaaattttttcttcgtttcttacagtatcagattactgtaattctatcgattcctcaataaccttatgttgtgaaaatctgtcgaaatgtttacagcaccacaccattctcggtgagcagttctctggcactttccacagagtccacaccgatcttgttcttgatcggcgcaaattcttttcttctgactacttcgaagggcagacagctgtccatctgatggatcatatccagcaccagactctcgaatttgtagccgttgggagcctccggcttcaccggttctccgttctcatccagatacgggatcttcttctctacgatatgcaggggcatcttctctgccatgatcttttccagatcctgtaccttgaacagataattcaggatcacaccataattatacgcgggttctcccttctcatccttagcattcatcagttcatcggtcagttcataatattctacgatagaaggtctgccatcctctaagcacataacgcctaccttctcatccggtgcattcttgcggaccaccttggagcctaccacacaatttttctgaatagtagctccgatgaagcagggatctgcgattcgctgcaatacattatccacggcaaatacattgatccactcaatgccttctctgtgtacaatgtccagcatgccattgtttttcatggaaatgaaccagccgccgttaccattgggggaagtggacagcttgcccttttcctccagatagatcttaccttcataatcggtagccgcagccatctcctgtttaaagaaatgcacatattccgcattatatccgaagaaatcatgctcctttaaaaaggctatggtcgcatcgttgttcttatcactggtcattacgaacagatggatccaactgtctgcctgatgtacgacttccatcagattattgatcaggcattcaaaaatatacagttcatgagtcagtcccacattgtacattcccttgggattgtcagatcccagtctggtgcccataccaccggccagaaggaccgctgctaccttgccctgtcggatcgcttcgataccggttgcggtaaattcctccctgtttgcttcgatttcgtctaactgcatggcagccaacggtgtgatcactcctttttttgccagatcttctttatgcttgcaagcttccagaatgctcatatccgtagtttcgatctgatccagaatcccctgcttctcttcctcgttgagctccccgtaatacttcagaacatgttcctgaccatactttgcaagcttctccttagcctgttccagtgtcatactcatattcctacctccgttttattttctccgactattccaccccgggtaacagtcaattttctctattatacttgatatttcctgcgattgcaaaccttactcccgggatcgttcccgccctgttaagattctgtaaatgccttgcaaagattctgtaaataacccgacaaaatggtgttaagggtcgctcaaaactattcacccgggggtatctgtttactataatacgatatgtaaagtttttgaaggaatcagcaagcactttacagactgacaaaaaagcgaggaatccatcatgaacatcggaattttaattattgcaatcgtaggcggtgctaccggacttttatccacagcatatctggcaatcagtttccctgctgtgctcctgtggaagctctatcgcagggtggtccacagaattcctctcacccaataagctaactacaaacactttccctctaaaaaggacccggaagctttcgcccgggtcccttgtcgcattttcttattctatttttattcctgtaccggatcccagttctcatccaccagtgtcgcagttactgtaattccctccgatgcattttctgcgcggatcacaagatagaacattccttcttccgaatccgcggcatattctgacggattctccggcaaaaagacagaaaatccctccgggtactgctgcatctccagaaatcccttttccagcagtgcagttttgtagtcttcttttactgcatcccggtccccacaggagtacacctttattgaagcaaaagttccatcttcgctgtctgtctccgtacaatctgaaatcacagcatcgggatagataatatcctgctgcaccgctttcagatattccgttgacatccggacactctgtaagatctcaaaagtatcttttccatcctcggaatgcgccatgagtaccagactcaaaagcaaaatgagcagataacttcccagtgctcccgccagtattttcgcagaaggattctctggctgccccagatttgtataagaagtgatgatccagccaaaatttcggtagtccaccgcggtattacagtattcgcagactccgccgcccaaaatgtccacactgcctccgcagttggggcatttgtattcccggagtgccctgctgtgctgcgttaccacatcctgtctgccttccagttccagccggatctcctcataacggttccggatcttctttcctgtatccagtgtcaatcgggtcctcacttccacgctgattctgtaagactctccccgtgtctccgcctccagaaaacgcacaccgcaaatgcaacagtccaccacattctgataccgtgccaccaccgtatccagatcacaggatgcgaaaaagcgtacctgctctaccgtatccgccagatggatcattcgcagctggtattccagattctgaagaaaattacccgtggagaattccgggattgcggcctttactttcgattcgtcttgaattctcggctttctgcgagtctccatcacgatcaacattacaataaatataatgagcatgtaaaacaacgaccggaaaaataccggagccagaccaattcccagcatcatggctgcggctgcctttaccgcattgtatccgttcctgcccaacgccaacagcaaaaacataatgccgcccgcacagatggccagtaccgcaagagaaatcgctgtaattcccaccacagcaccggctttcataaagttggaaatacttttctgtcttgcgtcctcctccagagaaaatccggatacctttgtttcaaaatcactgacgagaaactttgccccgcaggcatcacagccatcgatatagctggtcagttttccctcatgtccacagttagggcagataaccatatctccctgcacatccgctttcaaaaagctcgccgctgcaatctccggtgtctttaggaacgcaatcttttttcccttgcggtaataagtccgtctcatttttaccggctgggtacggcggcagctataatcataaccatccttccagggaccatcatagtccgccagtcgtgccggctcctgcatctccatatccaccgtcagttcccgctgctgcagtctttttctgctcaggcgcagactttgccagaaaggctgggttgtctgctccatcaggttctgttccgcttccccgttgccctgatagaatgcttttaattccccacagaagtcttctgtccgtctctcgatctctttccgtgcatcattcagaaactctgttgccatttcgtttttctctcctcataagtgatcctgccgcgtaaaggtcctgatatcttttgtatcttatgtcccaactactttgtcccatatagctatgtatccattatataagttggtacccggtatttcaagacactttcccgtatagaatgatttgcctcatcgaatatctagtgctggtgcagatacttctctctggtagccagtccgccgcggatatgacgctcggatttattcacatccaataccttccgcgcctgcttcgccaacgccggattcacctgggccagccgctccgtcacatccttatgtaccgtgcttttgctgatgccgaaggccttggcagtctgccgtaccgtggcgttgtggtcgatgatatagcccgctatccctatagctcgttcttcaatatagtctttcaaaggaaaacccctcaggatacttttttacagtgtatgaaagtatctgaggggttatgatagggattgtatttatctctccaattatattattgctttcttttatctatggatacataagtagtgtatgcctatattcaacaacaattttcctatggttctgttacctcctagtctaccatatgtcttaaatacatatatgcaaaaggaggaatgctcatagtttgcatgaacattcctcatctttcaagctatgtcatctgtcaccttactcttatcctctaagtcaatatctatttgaattccaagtaatttgctttctggtgcatcatcgttgagttccagaataacattatccctaacaatatttttatagtcttctgtactcattataccctcaaacgattcaagtgcatcctcattaatagtacatatatattgaaaatcttttttacagcatgtttcatatactattctaaaaagagtctccctttgtcttggatccatattagcaaacaatctactatcatgagcaataaatctcatcttgcttatctcacaattcaaaatcaaccagtcaaagcaaaacattcttacttcattcaccccatcagaggagtcgtcttctatacgtgcttctaatgaatatcgcaacaaattttctccagtattattttttataaccaatccactttttttcttgggataaaagcgtttggcatattcccaatacttatttcgtaattcttccaaatacccgctttcctcatcaagatactcatctgttgccttatcttgctttatcatttcctccttaattctccgtttattttctcgatatgtcttcaaaattttttgatattcctgtatcctgttcaattcattctgtaaagatgataattgttttgtcaatgccacatattcttccaatgctccatgcgaattcaaataatcaagcaattcatccatcctacttccaagttctactattttgctgtcaatttcctctaacgctcttttttgttttgccagttcatttcgaaggcgtacgtttcttgtagccaataactcactatgaaactgggttacctccgcaagacttctttttaccatctctggaatttctatttgagctgcctcatatatttttagtaacttttcctcttttacttcagtagtttcctttgtagattcctcaatattttttatatatgtgctaacaagtactcttttattttccagttctttcttttgataactcttttcatcagcctctttttctaactcatgatagttttttgatactttgaacacagatatttcctttgccaattctgcaattctatattctaaatctgcaacatctaattctgcatcattttttcccaaatagtactgtcgaaaaagcggatcattttttattgccttctctgttgccgctgcagccacttgcctatcgcgaagttcccttttagcaacaattagttccttatctatccctaacaaaaaacaattattcaaaattttactataatcgctttctttaggaacaaaagcatcatatattgaataacacagacgagattttctaacaaatcttgaaaaaagagttgtccatgtcatatctttgggtgtttcttttaatccaaaacaaagttctctcaatctctcctgaacttcttttggtttcagtatctctccattaaattcaattttattttgattgcatgttgatcgcatgcaatagtgttctttatcatctatttgaaatcttaatgtaaactcccactctggaataactttcgcaaaagattcaatttttcttgatcccaaacaaaaatgaattaaatgtaaagttaatgatttgccaacgccattatatgtattgccatcattctcattatgaggagtaacctgtttccctgcaattatattaatgccatctttaaaaataattggatgaaaagatttttgattagcagttaaacttatcagtctcataacacagcaatcccctttcatttttttcaatcgcaccaataataaacaaataatctaaggccataatatattgatcaaaggaaaatttcgtcgaatatcttttattagaatattcttctttataatattcccataaatcatctatcgtcataggtttagataattgctgaagtagaaaagcaccaaatccaaaaaaggactcacttactgacaattgttttttcggtaatatcatattttcatccctttctatatctagccttatctaccttggttcttcaaatatatcacatgttgaaaaataatatgccatcaaaacccagacacatgtaagcatcgacatggttcttttaggcacggaattttccagaatataatagcatctacaatctgaagcattctcttgctcatcttcaataatttcacatgccttttcatataaagccctaaactttttttgtaaaatatcctttattcccggattttcgttaaagtattgatttaataatccttcttgatagctccctacagtaagatttgcttcaatttcttcacttaaattattaaaggttattttttggacgaaatctggtacaaccaatttttctccagtactaattggcaattctgcattcaataaatatcttacaacttcattaagtgcatcatattctataatacaatctgacacatcaggaataaatcccactatctcctgcatatcattttcatctaacatgtcaaattttccttgcaaatcttttgctgtaaaagtttcaatttctatttctgaatataatggatttgatttcaattcgagagctttttgaattattggtgctggcaacccctcatatctatcatttacgacaaaataaaatttcttaattgcacatatattattccatttatcatacaaccctttaaaatctgtttctaatttttttaccgcatcacctactgttttttctttattaacatctctaggtgcataaacttgatagtaaatacctgtttggctaacaaatccatcattttttctatcacctatattaccatatgctttaaccggctgaaaatttggttccgctttcgtcataacaaaaacaaaaaaatcttcaaatgcctgtcctttatactgtaatattttaattctaaaaagtatatctgcaatatatctatcacctttttccaatataactatcccctttttcacttttgaatataactaaattattataacatgactttcattatttggtttataagttcatacaatttttcaaactttttcattaataattttctttcaccttttattgttctaatttatagatttcatttttcgcaatacgtatcattcctcgtaaaaccttctacattgtcactaccaaatgcgcatattacggtatattacggttttactaatattaattttttataatcttccttactgcgatattattgccgatatcacttactattctcatagctcgttcttcaaaaaagcttcttttcaatgcaaaaaatatgattgaaattgaaataaccttatatattcatgttataatttattgattttggggcatgttccaattcatataaacgtttaatcatcatatctatgacgcagtcattgtaacattcattacggctacaattgcttggtatattgcaaatcttataacccccattcactaaaattcttccttttttatcctttgacataagtttttgcatcctaatatccccttattcacaattatatttttacatagttcttgacaatcaaacatcttcttgctaccattctaatcaagaaatgggttttcaccgcacttattgttgtggcttgcccgtttcttttttcaattataaatacatcctttatccgacatagcagattcctgcacttgatttatcatttcatcataatatgccctataacgatacgctgtccttcggctgatttgaccttcttttacaatttccataattgtcatacccgcttcatacttaattgcaaattcctgataagaagccatccatgccgcattatgccttttacgtcctcctaaattacgtgccttaagacgctctatttcagccctaagttcttcattttctatttccaattcatcaatgtgcgtcattgcttcctctaaaatgcttatcacaaatgtccctccatccttttgtgtgtcattttggtttatggcactattataattgctgactgcaaatgtgtcaatttgatttttgacacgcaaatacttttactaaaaaacattacaagcgcacctgtttaaagacatcaaaacaataaaagcacatgaaaaagattttatattacactctttttcatgtgccattttcaaagacattcgctattttattatgataattaccctttgttataaacgcttttaatattctttttctaacttcctataatccacctttcccatcattgtcattggtaattcatctataaattcaaaatagtaaggaactgctctttcagccaattttgtagtacataattccctaatctcaccctctataattcccgtatctcttttgcactcatgtttcattaccaaaaatgctttcgggaccttgccatttgcgttatcctctatcccgataactgcacattcttcaatatctggatgctgagttatgacattctcaatcgaaggtggaaatattttaaaaccatcaaatctgataatcattctctccatcctactatctatagtaagcactccctgtttagacatatgacctatatctccggaatgtaaccacactttaccgtccttatgtcgttgtaacactttatccgttaattctttatttttaaaataccccaacataacacttggaccggttacacatatttctccttgctcatcatatgttaattctttatccgttcccggctcaaaaatactgattatattttttaccaaaggtatgcctacacttcctatctttctacatgtaggcatttctaaagttgccgtagatgcaagttccgacattccccaacctttatacaattttcctttagattttttacggattaactcatcttctatcttcttttctaaattctcgttaatcatatctccaccacaacccaaattgtggaaaaaagaaagatctttcaccgttttgctagacgttaaaacttcataattatgaggtactgtattgcagtgattaggtttatattttaaacacaatttaaccatattctctgcagtaactctaggttgcactatagtatatagtcctaatgacagcggcaaatgtacagacgcaaccattccaaatgctgcaaatgctggaattgccgtcaaaaatctctcccttctatttaattccagcgaagtaagtttatactgaaatgctagtgcattcaagttatcatttgataataaaattcccttgggcgttcccaccgttccactagaatgaaccaatagagccgacttatttttttcgtattctactactttacccttattgttctcctctaattcacaaaatttcttccatgtaataaacaaatcatcatgtagcgatttcttttgctttttcctgttttttatgtagtatcctatcttagtaactgttggcattgaatccgccgccgaaaccaatatcactttttgaatatttgtctcagatataatttccttaattttaaaataacaggcatcaaatagcaccaaaatttctgattcattttccttcaagtaaaatttcaattgatctttattggatcgtggatccagcatatctgaaattgcccctatgctattaagcgcataaaatgccactattgtttctactgttgttggcatgcaaatactgacaatatccccttttcctactcctaattgcgcaaactgactggcacacttatttattttatgaaacagttcttcgtaagtgattagtcttccaaaataattaattgccgtttcatttaatctatttttattacaaaggcaaatataatcataggccgtcatatggggaatttccacattgattgcctcatcactatagtatttcaaccatggtctatctatagagggataacctgtcatttcgtttcttgcttcttttttcat

SEQ ID NO: 97 - DNA, 7299 bp, unidentified
  source 1..7299: mol_type = unassigned DNA
gtgttgcgattggataaatggcttgccgagatgacagaaggcagtcgtgctgaagtgaagaagtggatacgacagggtagagtgtatgtaaatgagacaaaggtgcagcgtccggaaaccaagttggatccggacagagatcaagtgaccttagacggtgagcagatcatatacgagcagttttgttattatatgctgaataaacctgccggtgttgtttctgcaacaacagatagagagcataaaacggtaatagatctgttacaggaagctaatacacaagatgttttccctgtgggcaggttggacattgatacggaaggattgctgctgctgacgaatgatggtgccttagcacatgagcttctttcgccgcgtaagcatgttgataaaacatattttgtgcggatcgccggtaatttgtccgatgcagatgtgaagcagctagagcagggaatggatatcggtgatgagaagctgacgctgccggcgaaagtatcttgtttggagcagttcccagaggaacaggagcagacggttatgataaaacttcgtgaaggccgttaccatcaggtaaagcgtatgtttgctaaagtagggcatccggtattgtacttacagagagtgagcatggggacgcttaccttggatgactctctgaagacaggagagtaccggaaactgacagccgatgaaattgcagcattaaagcgatgaggactattatccaagtaaacagaataagtatttcatgataaaagcgctggaaccggccgttggtcgattctagcgctttttgctttgatagaacatgccaccatgaattttgtcgattgtttttatggcactaaccaatccgccgcctcgttggtttgtagttagtgtatgaagtttgattatattatataaatgccttgtcaaaaatattttcaatttctcatccattatatttcgggaaaatcatgggaaaactacaatagaaaaactacagtggtggatcgaaaaagcttgatagagcatgtaaaaaattacttgctttttgaggaaaattgtgataacatatacggcagtgagtttcttaggaaaccgcagtgctgaaatagctcagttggtagagcacttcactcgtaatgaaggggtcgtcggttcgagtccgattttcagctttacataaatccttgaaaattatatgtattttcaaggatttttatattattcaaactttgcggaggttgtgttatataacgacaaaggggggcgttatggacaaaacgattgctattgttacgggagcatcaggaggtcttggcagagaatttgtcaagatactatccaaagaaaagaaactttctgaaatctgggtagttgcccggaatgcgcagaaattgcaacaactggctgaagaatttggcactaaaatacgaccgattgccaaggatctaagtgataatgttcagaggaaagagctcagtgcaatgattgcagaagagcgtgcagcgatacagtatcttatcaataatgcaggttatgctaaattttgttcttatgatgatctgagtgtggaggaatccattaatatgatcaatcttaatattagtgcggtagttgcgctgggactgtattgtattccgtatatgaaaccgggtagccacattattaatattgcttcccaagcgtcgtttcagccgcttccgtatcaaaatatttacagttctaccaaagcttttgtccgcaattatacacgagcattgaatgtggaactgaaggacagacatattacggcaacggcggtgtgtccgggatggatcgataccggtctttatgagagaggattgatcggtgcgaaaaaggcagcgagcaattttgccgggatggtacagccggatgtggttgcggctagggcgatgcgggatgcacgccgaggaaaagatatttccgtatacggagcacatgtgaaaggtgcacattttgccagtaagctgcttccacaaaaagtaatgatgaaattatggttgaaacagcagcatttaaaatagcaacgaagcaataccggcacagatagatggaaagcgggtgatgtggcatggcaggaacgattgttcatctagcggttgcaacacagttggatcaattattggccaatgaaccggagcggtacttgggaaagatggcagataaatattgttcgaacgatttttttgcgggaaatatatgtcccgatggaattatggcacgtgaagggtactgtcgagagatgaaactgcatacgcacatgagagacggaataccggatggaacctttcagcaaccggaacatttacagttatttcgaaagcgtttgtcggatttttttgcaaaacataataacaaagaagaacgcttcagtttgtatttaggttatctgacacatatgcttaccgatgagaaatttatattagaaattcatccatatgtattgcagcggattgccgtgaccggttatgatcgagataatccgcaaacctacgtgaaatttggacgtgatgtagatcagatcgattttcgtcttgtgaaagagtttccggggatcgataaggcatatcaagcgttgtgtcaagtaacaccatatgaaatagcagattatattaccgaacaggaattaactgcaagtcgggaatggatcaaaagttattttttcgaaacagaacataccatagaggatccgatatttttgccgtatcaggagatgtatcaatttataccggaggctgtgtcgcagatctgtgacagactgccagagtatatcacgtctagtgtataaatgataggtcttagaaatcgcgtagaagatttacggatgagtttttatttcatcaaaaaagagggtgccacacgtttgtgtgacaccctctctacttatttcaaaaggataattcaattaagtattatacacaaccctgagccttcattgcctctgcaaccttaaggaaaccagcaatgttagcaccagccatgtagttgccttccataccatattctttggaagcctcatcacaagacttgaagatctctttcatgatatcatgaagtttgttatcgacctcttcgaatgtccaagacaatctctgagagttctgtgtcatctcaagaccggatgtagcaacaccacctgcgttagcagccttagccggaccatagagcatgttgtttgcaaagtaaacatcaattgcttctggagtagaaggcatgttagcaccctctgcaactgcatagcagccgttagcagctaatgccttagcactttctgcatcaatctcgttctgagtagcacatggaagagcaatatcacatttgattgtccagataccactgcatccctcagtataagtaacattcttatgagatgttctggcagcgtactctttgatacgtccacgctcaacctctttgatctgttttacgagatcaagctcgattccatccggatcatgaatgtatcctgaagaatcagaaagagcaacaactttagcaccaaattctgtagctttctcagtagcataaatggctacgttaccagaaccggagattacaacggtctgatccttgaagctcttaccatttgcttttaacatttcatttgtgaagtagcaaagaccataaccggtagcttctgtacgagcaagagaaccaccgaaagttaatcccttacctgtcaatacaccagaccactcattacggattctcttgtactgaccaaacatgtaaccaacttcacgagcaccggttccgatatcaccagcaggaacatcacagtcaggaccgatatgtttgcaaagctctgtcatgaaactctggcagaaacgcataacttctccatcgctcttgcccttaggatcgaagtcagaaccacctttgccaccacccataggaagtgttgttaagctgtttttgaaaatctgctcaaatccgaggaatttgatgataccgctgtatacggatggatgaagacgaagtccgcccttatatggtccgatagcagagttaaactgaatacggaaaccacggtttacctgtgtcttgccattatcatcaacccaaggcacacggaaaataatctgtctctcaggctcaacgatacgctcgaaaacaccagcctcaacgaggtcaggtcttctttcaacaactggttccaaagaggtaaatacctccataactgcctgaatgaactctggttcaccagcgtttctcttttttactgtttccagtaagtcaattaaatactgattctttaacgccattgctaaaaaacctccttatgtttagtgtttggtatacaaggataccagcctgacgtgtttatcacgttactaccttcttagtatggcacaaaaaccgtagaaattcaataaaaaaatgaaaaaacaattgaaaaataaatatagtatacaattatacaaaatttttaaaggtgtgagcataatttgaatgacatatttttgacatgttaatataatataatgtaagaattaaaagtataaattgtgtttgtgctcgagggggcgggaattttgttaaggagatgaagattttcgtaaatttccgatttgattagcacctaaatgacatttaatagaacaggaatattacaaaaatgcagtaggaaaagtgcaaaaatactatatactgtataaaataataaaaaatatgtcgaaaatcagaaaaaacgtttacgaaacagacacactttggacacatatgctcgttataataggtttcagaaagtgaaaactttctactcccaccctattatacgctgggtagtgcgagctacccgacaagaagagccttcccgggctcttcttgttttttaaataaaatttcgttataattaagtatgtgcttgtatacaaacttcccacatcggaagttattgcaaaaccacatattacttattatgtcaatgactatatagcattttgcagccgtcaaagagtggtttctgccatcagagaactatagtaattgccttgccgcattttgtttttacagtgatttctaaattttgttgtctctgatggatgatttacatgccttacagaaaactcgatgtcccggaagcaaggtattcatcatttttgaaagggactttgcgctcgtcgttacttatgtctcgtatttcagagacattaagtaacgtgacgtagcgcatcgtagcgaaagcgtcccgtccaaaaatggatgataccttgctaaaccgggacatctcagacattctttcaggcatgtatacatcagagacttaacaaaataagaaatcacgtaaaaacattgcgttctgtggcaattatcttagttctctgatagcagaacaatttaatgtattggctgcaaaatagtatattcattgctgacataataagtaatatgtggttgtgtgaaatgttgagttatggtaggtttgagtaaataagaatttataggaaaggatagtaatagaattttatgtggaaatatattttatttgatttagatggaacaattacgaactccggagagggaatcatgaattgtatccgatatgcgttagaacagatggggcgcgagataccggcggaacagactctgcgcaaatttgtcggacctccgttggtggttggattccgtgagtatactgatttaacggaagaagaggcgaagactgctacggcaaagtaccgggagcgttatcagtcggaaggtctgtttgaggcatatgtgtatgaagggtttgaagctgttttaaaatatttgaaaaaaacgcaggtaaaaatagcggtagcaacttcaaaaccggaagaatatacagaacgtattttggaacactttcatcttaaagaatattttgatgtgattgctggagatacgttgaaaggggatcgtggttccaaacaggctgttgtagaagaagcattgcgtagattaaatgtaactgagcaggataagggtacagtattaatggttggtgatcgtaaatacgatgtcattggagcaaaatcctgtggtatccgttctttaggtgtttattatggttatgcggaaaccggagaattagaagaggctggtgcagattatgtagtacgcactacggcagatatgcttgaatggtttgaacaacaaattccggaaacaccgtgtcaggcaatgtcagatgtcgataatacacagcagcctgcatcaagtcaaatatcttcttataataggaagattggcaaaaagtggacggcaattgccggtggaatgcttattcttgggattgctttgggagtcggtggcacattactcgtacaaaagcagccttggagcaagataacacaggagaataccggggctgactatgatgcaaacaaatgtgtgcgtcttggtgattataaaggaattaaagtatctttagcggttactgatgacgatgtacagcaggagatcgacggtctgatacaggataatgtcacgtatgaacagaaaaagggtaccgtacaggaagatgacaaaatatacgctaaatttaatggctatattgatggcaaaaaggtagatgatacttgcggagaagaggttatagagcttggatctgaccaatttgtaaaaggatttgaaagtgcttttgtaggagccaagaccggcaagcagatcacttttaagatcaatattccaaagggaacttatggagatgataccattgacggtaaggaagttacctttaaggctacggtaaaatatatctgtggagatgaaatcgtcccgacctggaatgataaatttgtgcagtcgatttcggattttaagacagcaaaagagtatgaagctgatattcgcacggagctagcaaaagaaaatgagaataataagcaggattttgcatggacagaagttcttgaaaatgcaaaagtaaaaaaatatccggaagaattattagaagatgccaagcaggaagtgctgcaggggtattatgatatggcggatatgtacggtatgagccatgacgaaatttttcagtcctggggcagcgaaaatgaagaagactttgtcaaaaatgagttggacgaacaggcgaagcaggctgtcaaagaaaaattggtcgttgaagcaattgcaaaagcagaggggattaattattcggacaaggaatataaagacctggtggcagaggaatatcagtataacactgaaaaatatgattctgaagcagaatatgagaagaagaatcgagaaagcttaaaggataatgcgttgagtagtgctgtacagaaatggatcgcaaagcatgcaacgttttcaaaataa

SEQ ID NO: 98 - DNA, 24664 bp, unidentified
  source 1..24664: mol_type = unassigned DNA
ttatacaaccgtcacaacacctatttcaacctgattattgattctggggatgaatacggtgttgctcagacctgcgcagacaatcatttttgtgccgtcaaggtcaaattcgcctttgtcatatttcggaaaaagtccctgattcggagcgattactccgccgatgaacggcaattgaatctgtcctccgtgggtgtgaccgcagacgattaagtctatgtcggttttcttcgcgtcatcggcaatgtattcgggctggtggtgcagaagaattgtgaaattgttctttgctttttcggcaaattcttcccacagcgttcttgacggaacatcgtcatcgggagtgtagaactcataataagggtaatcgctcattccgccgataagcacactcttgccgtttttggtgaattttatgtattcattatcgagcaatacagcgcctgttgaatctgtttcgcttttaaaatccgttccgaatttggcggcattgtcacgctcatggttgccgagacagcagtatgtgggtgcaatttttgaaagcttttcaagcacatctttcatctttgttgtgtcgggatcgccacggttgaccatatctccgcaaactgcaataaaatcgggattttgttcctttacaagctctgcaaggtctgcgttcttttctccgtattccttgttgtgcaaatccgcgatgacaacaaatttcagctttgcatcgttcttagtattgtttacacagtaatttgtgattgcaattgtgttgtcacagtaaacgccccatattacgagagtcacaaacagcacaagtattattgctccgaggattatcgaaaattttttcattcaattcaccgctcatattaagtatggtattattttaggctcgttttgtgcggttgtcaacaaatgtgtgtcgaacaagtctgattattactgttccttgtgctttgattgtcggattttaagttgatttaggaattgctttgtttgacattccttttgcactgttgtataataaatcataattgtatttatatgttactcgggaaatttacacaaagttaaacagaagaggtatgggttatgaagaagattaatttgcgtaagatgttgctggctctcgcagatgtgtttattatcgttgtcagcggtattcttgcaaattatattctcttgcttgtcggctacataggtgctgcttcaagcaaaggcttgttgagctatattgttattgatcttgtcatgtgtctgtttacgctttatataagcggaacatattcaaaattgtggcgatactttaacgcaaaggactatatggtgtgcggaattgccgtcttttcggggtttacgctcggctttgtaatctcgttgtttttgcagattccgcagagaaagattttttgtatagtacatttcgcaatagcccttgtcggaattcttgcattccgttttgtttttagaagggcttttcttgaccttaccgaggcaggaagggcagagggcggagagcgcacccttattgtgggcgcaggcaatgccggcagaatgattgttcgtgaaattcacaatgcgaaagagcagggtgatgttaataatccttcaaaaagcatcattccggtatgctttgtcgatgatgatttgaaaaagctgaatcagaaaatcgaaggaatccccgttgtcggaacctgtcccgaaattgttaaaatatgtgatgaataccgcatagacaatattattgttgcacttccgtcatgtgaggaagatgagaagaggaagattcttgactactgttccgcaacagagtgcaaaatcaagattatcccttatctcggcgagcttttgtttgatgacgggcatacacagcttatttcacaggcaaaggaaatcaagattgaggaccttctcggcagaaaacccattgagtttgaccgaaaggagattcatgaccttatcaacggaaaggtttgtcttgttacaggcggcggcggttcaatcggcagtgagcttgtaagacagattgcaaagaatgatccgaaacaaatcatcattgttgatatctacgaaaacaacgcatatgacattcagcaggagcttgtgcttgaatacggcacaaagcttaaccttgtaacgcttatttcatcggttcgtgattacgacaaaatggagcttatcttcaagacatatcgccccgaactcgtattccacgctgccgctcacaagcatgttccgcttatggaaaccgttcccgaggaggctgtaaagaacaacatcttcggcacattcaatgttgcaacccttgcagaaaagtacaaggcaaagaagtttgttatgatttcaaccgacaaggctgttaatccgacaaatgttatgggcgcaacaaagcgtgcgtgtgagatgattattcagtacaaggcgcagcacagcaccgataccgaatttgtaacaacaagattcggtaatgttctcggctcaaacggctcggttattccgctgtttcgccgtcagattgaaaacggtgcgcccgttaccgtaacacatcccgatattatcagatattttatgactattcccgaggctgtttcgcttgttcttgaggcaggtgcaatggcaaagggcggtgagatttttgttcttgatatgggtgctcccgtcaagattacaacccttgccgagaaccttatcagaatgtacggtaaggttccgtacaaagatgttccgattattttcacgggacttcgtccgggtgaaaagctttttgaggagcttcttatggacgaagaaggtcttaagtcaacacagaacaagaaaattttcataggaaatcaaattaaaatagacgaaacagatatgctgtcaaagcttgaggttctcaaaaagaccgcagaaaacaatgacagtgaaaagacagttgaacttttggcagaacttgtacctactttttgccacaaggtcaatgattaaccgaaaaggagaaattttatgtgcggtattgtaggttatgtaggacctaaggattgcagtgaggtgcttgttaatgctctcacaaagcttgaatacagaggctatgactcggcaggtattgcggtttttgataacggagaaatcaagaccgtaaagaccaagggtaagcttcaggacttaaaggataagcttgcagaggtcggcactccgaaaggtcatgtcggcataggtcacacccgttgggcaacccacggcgagccttcggatgtaaactcacatccacacagcggtacaagggttacaatcgttcacaacggtattattgaaaactatatggagcttaaagacttcctcatctcaaagggaagaacttttttaagcgacacagatacagaggttgttgctcagctcctcgactataaatacaacggaaatcctcttgaaacaattgacagtgtaatggctgagcttaagggttcgtttgcactcggaattatgttcaaggatttccccgacagagtttttgcggttcgccgtgaaagtcctcttatcgtaggcgttgcagagggcgagtgctttattgcgtccgatgttcccgcaattcttcagtacacaagggattattatcttcttgaccatgatgaaatcgtaacactttcatctgacggtgtttcgttcgttgacgaacaccttgatccgattgaaaaggaacttcagacagccgactgggatatggaggctgccgaaaagggcggttatccgcactttatgattaaggaaatcaacgaacagcccgaggctatcagaacaacgattatgccgagaatcaaagagggacttccgtttcttgaggagtgcggcatcacaacggaaacaatcaagaatttcaaaaatatcacaatcgttgcctgcggtactgctatgcacgcaggtatggtcggcaagtatgttattgaggatctcgcaagagttcccgtaaatgttgacattgcgtccgagttccgttacagaaatccgattgtaggcgagggcgaccttgtaatcatcatttcacagtcgggcgaaacagccgacagccttgccgcaatgcgtcttgcaaagcagaagggtgcaaaaactcttgcaatcgtaaacgcaaagggcagttcaattgcccgtgaggcggatatgctcatctacacactcgcaggtcccgaaatttccgttccgtcaacaaaggcatacatcacacagctttccgttatgtatctctttgcctttgagcttgctcttgcaaaggaaacaatcagcacagccgagtgcaagcgacttgtttcggctcttacaaaaatgcctgaggcagttcagtatgtaatcgacaactgcgaggatacctgcaagttcgttgccacaaagcttgttgcaaccgacagcttgctttacataggcagaggtcttgactatgccctttcaatggagggttcgctcaagctcaaagaggtttcgtacattcactcagaaagctatgccgcaggcgagttgaagcacggcacaatttcgcttattgacgaggatgttccggttatcgccgttgcaactcagacaggtattatccccaagacaatcagcaatgttgttgaggttaagtcaagaggtgcaaaggttattcttgtttgcacagacgcctgtgtaagagaactcaaggacggtgttgcggattatgttatcgaaattccgcatacagacgagcttcttatgccgattacagcagttgttccgctccagattcttgcttattacacatcaatcaacagaggtattgatcccgataagccaaagaaccttgcaaaatccgttaccgtggaataaacggcggtcttgtatttaattgaaaattgaaaatgtaaaatttcggttggcggtgtgccaccgcagtcaattcgagaagatagtcagataaagaaattgcattgatgcccgatacggcattgatgcaatttttgttttatatgaaagtgaatgtttatttatataattttaatttgtacaaatctttgcgtggttatctgcaggcggataatatccgtacatacagttttgcaacaacttccgtatataccaaaaatatacaaaaacagtcgggcgacaatgttttgtattcttgcgaattgtcttctcgaccataattttccattttccattttcaattttcaattttatgcgcgctcaggcgtaatatgttctttaatatcatactgtattcacgaataaggcactcttgttttcaaatttcaacggtaaaaaccttgtatttttttgacagattatgtataattaattagatatacattctaaaaagcagtattgatgaatctaatttagtttcgggggaatatacggacatgatgaaaactgtttttaaaagagctgtaacgcttgcaatttgtgccgtaacggtattttgcggtatttttgcctgttcaggcgcaacaaaagattacgagattccgcagattgacgatatgacgctttcaatgcctgacggtatgagcgctgttacaagggacagtaaaagcacagataaatatttttctgttttcggtcttgattatgacacaacaatgaaaacctttcagaacggaaatatctatcttcagggtatggataatatgtcatcggttattctgaccgtgacaatgacaaaaaatgagagtagtgagaatgtcggcaactatgctcagctttcttcaagcgagctttcaaatatacgcaacaattttcttaattccgacgagtatcggagctgtactcccgaccaaaaagaaaaagctgtgtggcttgtgtttgacgcaactgctcagagcagtaagggcgatgtgaaaacctttgttgccaacacggtttatgacggtatgaacattaatatcacaatgcagagaacagagggtgatgttacaaccgttgactacgatactttttccaaagttgtatcttcggtaaaattcagcgacctgccgttttcaaagggatttattccgtacataatcatcggcggcggtgttgttatccttattttgattgttctcatcataatttttgccgtgagaatcagaaagcataaaaaggctaagaagaataacgctattcttgaggagcttgcagtcaagtataaactcggtgaaaagggtacggactacgacattgacaattttgacgattctcccgaaaagcccgataaacgctcaaagaaaaagcagaaatatgcggaagaggttgaagaagaaccggctttgtcgggcagaagatatgctcctgagccgataatcgaaaatatggaagaaccggaagaaattacaagtgagtattcaaactttggttatgatacggatgatgccaaggaaaaagaaattgacgagataatcaactccgcaaaggcttacaagagtgagcttgagcgtgaggcatataaaaacaactacggttacgaggaaaacagcacggaggacgaaaaaaaaaaggagcctaccgcagcagatacctcagagactgaacccgaaaaaattgacgaaaacgaaaaagataacgcagaaacacctgaaaaacacgaggacataagcccttcgtcaggtcctacactcgttatccccgaacccgaacacgatctttttgaaacaagcgagcctgacgatatcgaccgtgaggacgatgccgatgttgaagaaaccgaggaggtttccgaacaaaagcatccgcttgaaaaaaaggttgacaagtacgcaaacatcattttcggcagtgacgatcccgaggagaaaaccggggaagaggttgatgacgaggagcttgtaagggcaaaggctaagaaaaacaagtttgacagcggttatgacttttttgacgaagctcccaaaaagtcaatgggggttatcaaaagctcagacctcagagatgccgaggacgttgatgttatcggcgaggttgaaagaaaagcagaaaccgtaaagcagaacgctcttgaaaaagagaataataaagaaaccgagggtgaaccgaatgataaacggtcaacggaagaggttcttgccaatgtaggcaaaaacatcggtaacgctctcaggggctttgcaggcggagttaagaattttggcattcactgcggatatttctgcaagaatgtttcaataatgataaagcgtaagcgtgcaattgccaaacgcaaaaaggcagaggaagagagaagagagagagaaagacaaaaggcagagcgtgcaagaatgcgtgccgaaagaggcgaaagtgacggacttgttcaggttcacagcagaaccgaccgccgcccccagcagaatcgccaccctgcaaacagaaacaagagaagataatttcttttcttaacggaggaaaaacatggaaatgctaattaaaaacgcagtggttgtttcccctgccgacaagcttaacgaaaaaacagatattctcataaaggacggtgtgattgccgaaatcggcagcggcattacatcagacggagagattattgatgcagacggtctttgtgccgttccgggatttgttgatatgcacgtgcatcttcgtgatcccggtcagactcacaaagaggatattatcacgggatgcaaggcggctgccgcaggcggtgttacaagcctgcttgcaatgcctaacaccaatcccacaaccgacagccccgaaattgtaaagtatattcttgacaaagctaaagacgccgacagccgtgtttatgttgcggcaagcgttaccaaggggctgaaaagcgaagaacctacagacattgacgctgtgaaaagtgcaggtgcaatagcacttaccgatgacggcagacctgttgaaaacacaaagtatttgagtgacgcaatgaaaaaagctccaaagctcggcatgacaattgtcgcacattgcgaggacttgtttcttgccgacggcggtaaaattaacgagggcgaggtttcggaaaagctcggtgtcaagggaatccctgccggtgccgaggactgcggaactgcaagagaaattgcacttgccgccgctcttaacgagcctattcatatctgccatgtcagcaccaaaacaagcgttgcacttatccgtgatgccaaaaggagaggtgttaaggtgaccgccgaaaccgctccgcattatgtttcgctcacggacagggagcttttaagaggtgacgctgattacagaatgaatccgcctctcagaactcaggctgatgttgacgagattatcaacgggctttgtgacggtacgcttgatgccatagcaaccgaccacgcaccgcacacacccgaggaaaaggctgattttgtaaaagcccccaacggttcaatcggcatggaaacctcgtttgcggtctgcaacacatatctggttaagacaggcagaatgacgctttcacagcttgttgagaagatgagcgttaatcctgcaaggattttgaaaatcaacgcaggcactctttcagtcggtgcaaatgccgatgttgttcttataaatcccgatgaagaatggacagttgatgctggtaaacttcacggcaaaagcaaaaacaccccgtttaaaggcagaaccctcacaggtaaggtcaaaaagacaattctcggcggtaaggtagtttttgaagattgagtttgttttaattgtagatgttgatactattaaaattgtgcaaacggtagctgtactacgctcgggcataaatgttttttatttgtcaaactgtctgcacgaattggggacggcggctcgccgtgttcgctcaccaaataaatttaatttaatataaactttaacataaaggagtaaaattatggcacagaagggtgacctcctgtcggtaagacaggatatcagagtagtagacgcaacaatccgtgacggcggtctttgtaacgatttcagatttgacgacaaattcatcaaggatctttacaatgcaaatgttaaagccggtgttgattatatggaattcggctacaaggcatcaaaggaaatctttaacgaagaagatttcggtaagtggaaattctgtaacgatgcagatatcagaaaaattgtaggcgacaacaagacttctcttaaaatcgctgttatggctgatgtcggcagaacagattttaagaaggatattatcgcaaagaaggacagcccgattgacctcatcagaattgcaacatacatcaacgcaattcctgcggctgttgaaatgattgaggacgctgcaaagaagggctacgaaacaacaatcaatattatggctgtttcaaaggcaagaaccgaggatattacagcggctcttgaaactctcggcaaaactcccgtaaacgctttctacattgttgacagctacggcgcactctatcccgaggagtcaagacgacttgcagacctttactgctcaattgccgacaagcacggcaagtcggtcggtattcacgctcacaacaaccagcagcttgcttttgccaacacaattgaggctatgactcagggtgtcagctaccttgacgcaaccgttgacggcatgggcagaggcgcaggcaactgtgcgcttgaacttcttctcggtttcctcaagaacccgaagtatcaggtcgctcctattctcaaaatcattgaggagtacacccacaagtttaaggctgagggcgttaagtggggttacgatattccgtaccttctcacaggtcagtacaacacacatccccgtcctgcaattcagttcgtaaaagaggacagacaggattattacaagttctcaaatgaactttatgatattatcaacagctaattaaatttgtagcggcgttcattgaacgccaatcgaaccgattgcaaaatcggttcgaccatacaaacgatttgaattaaagtaattaaccacgatataacaatacatttgttgtttattcgttttggtttcacaaccaaaacgattggcggtcattgaccgccgctacggttaagcaatgacattgtttaaatcaaaatatgaacgaacaaattgtttttacattacaaaaaatgaggagaatcactatggcatttgacagacttatcgaaaatattgtaaaaatgcagaatcctacggttgcaggtcttgaccctaagcttgactatgttcccgaatcaatcaaaacaaaatgctttgaaaagtatggcaagacgcttgagggtgcggctgctgcactttttgaattcaacaaggcgcttattgacgcactttatgatattgttcctgccgtaaagccacaggctgcatattatgaaatgtacggctggcagggtgttaaggctctttgcgacacaatcgcttatgcaaagtcaaagggtatgttcgttatcacagacggcaagcgtaacgatatcggcacaactatggaggcatatgctacggcacacctcggtcatacagatgttgcaggcgaaagcattgacgcattcggtgcagacgcactcacggtaaacggctacctcggaacagacggtatcaagccgcttgcaaaaatttgcgattcggacgacaagggcatttttgttcttgtaaaaacttcaaacccaagctcgggcgaacttcaggatatgaagcttgaaacaaatgagagcgtttatgagcatatgggcaagatgtgcgaaggctggggcgaagaccttatgggtaagcatggctattcggcagtaggtgcagttgtgggtgcaacatatcccgaacagctcggtgaaatgagagcaaaacttccgcacacattcttccttgttcccggttacggggctcagggcggcggtgccgatgatgttaaaaacgcatttgacgaaaacggtcttggtgcaatcatcaactcaagccgcggcattatgtgtgcatggaaaaagcaggggcttacagaagatgactttgccgttgccgctcgtaaagaggctgagcgtatgagggatgaaatcgttggctgtatcggcaaaattaagcttggatgattcatttgcacaacagaatcacgaaatttttcgttttttatgctttagtgctatgaatttattgactttagcgtgctaaaagcgtataattaaaacgtatttatttttacaactatatttttaaattttctttaaaaagggagatatcagaaatggcaagagtatataatttttcggcaggtccttcaatgctgcctgagtctgtgcttaaaaaagcagcggcagaaatgctcgactacgaaggcagtggtcagagcgttatggaaatgtcacaccgctcaaaaatttacggtacaattatcgagggtgccgaggctcttttgagagaggttatgaacattcctgacaactacaaggttcttttccttcagggcggtgcgtcaacacagtttgcggctatccctatgaaccttatgacaaagagcggtaaggctgattatgttatcacaggtcagtgggctaaaaaggctcatgcagaggctgcccgttacggtcaggctaatgttgttgcttcatcggctgacaagaccttcacatacattccaaagcttgatccttcaacattcacaaaggacgctgactatttctacatttgcatgaacaacacaatttacggtactgtttatcacgagcttcccgacacaggtgatgttccgctcgttgcagatatttcttcctgtattctttcaagaccgattgatgtttcaaaattcggcgttctctatgcaggcgcacagaagaacatggctccggcaggtcttacagttgttatcgttcgtgaggatcttatcggcaacgctatggatatcactcctacaatgcttaactggaaaactcacgctgacaacggttcaatgttcaacacaccgccttgctacacaatctacattgcaaagcttgttcttgaatggattaagaacgaggttggcggtcttgataagatgtatgaaatcaacaagaagaaggctgaccttctctacggtttcctcgattcttcagagcttttcaagggtactgttgttcccgaggatcgttcacttatgaatgttccgttcgttacaggtgacgctgaccttgacgctaaattcgttaaagaggctactgaaaacggtcttgttaatatcaagggccatcgcacagtcggcggtatgagagcttcaatctacaacgctatgccttatgagggcgttgaaaaactcgttgagtttatgaagaagttcgaggctgaaaacaagtaattattgaatattatgatataacgggcgaacgctgttcgcctgttattgtaaattcttaaaataaaaaattaaaaaggattgattttgatgtataacattcttacattaaacaaaatcgccgctatcggcacaagccgtctcggtgataactataaatacggtgacgatgttcagaaccctgacgcagttcttgtaagaagtgccgcaatgcacgatatggaatttgccgataaccttcttgcaattgcaagagcaggcgcaggcacaaacaacattccgaaggataagtgcagtgagcagggcattgttgttttcaatacaccgggtgctaacgcaaacgctgttaaggagcttgttatcgcaggacttcttatttcaaaccgtaaggttattgagggttatgaatgggcaaagactctcaagagcaacggtgcagctgtcggtaagatggttgaaaagggcaagagtcagttcgtcggtcccgaaatcaagggtaagaccctcggtgttatcggtcttggagcaatcggtattcttgttgcaaatgccgctgttgctcttggtatgaatgtaatcggctttgacccgtttatgtctgttggcaacgctctcaagcttgctcctacagttaagctcatgaagagcgcagaagatgttatggtaaattgcgactacctcacaatccatgttccgcttactgacgacacaagagatatggttgatgccgatatgattgctaagatgaaagacggtgttcgtattctcaatttcagccgtgacggtcttgttaattcaacagcagttcttgaggctgttaagagcggcaaggttgctaagtatgttacagacttcggaacagacgatatcctcggtgaagagaatattatctgcctcccacacctcggcgcatcaactcccgaaagtgaagaaaattgtgctgttatggcttgtgatcaggttaaggagtacctcgagaacggtaacatcatcaactccgtaaactatcctgcaatttcacttgcaagaacaaatgctgacgatacccgtttctgcgttgctcacaagaatgttcccgagcttctcaagaaggttctcacacagatcagcggcaatgttgaaaatatgctttcaaagagccgtggcgactatgcttacacaattattgatgttgcaggcgccggtgcagatgaccttgcaaaaatcgcagcagttgacggcgtaatcagagttcgtgcaatctgatttcgattaaaatttaatcgttgaaaatttaatctatgaaaaaagtccgaacacgcaaaatgttcgaactttttgtttgtgtgaatctaaatatgtagcggcgttcagtgaacgccaatcgaaacgattgcaaaatcggttcgaccgtatttcaaaatattggtgtatggttgatttggctttgcagccaaatcaaatggcgatcactgatcgccgctacgtatcgctatatattaaacttttaccagatggtatttttttgcattggcaattataaatgttacggaaattgcaacggcacacaattctgcaacgggcaatgccgaccatacaccgtttatgcctataaatatcggcaaaatcagcattgcggcacactcgaaaacaagcgttcttgcaactgaaatcacggctgaaatcttgccgttgttgagtgcggtgaaaagtcccgatgcgaaaatattcattccgcacaacagataatttattgcaaaaattctgaatccgctgagtgcaatctgctgaattttttcgtcgcctgccgagaaaattccgacaagcggttctgcaaaaaattcagatgccgtaatcattgcaaccgaaattatcagcgtgatttttatgcataatttgaacagcttttgcagtttttcgtgattttgtgcgccgtagttaaagctgatgacgggtgaaactcccgaagtgaatccaaacgaaaccgcagtgaaaataaagtgaatgtacaaaatagcacttatagccgcaacgccttttgcacctgcaaagtgcatcatttgaatgttgaacagcgctgttgtcacggctgttgaaagatttgtcacagcctctgacgagccgtttgccattgcaaagaggatttcacttgccttgaattcaggcttgccaaagtgcagagtctgctttttgttgaaaaagagcaaaagcggaattgcacccacagccattccgataattgtgccgagtcctgcgccgattattccaaaatcccacactgccataaaaagaatgtcaagcacaatgtttgtgcaacccgacagtatcgagaaaacaagcatgatatgtggcttgtctgctgttacaaggtacgattggttgagcatctgccagcacattacaaagccgtacggaatcataacgctgccgtagtcaatgcagtaggggagaattttttcgtttgagccgaacatcatgtacataggttcggcaaaaattgtgaacagcacagcaatgataacagaaatgaccgttgccgtgattgcaacaccggacataagtcggtttgcttcctcctgtctgccttctcccattttctttgcgattatagcatttgagcctgttgaaaacattaagcccacagccataaatacgagcgtgaacggatatacaatattgattgcggacaatgcgtcacttccgacacagttcgcaacaacgattccgtcaacaaccgtgtaaagtgacataaaaaccatcataagaacggttggcagagtgaatttcagaatcgtttttgctttgataggttttgcataaattgatgttgccataaaacttccttaccctcaaatttatatttttcacagactattcaaacgattgtatcataactttgtcgcaattacaactgatttgtctttttttgtaaaatatgctattatatacagacttaaaagcgaaaaaaggggcggttttatgtttaagggcgcagtttttgatatggacgggcttatgattgacagcgaaaggcttgtttattcaatttggcaggaaatgcttgatgaggacggcaaagagtttaatctcgacattttcaaaaagacaatcggacttcgcagtgaggattcctacgaatattacaagtcggtttacggcgatgattttgactatcccgcttacaaggcggagtcgagaatccgctattttaagcgtatcgaaaagaacggtgtgcctgtaaaaaagggcttgtacgaaatttttgattatttaaaatcagtcggttgtaaaatttcgcttgcaacttcaacctcgtcacaaacggctttgaagattatgaagaaaatcaatctctatgataaatttgacgcatttgtgtgcggtgatgatgttaaaaacggcaagcctgatcccgaggtttttttgattgccgcaaagaagctcggacttgagccggtggactgcgttgcgtttgaggacagcattaacggcataaaatctgcacatgccgcaggtatgaccacggttatggttcccgatttggcagagccgacagacgaaattaaaccgatgatagattttttgtgtacggatttaagcgaagcgatagaacgaatttcaaattgaaaatggaaaattgaaaattaatgtcgggcagacagtttgtaatgtaaaaaacatattatgcccgagcgtagtattgcaaccgttcgtacaaatctgtaggggaggatattatccgctacaggcggcggtcgcaaggctacccctacgagtttacggttctggcatattgttgactcaattatccgagaaaattacaaataattacaaatggttacaatttacaaaaatacaattgagcatggttaattattatacacattttccacatagttttcaacaattgttaaaaaagaacggcaatgcctgttgagcgttgccacggttactgcggaaaagggtaaaattaaaaataatcattgaataacagcacgataatatgttatactttggtaaacaacaatctttacggaggacaaaatgaagaaaattataaataaaaaatcactcaagggtgcgcttgctgttatgttgtgtgccgttatggcattttctgtctgtgcctgtgactttgactctgacacagaaccaaccaaaacggatgcacaaattcagtttgataaatattgtgacgatttgttttcggaagaacttgaggatgacgctcttaccgcacattttgacatttcaaatccgtcggactacggtctgaaatatgacgaggaggactataccctcggtcatgtgtccgatgaagatacaaaagaatcctttgatgaactgaaaaaggcaaaaacggatttggaggagtttgaccgttcgggacttacttcttctcaaaagcagacatatgacacccttgaaagctactttgaaattcagctttcatatgagggtacaacagaattgcagagtatatttgcaccgcagtcgggagttgttgcaaacctctttaccaccctgtccgagtttactttctatgaaaaggatgataccgacctttaccttgctgttttgaaggacacaaaacgctatatggacgagtgcattgagttcacaaggaaacaggctgaggacggttactttatggctgaagatattgcacagcagtcaattgacgagtgcgaaaagcatattaagaatgacaagtccgtgcttgttgacgagtttgagtcgagaataaagtcactcggtcttagcgattccgagaaaaagactgttgtcgaaaccaacaaaaagtattttgaagaatactacattcctgctttgaaatcagcaaattcagcacttgaaagtctcaaaaaatcaggcaaaaacgaagaaggtctttgcggttacggcaaaatcggcaaaaagtattatgaggcaattgtcagggacaaaacaagcagcagcatgactcccgaggagcttaagtcataccttacaaacagctttacaaaggttggaatgagcatgagtaatgtttcacaggatgacttgagcaaatttcaggactacaaacccgactttaaggacgccgatgaggtgcttgaatttttgattgagaatatcgaggaggactttccgactcccgttacaacatcttacacggcagattatatgagcgattccgcaaagagcgacaatgtgggagcgtactatgttccgggacgaattgacgatacaagcgttaatatcatcaaaatcaaccccgactttgcaaataagggtatgactcagatgtacacaactcttgcccatgaaggctatcccggtcatctttatcagtttaccgcatcaaatgcaaacaaggatatcccgaatgtccgcaagattttaagctttatcggcgcaaccgagggttgggcgcagtatgcctcgaaatgtacacttgattaccttgatacaagcgagggcattaagaagcttatctacgcaaatgatattctcggctatattctctattccatggtcgatgtcggtgtgaactacaacggctgggattatgaaaaagtcaaagagtatatgtcaacggcactcggttcggctgacgatgagagcgttacagccgcaacaaaagaggcgtatgaccttgcccgttcaaatccgggttattttctcccctataccgtaggctacctcaagatgattgatatgcgtgaaacagccgaaagcgagcttggctcaagctttgacgcaaaggagtatcacacattcattatgaatctcggaatcacaagcattgatgtctacgaaaaagcccttgatatgtggcttgaaagcaagaagtaaatttttggtgataatcttgaatattttttacaggtatgatataattaactcattgatatgataaatctaaattggtatggatttttctaagatgtgattcttattttcgccatacactcattatgggtgtatggcgatttttattttacgcaaggggtgttaatatgggcgttaaagcggaaaacaaaatggcttatgaacctgtcaacaaacttataattcaaatgtcggcaccgccgctgatttcaatgttctttcagtattcatacaaccttgttgacagtatgtttgttgcggggataaatgaacaggcacttgcggcagtatcgcttgcattcccgattacaacgcttatgaatgcgttgtccgtgtggataggtgtgggtgttaatgttttgattgcaggttatttgggacagaaaaatcagcaaaaggcaaattctgcagcggctctcggagtggtaatttcggtagttgtcggagtgctgataaatttcctttcgcttttcataataaatccctattattcggcttttacgcaaaacaaagagatttttgaatacggaattgcgtatatgagcgtctgcgtttttatgcagataccaaatatggtgcatattgtaattcaaaaaatacttcaggcaacaggcaatatgattgctccgatgtggtttcaaattgcaggtgttgtattcaattttgtgtttgaccctttgctcattttcggcataggtccgtttccgaaaatgggtgtgatcggagctgcagttgccacggttttaggctatgttgtttcaacaatcattgcgttgatacagctgtttcttacaaaacaaaaggttaagccggtgtttaaaaactgccttgaaccgcagatgataaagctgatattttcctacggattgccctcgtttgttatgaatgcgttgggagcattcaccgtgaattttgcaaatatgtttttggtgcgatattcggacacggcggttgcatttttcggagcatatttcaaggttcagcagttgatttttatgacggtgaacggactgattcaaggctgtttgcctataatgcggtttaattacagagcgaaagagtacggtcgccttaaacaagcaaataagagcggaacaattattgcgactgttatgatgattgtcggtatgctcttggtgctgattttcccgaaagagatattgtttttgttttcggcatcggaagaaatgtgtgcttttggagtgccggcaatgagaattatgtcactcggatttgtgttcagcggcttttctgcaatgattgcaacctatgaacaggcaacagacagtattatgcccggcgttgtagttcaactgttgcgacagggcgtgctgttagtccccgtaatttggcttttaaacagcgctgttcaaatgacaggcatatggcttgcgttcccaattacagaatttgtcacatttcttgttgctgttgtatttgcaaaaattaaaaatcattgaataaataaaaataacaaccgccaaaacccgatataatggattttggcggttgtttgttatttaaaatatgtttaattttaaattgtttttgcaaaaacattatcagatgattttgctctgaaaattgtttttacgagcaagaatgttatataaacataaagtgcggtgtagatgattgccgtaaattgaaggctaataagctcgtaggagaacagatagtagcaatagcctctcaggcttataagcgttgacacaatcggaatccacaaatgctttgcacttaccaccgcatagacaattaaaataatgtcaagcagataaccgtagcgttcgtgcattgacgaaaggaacatgatacaggtgaacacagtccacgctgttgtcagaagaaaagtttcaaggttcttcaaatcaccctttttatagatgataatgcacatcataattccgagtacggcaattgtcagaaagaccgaaaactgcttgaacagataataatatgtcatatcgtttccgtcacatatgagtgcataaaagttcggacagttcatctgaataagctttccgtagtcggtctgttccgcatatattgtgataatatcgataaacggtctacccataataattgcaggcaggcacattatcacatcaaccgcagggattataaagaaatgcagaatcgaaattttctttgtcgaaatccagtaataaagcagaacaggaatgatgaatacggtttgtagcttgaatgcaaacgcaatgccgatgaacacaaacgatgcaatcggcttgtctttgtgcaaaaacaggattgcaaggattataaacgaggtgtaaattgaatcgcactgcgcccaaaacgatgagttaaaaatcaccgttgccgaaagaagtacggctgagtaggtgagtatcgctttgagccgtcggttattctttgcaaacgaataaacaagtattgcggttgaaattgcaagtacaaaatcgaatattattgatacgattttgtacgcatacagagcatttagcggcaaaagagtcataagatagattatgacttgatacggaatgttgtagttgcccacctgagttgcaagccccgtgaaatcattcagcttgattatgctccaccacgaatttaaaaagctgttgaaatcatcgctttgaaaatccattccgcaggctctgaggaaaattgcaataatcgttaccgcaacgagtaaaaataaaagaatgtgtttttttataaagtcaatgactttgctttctgcttttgtcatagagaaaattcctgttcgggtttaaataaaaccgattttcttcataaccttgcccattgtgcgactgctgattttaagggcaatttcatcggcttttctgtaacagctttcaagatatgccttgtctgcaacaagcttttcgtagcgttcacgaatcggacgaagttcttcaacaactgcctcgcctacagctgtcttgaagtcgccgtagcccttgccgtcaaaatccttttcaatctgctcgtatgaaagacctgtaactgcgctgtaaattgccataaggttatttacaccgtctttgccctccgcatagcgaacctttgcctcgctgtccgtaacggctctcttgaacttcttcattataacctcgggtgcatcaagaagatgtacacagccgttgacattttcatcggacttgctcatctttcttgtcgggtcctgaagactcataacccttgcaccgttctttggaatgaaaccgtccggaatcttgaacacattgccgtaaatgccgttaaaacgctctgcaatgtttcttgtaatttcaatgtgctgtttctggtctgcaccgacaggcactttgtcagcctgatagagaagaatgtcggcagccatgagtacgggatatgtgaaaagacctgcgttgatgttgtcggcatgctttgcagacttgtccttgaactgcgtcattcttgaaagctcgccgaactgtgtgtaacagctgagcgcccatgcaagctctgcgtgagtgtgaacatgactctgaatgaagaaaaggcttttttcaacatcaataccgcaagccataattgaagcataagcatcaattatattcttacgcataacggcaggagtctgtcttaccgtgattgtgtgcaaatctgcaagagcgtaaatgcagtcatattcgttctgcattgtaacccagttgcgaaccgcaccgagatagtttccgagtgtaattgttccgctgggctgtattgcgctgaatacaacctctttttttgtctgattttccattattcccctccgtgattaaagactgtttgcatactcgccgaggatttttattcctctttcaagctgttcgtcagtcggtgttgaaaagtttattctgaaactgtgacaggtttcgttttcgtcagttaaaaatgcgttgcccggaactacgcaaacctttttgagaacgagttctttgcagaaattcggcatatcaatatcctcgggcaagtcgcaccaaatgaaaagacctccgtcaattttatgatatgtgattttcggtgcgcagtatttgtcaagaagctccatgcagaagttcgctttctttgtgtagatttcacgaagctttgcaaggtgagcgttaaagtcatactttgtgatgaattcatcgcatacatattgtgcccagatatttgtatgtacatcgttgccctgtttgcacacaacaagcttttgaaaaatcggctttggtgcaattgtgtaagcaacacgcatgcccggtgaaattacctttgagaatgaaccggcatagattacaattccgtccgtatcaaagctttttatgttcggaacatattcaccgctgtaacgcaggtcgccgtacgggttgtcctcaatgatgagaacaccgtattttttggcaagctcataaactttcttacgcttttcaaggctcattgtaacacccgaaggattttgaaaattcggaattgtgtaaatgagctttgcgttcggattggcttttaaagcctcttcaagcttttctgtgctcataccgtcaggctcaacgggaacacctgcaagctttgcgttgtagcttctgaatgtgttgagcgagccgatgaatgacggtgcctcgcagattacaacatcgccctcgtttacaagagcctttgagcataaatccataatctgctgtgcgcctgttgtgatgagaatgtcgtcattgtcagagcctgtgttatgctcctttttcatatattccgtaaggtgctttctcagcggagtgtaaccctccgaaacgctgtactgcaaaaccgaaatcggatcttctgcaaaaacctttgccgagatttccgcaatctcctttgagggaaatgcatcgggcgacgggtttcctgccgaaagcgacacaacgctcggatcggcggcatatttgaaaatttctctgatagcactcggcttcaggcttgaaaccctgtcggaaaacctgtattccataaaaatatctccttttaagatgataaggattttttaaaattccataccctgtaattctatcacgaattgcatatatgttcaagaaatttgactgtttttactgcgattttattcaaaaaatgtgtaatttattattttgcatttgtaaatgttaattcacggaaattgtattttttgtgctttttgtattgtttttgatgagtttctgttgtataatctaaatgataatgtccttacggtcagagcaaggcttgctttgattcaaacaggagtacactgcgagtaattaatacacttatataattcattgaattcaaattgaatttaaaaatcttcagtttgggagagtaacactatgagcagaagaaacgattacgattattttgatcttgataatttcgatgacagcattgattcccgtgaatatcgtcgcagacagcaacagcgccgttctgcaagctatgccgcaagaccgtcatcacagcgtcccgccagaagacctgtaaaaagaagaaacaaaagaagaaccagaaacagaattattatcgttgtgagcgcattggtaattctgtttgttattatttttgttataacttcaatttttaagggttgttcaaaggaagatgcccttgcaagcgttcccacgggaacagtgggcacaacggcgtctcccgacgaaaccgcaaaatcttcgaccgctaacaaagcagacgagctttctcctacatactttatgacaccgggcataaaggacgacaatacaaacggaactctttcgtacggcatttatgtgtggaacaaaataggctacgaattgttcagcagtgatgacgcaagagcgcagaactatgctcagacaatcaatggctttgcagacaagttcggcagttccgtaaaggtttatgatatgattgttcctaaccataccgaaatgggacttccgcaaagactcaaagacagcgacgctccgtcaacctcacaggctgacaacatcaaggcggcttatgcggctctttccgataaggtaactccgattaactgctacaaccgtcttgcggaacataatacagattacatctactttaagagcgaccaccattggacaggcctcggcgcttactatgcttacacagcatttgccgatacaaacgatttgccagttctttcgcttgatgattgcaaggaacagaaaattgacggctttacaggctcgtttaccaactcggcagacggtcttgacagcgatacggtaagttattggaagttcccttataatgtaacaatggatatcacacaggcagacggttcttccgcaagctatgacagtccctactatgaagccgcagagggcggttcaaacacctacggtgtgtttattatgggtgataatgccctcacggttctgaaatcagcttcgaaaaatgcggcggcaggcaagaagattgctgttgtaaaggaaagctacggcaacgcttttgttccgtatctcaccaataactacgaagaagttcatgttatcgatttcagatatttcaaacataatcttgttgattactgcaaaaccaacggaattgacgaggtgctttttataaacggtgtaatgagtgccaacactcaggttcagcttgacagtatgagcggactttttaactga

SEQ ID NO: 99 - DNA, 12131 bp, unidentified
  source 1..12131: mol_type = unassigned DNA
tcagccattgtaaacctccaaaattctctgtttaaatttttctctgcctactctgtcgattgtaaacttaaagcgttcgctcggctttgcgttttctgcaaagaagttaagagcggcatcacagatttccataagtttttctttattttcgataaacggaataattgtttcgcccttgttgattgagttgccaaaaagtccgccgaatgaaacaatgtagccgtgaattgtgtcccacgcatctgtcgggcaagccttgaagcatctgccgcagtagttacactttgaattgtcaacggaaattttcccgtcctcaagagtgattgcaccctgacggcaggcctttacgcagactccgcagccgatacaagcgtcctctttccatgaaaccttgattccgcccttgataccgacatcgttttcctcagctttaaggcagttgttctgacagcctgttatgccgaacttgaacttgtgcggaagttcctttgcaaaatatctgtcgtcaagctcctttgcaagagcgtatgtatcaatacaaccgccgggacagattgcctcaccctgacaggctgtgattgttcttactctcggaccgcaaacacccggctcaacatcgccctcggcaagtgcgtccttaactgcctcaacatcatcaagctttacaaaaggaatttcaacactttgtcttgatgtgaggtgaacataaccgtcaccgtagttttccgaaacctcggcaattttcgcaagctgtttagctgtgaggttgccgcctacaactctgagcctgagcgaaaaattatttttctgtttttgacgcataaagccgccctttttaagcgtagcataatcaactgccatttctcttactcctccgattcattcacatttatactgtctacagcctgtttgaagtcagactttaaatcctcaatatcctcaatgccgacgctgattcttattgtgtcatcaaacacgcctgcgtttcttttttgttcttctgttccgtgagcgtaaattgtgcttgacggatgaattacaagtgttcttgtgtcgcctatatttgttgcatttgttgcatacttcaaattgttgataagcttaaacgctctttctttacttcctgccctgattgtgaggattgcaccgccttttcccttcaacagcttttgacaaaggctgtaataaggagaagctttaagagccggatagttgacttcgattccgtcctgtgtttcaaagaactttgcaagctcaagagcgttgtaacaaagacgctccatacgaagtccgagtgtttcaagtccgacagagttcataaaagcattaaacggtgcaaggcaacagcctatgtttcgccagataccgtttctcagctttgcaacatatgcaagccgaccgaattttttgtactctgcaagacctttgtatctttccgtattccattcaaaattgccgctgtcaacgattattccgctgattgaatttccgccgccgttaatgtactttgacgaggaatgaacaacgatgtccgcaccgtgttcaaacggccgaataagatacggagttgccgttgtgctgtcgataatgagcggaacaccgtgtgaatgaacaagctctgatacagcgtcaagatcgacaatttcaagtccgggattgccgataagctcggcaaagactgcttttgttttttcgtttatgagcggttcaatctcatcggctgtcaccttgttgacatatcgtgtaacaattccgaaaggctcaagatctccaaacaaatcaattgttccgccaaaaagacctgcgcttgcgattacttcgtcacctgattcaagaatgttcaggagtgccatcgtaacggctgccatacctgacgaacacgcaaccgcaccgacaccgttttcaatggaagcaattctgttctcaaaagatgttaccgtgggattgcctattcgagagtaggcgtagccgggagctctgttgttgaacaccttttcaagctgttcggcagagctgtgcgaaaatgcactgacctgataaatgggagttaaggttgagccaaaagccttttcaccgttaaaccccttgtgaagtaatgcggtgttaaactccataatatcaccaaccccttaatttcatacaaccaacccttttgtgtaagaccgtcgtaggaatttgtctgacggcttcgattgatataggtagattatactccattaatcatagtatttcaataggtttaataagattttacctcttgcacaatttttctttaaaatttgccgtaattccattatttcctacaatgcatatttgtttagtaggtattgatttttaaattaaaaactgttaccattattatatactctttcagcaaacaaaacgcacggaaaggagatgctaaaattgaagatttcaacaaaggtggaattcggaatcatcgctgttattgacattgcgtcacactcactaaacggcaatgcggtaacaactcccgaaattgccaaacggcaaaatatatctaaaaagtatcttgaacagattctctcatcactcagctcggcaggacttgtgcgaggtcagaagggttcaaacggcggttatgttattacaaaaagccttaaagagattacattcaaggacatcataaacgcacttgacgcaaatgttctgagcaatgtttattttaacactcggggcgatgatgatgttatgataagacttatcgacaacagtctttggtcaaagatgtcgtcatatcttcaggaatatgccgaaagcattacacttgcacagctttgcgatgagtatatcaaaaacaatgaaattgaacacaacattccgatgtactacatctgatagattacaaacaaaaagccaccgatttttatgtcggtggcttttcttgtttttatcggattttatttaaagctttcaataacctgacaggttttttcaatgtcatcttccgtgtgcgcaaatgaaacaaacatcgcctcaaactgtgacggtgcggcatagattccgttttcaagcagatgattgtaatactcggcatatctctttgtgtcggctgtggttgccgtgtcatagtcaacaacctttttgtcggtaaaaaatgccgtcataatcgaacccacacggttcacattaagtcctgcgttcttcattgcattttcaatctttgcagacttgcgttcaagttcgggatatatcgaatctttatttttttcaagaattttaagcgttgcaatgcctgcacttaccgctaccggatttcccgaaagtgtgcctgcctgataaacagaaccgagaggagcaacacaccccataatctcttttcgacctccgtaaaccgcaagcggcattccgccgccgacaatttttccgagggttgtaaggtcgggttttactccgtaaagcttttgagcaccgccgagtgaaagtctgaagcctgtgattacttcatcgaaaataagaagtgaatcatgcttttcagtgatttcacgcaagaattttaaaaatccttttttgggcggaacaacacccatatttgcggcacaaggctcaacgattacacaggcaatttcatcaccacagttatcaaaaagctgttgcacggattcttcatcgttatattttgcaagcaaagttgtgtctgtgtagcctttcggcacacctgcgctgttcggaattgaatttgtcagaagtcccgaaccgccctttacaagcaagccgtcggaatggccgtggtaacagccctcgaattttacaattttatccctttttgtaaagcctcttgcggcacggattgcgctcataaccgcctctgtgcctgaatttacaagtcggagcatttcaattgacggcatattttcgcggataagctcggcaagttcaatttctccgctgtggcacgcaccgaatgtaagtccgttctgacaggcagaagtcacggccttgataacatcgggctgtttgtgaccgaggatattcggtccccatgagcagatatagtcaatgaactcgtttccgtcaacatcataaatttttgaaccctctgcacggtcgataaaaagcggagttcttccgaccgaacggcacgcacggacaggactgttcacaccgccgggcataaagtcaagcgcctgtgcgtatagcttttcgctttgagttgtattcataaaagcacttccctatttgtaaaattcgtcaatccattttgcaacatcaagtgcgtggtatgtgattatgatatccgcacccgccctcttgattgcaatcatattttcgcacacaattttcttttcgtcaatccagcctttttcggcagccgccttgaccattgcatattcaccgcttacattataggcaacaagcggaaggtcaaagcgttcgcttgcggcttttacgatatcgagatatgcaagtgcaggcttgaccataaccatatccgcgccctcgtcaatatcatctgcaatttcacgcagagcctctttgccgtttgcgtaatccatctgatagctttttctgtcgccaaattcgggggcagattctgcggcatcacggaacggtgaatagtagcctgatgcaaattttgcactgtatgacataatcggagtgttgataagtccgttttcgtcaagtgcgtttctgattgcagacactctgccgtccatcatatccgaaggagcgatgatatccgcacctgcttttgcaaggctgacagccattttagagaggagcggaagtgtttcgtcattgagaatttcgtgaccgcaaacaacaccgcaatgaccgtgacttgtgtattcacaaagacagacatcggcaataataaggagtgacggataatttttctttatgtatctgattgcgttctgagttacaccgttatcgtcataggctgatgttgcaagctcgtctttatgctttggaattccgaaaataagaagtcctgcaatgccgctgttttcaatttctttaagaatctcgtctgatctgtcaagcgaatattggtagacattcggcattgaatcaacaggctttttaatattttcaccctctgcaataaaaatcgggtaaatcaaatcgcccttgtcaattcttgtttcacgaacaagactgcgaatctgctcgcctgctcttaatcttctgaatcttctcatatatttatccttctttcaaagttacttccttgattatagtttccaaaattccgtctgtgtccttcgtttttgcaatcctgaacgaatttacgccgtgactttcaagtgcctcggcggtaatttcgcctatgcagacaacggaagttctgtcggaaataattgctccgccgtcaaaaaatgtgttcacacccgacgcactcgcaaaagtgataaaatcggtatcaacaacggaattatcctgttttttctcaagctgaatgtcataggttttgacatcgtcaaagtcaatgttgctatcagccaaaatccgagtgagttcgggcgaaccgttttcggcacgcagaatcaatactttttcgccgcttttcaccgtttttgcaagcaaaattccaagttcacgggttgtgtagacattcggaatacagtcggcaaaaattccgtacttttcaagtacagccgcagttcccgaaccgatcaccgcaaacttaatatttgcaaaactgcggatatcctttttcagcttacgcagtcggctcataaaaatttctgcaccgttcatacttgtaagcaccacataatcgtagccgtcaataccgtttattgcattgtcaaaaacttcgttgtcatgatattcaatcacctttaaaaggtcgtgccttttgacctctgcacccgaaagcgtgagcattttgccgagcttgtcggagagctttctcgtacccgtaactgtaaccgaaacatttttcaaaggtcttgtaattgtgggggtaaagtcaaattttgcggtttcgccaaccactataacggcaggcggtacaacctctgctgatttaacattttcgcagattgtcgagagagttcccctcacggtctgattttttgcacaagcgccgtttgacacaactgcaacgggagtatcctccgatttaccgttacgaatgagattttccacaatgtcggggaggtttctcaatcccataagaaagacaagcgttccgtcggtttcggcacacttctttatattttcgggcagggtgtcctgtgccgtatgtcccgtgattatatgaacacttcggctcagatttctgtgtgtaacagggattcccgcaagttcgggaacggcaatcgaggaagaaattcctggtacaatatcaaacggaatatcggcacttttgagggtttcaatctcctctccgcctctgccaaacacgaacggatcgccgcctttaagacggacaaccgttttgccctctctcgccttttcaacaaggatttcgttaatattttcctgcttttcgctgtgtctgcccgaacgctttccaacacagattttttcagccgtttcgggtgcaaaaccgagcaatgactcatctataaggctgtcgtaaacaagcacatcgcaatgtctgatatactccgcaccacgcattgttatcaagtcaaaatcgccgcatcccgcaccgacaatatacactcttccgttactcaatttcgctcaccagcctttttgcaagtttgattctgtttgaaatttcatctgttccgctgactgtttttttgcagtcggcagacagagaaagcattatcctgtcgttttcaacctttgaaattgcaccgacgggagttgaacaatcggcattgaggctgagcagaacctgtctttcggtttcaaacgaaagcattgtatttttgtcactgatttcagcgagcattttggaaacctcgctgttttttctgctttcaatcgcaactattccctgacacggtgcagggagaaattcatcggtatcaaacggagttaccgtgtaatcctcaccgttgcaaaggtcaagtctttcaagtcctgcctttgcaagcacaagagcatcgtactcaccgttcaacagctttttaagtcgggtgtcaacattgccccttatatcattgaattttgcattaggatagattttctctgcaaaaagctttcgccttaaactgcctgttccgatgacaaagccgtccttaatttcaaaattgttgcgtgtaacaaaaacatcgccatagctgccccttggcaacacggcggaaatttcaagtccgtctgcaatttttgtcggcaagtcctttgcactgtgaacggcaacatctgtttctccgctcaaaagtgacatttcaagctccttgatgaacacaccttttccgcctaaagctgtaagcggtttgtcaagggttttgtcgcctgttgtcgagatgtaaaccgtttcaattttaacattcggaaaacggtttttcagcgtttttattaacatttcggtttgtgcaagggcaagcctgctttttcttgttccgatttttatcgtcattgttcgtattcctcaatcaaattttcaacagttttttcatcgggttcaagtcccgaaaggcaaagcgaaagaagctgttcaaaaatcttccttctgtcatcttccctttcaaccttctccttaattatcgggcgatatttccacaaaacctcggttgtattttcgttcatactttcaaggattcccacaaaaagctctttaagatattttgcgtaaatcggacttttgcccgatgttgtaattcctgccgttatgccgtttttgcttgcaattgcaggaaaaataaatccgcatttttccttatcgtcaactgtgttgacaagaatatttttctcattgcaaagctgaaaaattctgccgttgagcgtttcatcatcggttgcgctgacgacgcaaaacgcaccgtcaagatcgctgtcacaaaatctgcggtcaatgattttcacatgcaaagccttgatttcatcgcagattttcggggcaacaacggttatgtccggcgaaaacggcatcagcttttcaatctttctgagtgcaaccgtaccgccgccgactacgagtatttttttgttttcaatgtcaatataaaacgggaagtatgccattagttattctctccgcactttctgtagatttcaagaattcttgcaaattcttctgccgaaacatcggatttcagcttataaatgaatttttccgaaaaatctgacggcattgcgtttttcacagactgcatacacggcagaaattcatgaaaggcaaggtcttttttgagaacttcaatttcctcaaaaattatttcttttgcactttcaacgctgtcaagtttgagagcattgttctcgtttgcaagctgttttatgcagtcaatgttaatgagccttacaccgcttattttgggaatattttcgtcaatgtcgggcggtacggcaaggtcaataaacagccttgatttttcggtttttatattgttttttaaatcataatatgtaaccgtgtaatgcggtccgcttgtggcactgattacgcagtctgcaaaatcaaacgctttgtatctttcgtcataatcaatcacattcgcacccgtattttcaaaaacagtttctgctttatgttttcgtgaagtcacggtaacgcttatacctttgtgtgacaaaagatttttcacaacggttgagccgaccttgcctgttgcaccgattacaaggacattcagctcaccgtctttgaattttgccgcctcgtttgacgcaagagttgcaacggaaaccgatgtttttgaaatggcggtttcggtcttgattttttttgcacaggcaacagccgcctgaacgcacatattaagctcataggcaaccgtgccgttgtcctttgcaaaggcataggctcgctttagctgaccgagtatttcatcttcaccgataaccattgattcaattccgcctgccaccctgaaaagatggagcaaagccctgtcaccgtagaaaagacagatgtatttttttagttcgtcaaaatcaattcccgaaaaatccgaaagaacggtttcaaccgttttcacagatgattcgtcaccgcaaaaataaacctcggttctgttgcaggtgcagagaatcaaacactcgctaatattttcagaataaaaaagttcgtcaagaaatgtctttttttgttcatcgggaaaggcaagcttctttctcacaaccacatttgaagttttgtgacttacgctcaggcagtacataaaaatttcgctccgttacaaataaaatccgacagtaaaatacacttttaaagttattttattactgccgacagctattgtcaattaaagttagtcagttattttaccactaaacctatctgtttggtatgttttgattatactacattcaccgttccatgtcaataaatttcgggttttgcttgacaaaaacagtgattacaatataaactatacaaagatacctcccgtcagcaaacagcgggagttttattccgatgtaaatacttatggtaccgataggaatactaaatgatttgaatatgtattaaggagcgtttttatgcttaatcagttttcaagaacacagcttttgattggcaaagaagctatggacaggctttcaaaaacaagagttgcaattttcggaatcggcggtgtaggcggatacacggcggaggctcttgcgaggagcggagtcggcgagcttgaccttattgacgatgacaaggtgtgccttacaaacatcaatcgccagatttttgcaacaagaaaaacagtgggcaaatacaaggttgatgttgcagaggaaaggctcaaggacatcaatcccgaaatagtcatcaacaaacaccagaccttctacactcccgaaacctcggaaaaattcgacttttcaaaatacgactatgtagttgacgcaattgacacggtaacaggcaaaattgagcttgttatgcaagccgacaaagccaagacgcctatcatctgttcaatgggagcaggcaacaagcttgatcctacagcgtttgaggttgccgacatttacaaaacctcggtctgtcctcttgcaagggttatgagacacgaactcaaaaagagaggtatcaaaaagctgaaggttgtttattcaaaggaaaagcctatcacacccgttgacgatatggcaataagctgtaaaacaaattgcatatgccctccagaaactgagagaaaatgcacccaacgcagacaggttcccggcagtaccgcatttgttccgtcagttgcaggtcttatcatggccggcgaagttatcaaggacttgattaagtaaactaatatagttgtcttttcattttaatttgctattgttaaaaattgcaatttatagtataattatcctaataactatttagaggttgcaaaatgaacagatatataattattgcaggagttaacggaacaggaaaatcaagtttgcgtggtgttcttgaaggacaggaagttttgcttggtcatataattgatgctgatgctattgcaaaaatgaacaattacgataacataaaggcgggtaaaaaagcagttgaagaaataaaatactgccttgataacaatatttctttcacacaggaaaccactctttcaggacacagaaccgagaaaacaattcagcaggcgcgaaaacagggctactatgttattatgtactatgtaggtcttaactcaaaagaagaaagtcttgcaagaattgaaaacagggtacggaaaggcggtcatgatattccgaaaaatgatgtgtgcagaagatttgataaccgcttcgattctttaaaaaaaattgttccgctgtgtgatgaagtaattttttatgataatgaaaacggatttattaaagttgccgaaataaaaaacaacaaatttaattattcaaacggttacagacctaaatggattacagaatttgaaaataaactgaaattaggctaaggaaaagcaaagcaccgagaaaaattgccctcggtgctttgcttgtttttataggattttttacagttgatatcgtgattaaacagattagatgataaccgattcttcctgaagtgatttgttacggagaatctgaacctcatcgcctttggtaataaaaagccgataaagaaatacattgaccttttccccgacggtaatcggagtttcgtcaagtcctctgtacgtataaaccgtgcctccgtcacattttacggcaatttcgatattgtcgcctctgaacgaagtctttataacctcaccgacggatacagacgctttttgtgcggttgtttcgctgagctttgtcacctttacaaattcgggacggataactgcacggtcaacattatcaacaacatcaaaggtcttgaactttgtataatcgtcaagcgtagtagtctgaccgaaaaatgatgcggaaaatgcggtttggggatgctgataaatgtcaatcggcgagcctatctgctcaattctgcccttgtttgtaattataatttcatcggcaacctcaatagcctcgctctgatcgtgggttacaaatatacttgtaacgccgagcctttcaatcatatccttaagccatgagcgaagctcctgcctaacctttgcgtcaattgcggcaaagggttcgtcaagcagaagaagattcgggtttggcgcaagcgctcttgcaaaggcaacacgctgtttctgaccgcccgaaagctggcttggataacgcttttcaagtccttcaagaccgataagctttacaagctcgtttactctttccttgataaatttcttgctctttttctgaattttcagaccgaaagcaatgttatcaaaaactgtcatatatctgaaaagagcgtagttttggaatacaaagcctatgcctcttttgcttgcgggaatatcgttgacaacctttccgtcaattacaatttcgccgctgtcgggattttcaagtcctgcaatcatacgaagaattgttgttttgccgctgcccgaaggaccgagaagtccgataagcttacccttttcaataccaaagtttacattgtcggatgccttgtaatcaccgaaagttttatttatatttttaagctcaacatacat

SEQ ID NO: 100 - DNA, 6096 bp, unidentified
  source 1..6096: mol_type = unassigned DNA
atggaggacaaacaaatggcaaagaaagttgtattagcaggcgcttgccgtaccgcgatcggtactatgggtggaaccttaagcacaactcctgcaccggagctgggcgcaatcgtgatcaaggaggctctgaagagagcaggcgttgctcccgaagcagttgaccaggtatatatgggatgtgtaatccaggctggccagggacagaacgtagcacgtcaggcagcgatcaaggcaggacttcccattgaagttcccgcagttaccatgaacgtggtatgtggttccggtctgaactgtgtgaaccaggctgcacagatgatcatggccggtgatgcagatgtcgtagtagcaggtggtatggagaacatgtccatggctccttacgcaattcctcagggacgttatggttatcgtatgggtaacgcaaccatggtagataccatgatcaaagatgcactttgggacgctttcaatgattatcatatgattaagaccgcagacaatatctgcgaagagtggggacttacccgtgaagaactcgatgagttcgcattaaagagccagttaaaggctgaagaagctcagaagaacggtgctttcaaggcagaaatcgttcccgtggaagttaagaagaaaaaagagaccatcgtattcgataccgatgaaggccctcgtcatggttctaccatcgaaggtctggctaagcttcgtgccatcaatcccggtggattcgttaccgcaggtaacgcttccggtatcaacgacggtgcagcagctatcgttgttatgagcgaggagaaggctaaggagctgggcgttaagcctatggctactttcgtagcaggcgctctggctggtgttcgtcccgaggttatgggtatcggccctgtagcttctaccaagaaggtaatggctaagaccggtatgaagatcgaagacttcgatatcatcgaggctaacgaagcattcgcggcacagtccgtagcagttggtaaggaactgggcatcgatgtagataagcagctgaaccccaacggcggtgctatcgcgcttggtcatcccgtaggagcttccggatgccgtatcctggtaactctgctgcatgagatgcaggcaagaggtgccaagaccggtctggctactctgtgcatcggcggtggcatgggctgctccaccatcgttaagatcgaggattaattttataaatattcgctggggcggtagaatctctatcgccttagtgtggttttgaaaacacgaatagaaatgtgaaatgaggtaaaaacatggattacattttgtatgagcagaatggtaatgtggcaaccatcaccattaaccgtgagaaagcactgaacgcactgaattctcaggtgctggatgaactgaacgctacattggatgcagtagatctggcaacggttcgctgcctggtgatcaccggtgcaggtgctaagtccttcgtagcaggcgcagatatcggagagatgagcagcctgaccaaggcagaaggcgaagcattcggcaagaagggtaacgatgtgttccgcaagatcgagaccttccccattcccgtgatcgcagctgtcaacggcttcgctctgggtggtggatgtgagatctccatgagctgtgatatcagaatctgttccgataatgcagtattcggacagcccgaagtaggactgggaatcactcccggcttcggtggaacccagagactggctcgtctggtaggtgcaggcatggcaaagcagatgatctacaccgcacgtaatatcaaggcagcagacgcttacagaatcggtctggtaaatgaagtatacagcgccgaggttgatgctgacggcaatgtagtaaagagcgcacaggaagtaatgctggcagcagcacagaagatggcagcgaccatcgccaagaacgctcccatcgctgtacgcaactgcaagaaggctattaatgatggcctggatgcagatatggatcaggcagtagtcatcgaagagaagctgttcggagattgcttcgagacagaagatcagaagtatggcatggctttcttccttgacaagaacaaggaaaaagtaaaagagcctttccaaaataaatagttataatagtttttcaaattaatgatagaatgtatagaaaacaggaggatttaccatgaaagtaggtattatcggtgcaggtaccatgggacagggcattgcaaaggcatttgcccaggtagacggatatgaagtagctctctgcgatatcaagcaggaatgggctgaaggcggcaaagccaagatcataaaaggctatgcaagactggtagaaaaaggaaaaatgacccaggaagcagttgacgctatcgtagctaagatcactccgggtctgaaggaagacctgtgtgcagactgcgatctgatcgtagaagctgcatttgagaacatggaagtaaagaagaccaccttcggtgagctggacaagatctgcaagcctgagtgtgtattcgcttccaacacatccagcctttccattaccgagatcggcaatggactgactcgtcctctgatcggtatgcacttcttcaatcccgcagaccgtatgaagctggttgaggtaatcgcaggtgtgaatactcccgcagagaccgtggataccatcaagaagatctccgaagagatcggcaagacccctgttcaggtaaacgaggcagcaggctttgttgttaaccgtatcctgatccctatgatcaatgaagcagctttcatcaagatggaaggtgtatccgatatcgcaggtatcgacgccgctatgaagctgggcgctaatcatcccatgggacccctggagctgggtgacttcgtaggactggatatctgccttgccatcatggatgttctgtacaacgagaccggcgacagcaagtatcgtgcatgtcctctgatccgtaagatggtacgtggcggcaaccttggtgtgaagaccggcaagggcttctatgtatacaatgcagaccgcaccaagacgcctgtggatgcacagtaaagtataaacaatccgtaggcatcaaagtcggggttcttagaccccgacatcatgataattacaaccaagtataaataacaatggaggattaacatcatggattttacattatccaaagagcatgagatggcgagacagctgttcaaagagttcgccgagaacgaagtaaaacctcttgcacaggaagttgacgagaccgaaactttccccagagagaccgttgagaagatggctaagtacggcttcatgggaattcctgttcccaaggagtatggcggacagggctgtgataccctgacctatgctatgtgcgttgaggagctttccaaggtttgcgcaactacaggcgttatcgtttccgcacatacctctctgtgtatcgatcctatcatgaccttcggtaccgaagagcagaagcagaaatatgttcctgatctggcaagcggccgcaagatcggtgctttcggtctgaccgagcccggtgcaggtaccgatgcccagggtcagcagaccaaggctgtattagatggcgatgagtgggtcatcaatggttccaagtgcttcatcaccaatggtaaagaagcagatgtttatatcgtaatcgcagttaccggcatcgtagagaagagaggcagaaagatgaaggagatctcttcctttatcgttgagaagggaactcccggatttaccttcggtaccaaggaaaagaagatgggtatcaagggctcttccacttacgagctgatcttcaccgactgccgtatccctaaggagaacatgctgggcaagcagggacagggattcaagatcgcaatgcacactctggacggcggacgtatcggtattgcttcccaggctctgggtattgcagaaggcgctttggagagaaccgttgcttacaccaaggaaagaaagcagttcggaaagtccatttccggattccagaatacacagttccagctggctgatatggctaccaaggtggaagctgccaagatgctggtatacaaggctgcacgcaagaaggacgagtacaagaccaatcctaagatctcttactctgtagaagctgctatggctaagctgtatgctgctgaggttgctatggaagttactaccaaggctgtccagctccacggtggttatggttatatcagagagtacgaagtagagcgtatgatgcgtgacgctaagatcaccgagatctacgagggtacttctgaagttcagagaatggttatctctgcagatctgttgaagtaagcgttgttgaatgaataattagaaaagtaaggagaaaatacaatgaagattgttgtttgtattaagcaggtgcccgataccaagggcggtgttaaattcaatcctgacggaactcttgacagaggcgcaatgcttgctatcatgaatcccgatgataaggctggtctggaagctgcactgaagctgaaggacgagttcggcgcagaagttaccgtactgaccatgggtcttcccaaggcagcagatgctcttcgtgaggcgctggctatgggtgctgacaaagcaattctggttaccgacagagtactgggcggtgctgatacctgggctacttccactaccattgcaggtgcattgagaaaccttgactatgatctgatcattaccggtcgtcaggcaatcgatggtgataccgcacaggttggtcctcagatcgctgagcatctgggacttcccgtaatctcttatgcacaggacattaaggttgagggagacaaggtgatcgttcagagacagtatgatgacagatatcatgtagtagaagctaagatgccctgcctgatcactgcattatccgaactgaataagcctcgttacatgactcccggcggaatcttcgatgcatgcaaagcagagatcactacctggggcagagctgatctgaaagatgttgatgacagcaaccttggtctgaagggatctcctaccaagatcgcaaaggcatccgataaggttcgtaagggcgcaggtgagaagatcgttcccgattcacccgaagacggagcagcttacattgttgctaaattcaaagaaaagcacatcatctaatataggaggcaaaccatggtaaccaataatattgaagaatacaagggtgtatatgtgttcgcccagcaggtagacaatgagatcagtggtatcgcattagaactgctcggcaaaggtaaagagctggctgcaaagctggagaccgaggtaaccgcggttctgatcggttataacgtaaaaggactggctgataagctggctgagtatggtgcagataaggtgatcctcgtagatgatcccgaactggagacttacagaaccgagccttatgcacatgcactggcatctgttattgagaaatataagcctgagatcgttctggtaggtgcaaccgctatcggacgtgatctgggacctactgtttccgcaagagttcagactggtctgaccgcagactgtaccgtactggaaatcggtgatttccctctcgttgctatccccggacaggagcagaagcacaatcagctgctgatgacccgtcctgcattcggtggtaacaccatcgctaccatcgcatgtcctgacaacagacctcagatggcaaccgttcgtcccggcgttatgcagaagattgctcctatcgcaggtgcaaaggctgtgatcgaagagtacaatcccggatttactccgaacaacaaatatgtaaccatcaaggaagtcgttaaggctgtatccgataccgttgacatcatggatgccaagatcctggtatccggtggacgtggagtaggcagcgcagagaacttcaagatcctggaggatctggcagaagttctgggcggtaccgtatcctgctcccgtgcagttgtagataacggctggaaacccaaggatctgcaggttggacagaccggtaagaccgttcgtcctcagatctacttcgcaatcggtatctccggtgctattcagcacgtagcaggtatggaagagtctgatctcattgttgccatcaacaaggatgag

SEQ ID NO: 101 - DNA, 32987 bp, unidentified
  source 1..32987: mol_type = unassigned DNA
  misc_difference 1033: note = a, c, g, or t
  misc_difference 1034: note = a, c, g, or t
  misc_difference 1035: note = a, c, g, or t
  misc_difference 1036: note = a, c, g, or t
  misc_difference 1037: note = a, c, g, or t
  misc_difference 1038: note = a, c, g, or t
  misc_difference 1039: note = a, c, g, or t
  misc_difference 1040: note = a, c, g, or t
  misc_difference 1041: note = a, c, g, or t
  misc_difference 1042: note = a, c, g, or t
ggcgacaatgagagcatgagcatcagcaaccagaaactcatgctccgggactttgcagaaaagcatgggatgttccagtatgagtattatgtggatgacggctatacgggccgcaatttcaaccgccctgccttccagcgcatgatcgctgacattgaggcggggaaaatcggctgcgtcatcacgaaagacctatccagacttggtaggaactatatcgaagctggaagctatatcgaaatctttttcccaaaacacaatgtacgctatatcgccatcacggacggcgtggacagcctgacccgtcaggaaatggacatcacgccctttaagaatatcctgaatgacatgtacagccgggatatttccaaaaaggtgctggcgggacgcatgacccgttcccggcagggaaagttctgcggcggacaaccgcctcttggcctgatgcgtgacccggaggacaaagggcatctcatccttgacccggatactgcgccggttatccgaaaaatctatgatatggcactggatggctggggctgtatgcggattgcaaagcagctcatggatgataaaattcctattaccagagtaaagagtaatacagaatgtgacgtgaattactattcatggggaagtgcgaggatcagccatatcctgcggaatcccttttataagggcgcacatcttgtctgccggacacatcagaaaggcatccgctccaatacctatgacattatcccccgtgaggactgggaagtgattgagggctgccacgaagcgattgtgacaccggaggaatgggaacaggtgcaggaaatcattgaccgcagaccaaccattatgaaaggcaacgcctgccccttctataatctgttccacgggcttgtctactgcgccacctgtgggaagtctatgcaggtgcggtatgaaaaggtcggcagaaccggcaaaaaccgtttcaccggcgagatgcgagagccgattgacaaggcatactatatctgccagacttacaaccggctgggcaagnnnnnnnnnncagccacaagattgaagcaagggatttatataatctggtgctgaaggatatacaggaactggcggtgcaggccatgaaggacgctgatgcgttttaccagcggctcagcagccggatggagcgccggtatctggtggacgcttcccagacagagaaggaacggaaacggctggaagcccggaatcaggaaattgacggaatgtttttaaacctgtacaccgataaggccaaaggcatcctgactgaacagcggtttatgaagctgacggcggcgctggaacaggagcaggaagccaaccagaagcgcctgcacgatctggcggtgatgcagagccgggcggacgcacaggaaagcgaagtccgaacctttatcaaggaaatccggcgctatgccgccattgaggaactggacgagtccgtactgaaccggcttatcagcaaaatcctgatcggcgagatcaaaaaggtggacggccagaaggtgcaggaggtcaggatcggttataactttgtcggggaaatcccggagattgcagcgtaaatagtttgccccatctctcaaccattgagggatggggcttttgttgtggataaagcgatttgtctgaacgatagtattatcccatataatccgttcgcagtgcttctaccagatcacatttcagaattttcttgccacccaggtaatatgccagtgcaacaaagccaaaaagtgccacgataaaaagcaggataggaacaatgggagccactgctaaaaattccattggattcaggtagcttgccgttatcatcaaccacacaaacacaacagtaatcggcagcgtgatcagaaccgggcggcctgcgatgacgagggcctcgatccaaaacatttttcgcataccttccggtgtcatgccgatggacatatatctcgcaaattctctttttctttgccggataaatcccaacgtgttggaaaacacattggcaatcccgatgaaggccagcagcacacacagcgctccaacgaccagtttgtatccgttcagcatagcatcgttgtccagcttttcctgaactcgattttccatctcgaaagaaatgtcgtgtcccagcacattcttcagttcaacctcaatcgtgctcagttctgtcagggttctttctttttctgaaagaatgcgaatataagtgtctggttccgcatttccaatcgtttcctcgatttgttcccaggtggaaagtgacacaaattgaactaaggcatagttatcatattcttctcttaaaaccggcggctcttgcgtaaaacccaaaactgggattgtcacagtcgcagccgtgtctccctggctctgcaaaatcatcgtgtcctggttttctgataaaaaaggaacgtattccttgtacctgaaattgctatgtatgttatcccaaatacggttaagaacaacacttccattctcagttgaagaaacgccgatctgttcacagtacatggcaaaactgctatcatccataattacaatgggagcctgaatggtataaatcccatccgctatacggacatcgctttctgcgattgcttcaagacctcccaggctttttacttcttcgctgacagagtccaccggaacagagcaaacagcatttgccttttgatagattatgctatctgtatcagccaatgcatggatttcatccgtataagcaaagtcctcgatctttgtgtcctcaagtgttgccatcacatcccaggcattctgatagcgttcaaagtaggtatggtttgtactaatcccagatagcgtaaaaaagctcagcattaacgcgaagcccaaaaaagaaagagttaacgacaacgtagcggttcgcagagatttcttctgtgctttcagcgcatttccggcaagctctccttcggtcccaaataaaagcgcaagaatacgggacttttttctccgttttaactgcaattcccccgtattttttatagcttccagcggggtcattttgcttaatttccgagccggcagccaggcagaaatcagcaccgtcaaaaacgagacaagaatggtgagggcaaacacgagtggatgatagataaaggtagcctcatgtctgccgacaataccatctgcgagaacattgacagcttggatggctccaaacgtcaaagcaattccaataaaacttccgagtaaaataggaatcacacaaagtatcgccgcttcctgtaagaggcaggtacgaatttgccccggtgtcgccccaatgctggagaaaatgccaaattgatgtacacgggcattcatagatactgcaaaggagttatgaatgattaaaatcaaagacactgacactagaaggagtacaaaaagataaaaagccatcaataagggtggcgtgctatcctgcggatcgttgatgaaataacttgacaacagcgattcatgataggatacggaagtttcaggaacgcctacctgctgggcgataagaggcatatcctgatatacagccttcatgtcatcaaagcaaatatcaacgacaagcgtttgctcgtcagataaatcttcattgatttctgccgtttttacattggcaaaattttcgatctcagacactacatcttcttcaaatgccccggtaatacgtccttgccaggttccttcttctaaaataacggattctacctcataattccagaagttataaaatagaccgcacagtaaagacaaaaacaaagcggaaataaaagctgcgaccagaacggatatgctggaagcccgattcttttttataaatcctatcgaatagtctttccacatatccttacctccgtttctgatcgctgatgatttttccatcctctatggtgataatgcgatccgcttccaacgcaattttttcatcatgggtgatcaaaagaatggtctgatccaaattgcggttggacaatttcagcaagtcaataatttcctctccgtttttccgatccagattgccggttggttcatcggcaagcaggatggcagggcgataaatcaaagaacgagcgatagcaactcgctgctgttgtccaccggaaagctgactgggcagtgattccagtttatcttcaattcccagggaatgtacaatctgctcaaagtattcctgattgggtttgcgcttgtctaacaggagcggcatgagaatgttttttcggacggtaagggtggggataaggttataaaactgatagaccaacccgactttcctacgccggaaaatggctgcctgtgttcggttcatggcagatagttctgtcccctctatcaggactttcccttctgtcggcttatccacacttcccaaaatatgaagtaaggtggattttcctgaacccgacgcccctacgatggcaacaaattctcctttttgtacggacaggtcaatatgatccagtgcaacaacctgattgtttcctgcaccatatacttttcggacgttttcacatcttaatatttccatgtcactttctcctttctaccggatggttttgcatacagtatagcaaagtaaagtgacatctcagtgactgtatatccttatttcaaagcaagcaccgccgttttgcaaattgtaagcggttatagttccgttctgtaattcaaaaatggaacgggtaagagccaggccaattccaatgccattggatgctgcacgccggccccggtaaaaacgatcaaaaagatgcggtaagtcttctgtgtcaaagcccgccccgtcatcccatacccgaatttctacatagagaggattgcctgcatagtcacaatggacgattccgcccggtttagaatattccatacagttttttatgagattgatgagggcttccattgtccactctaaatcccccccaaaattcaatacagccattttctggaatgtcaacagtaatatgatttttccgcaacagatcgttcagattatctgccgccagatttaacaccgtataaagatcgaccttttcccgcttaagcggcagcgttccagcatcaattttggaaagcatgagcaaggattcttccagacggtttaatcgcttcaactgctgtttaacctgttctgcgtaagcccccggaatctctttttccataagctgcaacgataaaaatgccgctgtgatcggtgttttcagttggtgcgcaatattagccaggttctctgcaaaatttttctttgcggcgactgccgtttctcttgtttgataaagcatcgtgacagttttgtatatctcgtcctgcaaatgagaatattcatcttccttcgcttgtatcaatgtcccgccagcaccgatattgacttgttccaaatactcggtcaaatcatcgattcgctttcgattttttctgcgggacagaaagatcccagccccaaaagcacaagcggtcacaaggaaaaatagaatcggaaaaagcacggtatccggtgggaaatcatagcaaaaatcatcggcccggtatccgtattttcccagataatcgttgcctctgagttcttgttcagtcaatgaatgatagtctttcagagccgctaatagctgcggctcggcttcaggagaatttgccaatatggtttcgcataatgccgaagtgtgttcaaatgcaatctgccggtatgtgtgcaggaagaaagcggtggtaagcatcatgcctgccgcaagaacagcaaacggaaaaatcagaagtattttttgtttccatttttcgctcattgtgtgtcctccatacggtagccaaaacttcggatcgtttttaagcaggctggatgattcagcttttcccgcagtcttttcatggtgaccgtcagcgtattatcatttacatagttcccgctgcgatcccaaacttgctctaataactggtttctggtaatcgtttttcccttgttttccatcaggatcaggagaatccggtactccggctggctgacaacgatttctttctgcccattataaacagccgttttctctttatccaacatcaagtcatcgcagaatagttttgtgtgggttacgccctcggttctccgcagcagagctaaaatacgcgaatacagaacagcaagatcaaagggttttaccacataatcatccgccccattttggaagcccgtaacaatatcatgggaatcaccgcgaaccgtcaaatagacaatagggagggttatccatctttcccgaatccaaaggcacaattcactaccttgtccgtccggcatattccagtccaacaaaacgatcgtaggcaaatgaccgatcaatgctttcttgacatcggcaatcctatcaaaaacagtcactttgcaattctgctgctccaaatattcttttacagacttgccaatcgtttcgtcatcttccgcataataaacttcaatcatgatgttctcctcctgattgcccggcagcttttcttcgtccgtctaatggctttgttgcatttttcgggataagccaaacggttcccattttttccgctcctgggatacgtcctgcggaacagtaataatttatccaacggggtgttactccccaaattttatttgcttctttcaaagtcatgtaatccatactgcacctccatattgtcatattataattcgtactctcgaatagtacaagttaagcagtatgagtcaggctgaaaaattatcagaatggtagccacaaagataaattctttgaaattggctaccttttttaattcaccacttgacattgtggcaaagatattatttggtatggaaataaaaaattagtatgataattatattttaatttatttaattcccaatcattatcttatataatttttctatagatagagcgaaattgcttataggaggccattatgaaaaaagatctacttatgacaattcaatataaagatatgggccctttttcgctttttattttttaatttgaaacatatcttttctaagatatgttttttttacaatcaaaaggaggattaaagatgccaaaaagagaagacattaacacagtattagtcattggttcaggaccgattattattggtcaagcatgtgaatttgattattcaggaacacaagcttgtaaagcattaagaggattagggtataaaattgttttagtcaattctaacccagctacaattatgacagatccagaaactgcagatgtgacatatattgaaccattgaatgtagaaagattaacacaaatcattgaaaaagaaagaccagatgctttacttcctaacttaggtggacaatcagctttaaatctatgttctgaattaagtaatgccggagttttagacgaatataacgttcaagtattaggggtaaaagtagatgctattgaacgtggagaagaccgtttagaattcaaaaaagctatgaatgaacttggtattgaaatggcaagaagtgaaattgcaaatacggttgacgaagctttagctattgctgataaattaggatatccagtagttgtaagacctgcctatacaatgggtggagcaggtggaggacttgtttacaatgttgatgaattaaaaacagttgtaaatagagggttgcaagcaagtttagtacaccaatgcttaattgaagaatctattttaggatgggaagaattagaattagaagttgtaagagatgctaaaaataacatgattacaatttgttttattgaaaatattgatccattaggagtacatactggagattctttctgtagtgcaccaatgcttacaatttcaaaagaagtgcaaaatcgtttacaagaacaagcttatcgtattgttgaatcaattggagttattggaggtacaaatgttcaattcgctcatgatccagtaacagatcgtattgttgttattgaaatcaatccaagaacatcacgttcatctgctttagcttctaaagcgacaggtttccctattgctttaatttcagcaatgttagcggctggacttacattagatgagattccatgtggtaaatatggaacgttagataaatattatcctgatggggattatgttgttattaagtttgcacgttgggcttttgaaaaattcaaaggagcagaagataaacttggtacacaaatgaaagctgttggggaagttatgagtattggtaaaacttataaagaagcttttcaaaaagcaattcgttctttagaaacaggacgttatggtttaggatatgcaaagaactttaatgatttatctaaagatgaattattaaaattattaattaatccaacaagtgaaagacaattcattatgtatgaagctttaagaaaaggagctactgttaatgaattatttgaacttacaaaaattaaacattatttcattgaacaaatgaaagaactcgttgaagaagaagaaaaaattgcttcttataaaggaaatcaattaccagatgacgttttaaaacaagcaaagaaagatggatttgctgataaatatatttctaagttattagatgttgaagaaaaagaaattagaaatcaaagacttgctatgggtatgcatcaagtctgggaaccagttcatgtatcaagtacaaaagatagttcttattattactctacatataatggaaaagatcaagatgaagtatcaaataataaaaaaatcatgatcttaggtggaggacctaacagaattggtcaaggtattgaatttgattattgctgtgttcatgcttctcttgccttaaagaaattaggatttgaaacaattattgtaaactgtaacccagaaacagtttcaacagattatgatacatctgataaactttattttgaaccattaacattagaagatgttttaagtattcatgaaaaagaaaaaccattaggagtcattgctcaatttggtggacaaacaccattaaatcttgcaagtcaattaaaagaaaatggtgtaaatatcttaggaacaacacctgaaacaattgatatggcagaagatcgtgacttatttaatgaaatgatggaaaaattagaaattccaatgcctgaatcaggaatggctgtaacaatcgatgacgctttagaaatcgctcaaagaattggttatccattaatggtaagaccatcttacgtattaggtggtagaggtatggaagttgtttacgatgatgattcattaaaacaatatatggcagctgctgttggggtaacacctgatcgtcctatcttaattgaccgtttcttaaatgatgcgatggaatgtgaagcggatgctatttctgatggagaaaatgtttttgtgcctgctgttatggaacatattgaacttgctggtattcactcaggggactcagcatgtattttaccatctaaacatattccagtaagacatgtacaaacaataaaagaatatactaagaaaattgctagagaaatgaatgtacgtggtttaatgaatatgcaatatgcgattgctgatgataaagtttatgttttagaagcaaatccacgtgcttcaagaacagtacctttagtatctaaagtatgtaacatcaacatggtaaaacttgcaacagatatcgttacgcgtgaacttacaggtagaccatcacctgttaaagatttaaaagatagaaagattcctcatattggtgtaaaacaagctgttttcccattcaatatgttccctgaagttgatccaattctagggcctgaaatgagatcaacaggagaagtattaggtttagctaattcttatggagctgctatctttaaagctgaagaagctactcaaacaaaattaccaacatctggtcgtgttttaatttctgtctctgatagagataaaaaagatgttgttgctcttgctagaaaatattatgatgcaggatttgaaattgtggctacaggtaaaacatttgaattaatcaatagcaataacattccagctatcaaaattaaaaagatcaaagaaggtcgtccaaatattgcagatgctcttacaaatggtgaacttgatatggtaatcaatacgccacatggtaaagaatctgcacatgatgatagttatattagaaaaacagctattaaaatgaaaattccatacatgacaaacattgctgctgcaaatgcagctgtagaaggtatcttagaagctgaaattcatggaacacatgaagtaaaatcacttcaagaatatcataaagcaattaaagattaatatgaatgattgttaggaagtcataagatttcctaacaatttttttatttttacaaaaaagaagaaaaaataaaaaaagagcgaataaataagtaggaggactacttatggaaacaatcaataaaataacaacgagtaaacaaacaacaatgtatgatcatttatgtaagatgatcataggaaatgaagaagaatcataaaggcagctgtagatgaagcaaatcatttaaatgttgaagaaattagaagactaataaaaggagtacatataggtgatctaatagttaatccacattttcatcttgtagataaaaagggcttcatcaaagatgaaggtatggtttattatgatattttatgttatattgatgtaccacaagaagatggaaagaatatacgggtttatttatatgtagaaatacaaaataatccttatccaggatattctattattaccagaggatatgcttatatttcaagaatagtatcagagcaatggggaagcgaatatgatgataaaaactatgatgggatgaagaaggtctattcattatggatcatgccaaaagcaccaaaaagaaaagatgggtatatgaatgtctatgaaacaaatgaaaggattatttgtggaacgacagtagaagaaaaagaaatttatgacaagggagtaattcttgcgatatacttaaacaaagaacatgatgaattgttgacaccattgacggtccttctaaataatgtattagattataagggaaagcaaagaattatagaagaatatggcttgaatacaaagaaaatagaaagtgaggttaaagatatgtgtgatttaggtaaaagcattgtcttagaagcaagaaatgaaggcaaacaaatagaacgtaaagaaaagaatatagcgcatgtaaaaaaactaatgataggattataaatgtcatttaaagaagcgattaacttattagaaatacctgaaaaggaagtaaaagaaatagaaaagtattttcaatcatagaaagagagtaaaatctcttttttcttatactaaaaaatgttaataaaataaaattacataataataaaaaattataaattggtgttgaaaaatgttgtcaaatctactatactattcaagaacaaaaggagatgagggctatgttacaacaaagtgtcaaatatgattgcttacaattgaatacgagtacctcatttttatattctcattgtttctaacatatcatttttaattgatatgtttttttataacaaaaaaaggaggaaaatatatgaaagcctatttaatcttagaagatggaaacgtatttgaaggtgaaagcgtaggagctgataaagaagttgtcagtgaatttgtatttaatacttctatgacaggatatgtagaagtactgacagatccttcctatgcaggacaatcagttgttatgacatatccattgattggaaactatggagtatgtttagaagatcaagaatctacaaaaccttatgttgaaggatttgttgtaaatgaacttgcaagacttggaagtaactttagaaaaaatgttgatttaaaagattatttaattgaacatgatattccttgtattcaaggaattgatacaagacatttaactaaaattattagaaataaaggttgtatgaatggaatgattacaacaacaaaatatgatgatttaagtgaagtgatggaaaaaatacataactttaaagtaactggtgtcgttgaaagaacaacatgtgacaaaccttatacagtaggtagtggagatcgaaaagttgctttattagattttggtgctaagaagaatattgctaaatcacttgcaaagagaaatatagaagtcacagtttatccagcatctactcctgcaagtacaatcattgaaggaaactatgatggagtgatgttatcaaatggtcctggagatccaagtgaaaatgttgaaatcattaaagaagttaaaaaactatctgaaagtggtttaccaatctttgcaatctgtttaggacatcaattgatggctttagctcatggttttaaaacagaaaaattaaaatatggacaccatggtgcaaatcatcctgttaaagatttaaatacaggtcgtgtttatatttctacacaaaatcataactatgtaatttgtgatgattctattgatcgaaatatcgcaaaaccttggtttattaatgtaaatgaccaaacaattgaaggtgttgaatatattggtaaaaatattaaaacagtacaatttcatccagaagcatgtgctggtccattagatacagatgctttatttgatgaatttgaaaaaatgatggagggtaaataagatggcaagagatttaagtataaaaaaagtattagttatcggttcagggcctatcatcattggtcaagcagcagaattcgattatgctggaacacaagcatgtcgtgctttaagagaagaaggggtagaagttgttttaattaactcaaacccagcaactatcatgacagatgctgatatcgcagataaagtttatatcgaaccattaactgtacctgttgttaaaaaattaatcatggaagaaaaaccagatagcattttaccaacattaggtggacaaaatgcattaaacatcgctatggctttagcggatgaaggattcttagaagaacacaatgttcgtacaattgggacaaatacagataccatcaaacttgcagaagatcgtttagaatttaaaaacttaatggaaagaattaacgaaccatgtgctgcatccatcgttgttaaccatgtgaatgacgctttagaattcgccgaaaaaattggttatccagttgttgtaagacctgcttatactttaggtggtactggtggaggtatcgcaaataatgaaaaagaacttcatgatatttgttcaaatggtttacgtctatcaagagtaagtcaatgtttaattgaaagatgtattgctggatggaaagaaatcgagtatgaagtaatgagagatagtgcaggaaactgcattactgtatgtaacatggaaaacttagatcctgttggtgttcatacaggagatagtattgttgtggcaccaagccaaactttatcagataaagaatatcaaatgttacgttcatcagctttaaatatcattacagcattaaatattgaaggtggatgtaacgtacaatatgcattaaatccaaatagctttgaatattgtgttatcgaagtaaacccacgtgtttctcgttcatcagctttagcttctaaagcaacaggttatccaattgctaaattagcggctaaaattgctttaggatataccttagatgaaatcaaaaatgccgttacaggtaaaacatacgcttcttatgaaccaacattagactatgttgtatgtaaaattcctaaatggccatttgataaattcgttgatgcttcaagaaaattaggaacacaaatgaaagcaactggagaagttatgtcaatctgtaataactttgaaggagctttaatgaaagctttacgttctcttgaacaaaatgttttctacttacatttagatgcctttacaaaattaacacatgatgaattaaaacaaaaattaaaagatgttgatgatcaacgtatctttgcagtagctgaatccttaagaaaaggaattactgaacaagaaatccatgaaattactaaaattgatgtttggttcattgataaaatcaaacatttagtagaaatggaagaaagaattaaaacagaagaattaacagttgatttattaaaacaagcaaaaagattacaattcccagatagagtcattgctgaattaactggaaaaacagaacaagaaattcatcaaatgcgtaaagaaaataatattgtttcagcttataaagttgttgatacatgtgcggcagaatttgatgcacaaacaccttattactattcaattcaaggtggagtgaacgaagtagaacctcaaagagaaaagaaaaaaatcatggttttaggatcaggaccaattcgtataggacaaggtatcgaattcgattactgttcggtacattgtgtatgggccttaaaagcagcaggatacgatacaattattgttaataacaaccctgaaacagtatcaactgactttgatattgcagatcgtttatattttgaaccattaactgctgaagatgtagaaagcattgttgatattgaaaaaccagatggagccatcgtgcaatttgggggacaaacagccattaaacttacaaaagctttaacagatatgggtgttaaaatcttaggaacagatgctgatgatgtagatgcagctgaagatagagaaagatttgatgaaattcttgaaaaatgtcatattgaccgtccaagaggttcaacagtctttacaacagaagaagccattgaagttgctaataaattaggatatccagttttagtaagaccatcttatgtattaggtggtgctggtatggaaattgccttaaatgatggtgatattaaaaagttcatgaaaatcattaatagacaataccaagaacatccaatcttaattgataaatacttatctggtaaagaagttgaagttgatgcagtttgtgatggacatggtatcttaattccaggtattatggaacacgttgaacgtgcgggagttcactctggagatagtatttctgtttacccaccacaaaaaatcaaacaagaaattaaagatgttatcgttgattatacaaaacgtcttgctaaagcattacatgttgtgggattaatcaatattcaattcattgtttatgaagatcaagtttatgttattgaagttaacccaagatcttcaagaacaattccttatatttcaaaagttacagatatcccaattgttgccattgctacaaaagcaattatgggacatacaattgaagaacaaggatattcttatggaattgttccggaaaaagaaacaattgcagttaaaatgccagtgttctcatttgaaaaaatcaaaggtgcagaaatttctttaggacctgaaatgaaatcaacaggtgaagttttaggtatttctaaaaacttagatgaagctatttataaagcattcatgggaacaggtattcaattacctaagagaaagaatatcatttgtacaattaaagattcttctaaagaagaattcttaccaatcgctaaacaatattatatgtttggttatgatttatatgcaacagaaggaacatataaattcttaaaagaacatgacgtacctgtacattttgtcaatcgtatctgtgaaaaaacaaatacaatctttgacttaatgtttacggatacagttgatttagtaatcgatattccaacaagaaatgataacttaaaagatggcttcttaattagacgttttgccgtagaagcaggtattccaatttatacgtcacttgatacagcaaaagcacttattgattcacttgaaaaacgtaaacaaggtgtaccatcattaattgatattacaaaattaagataaaactaaaaagaacaatgtagtaatactaaagcattgttcttttttatatgaaaaattaggttatatcttattggatataacctaattctttacatgcgtaataaataccatcttcatcaatagaagttgtcacaaaatcacttaatctctttaaatcactatttccttgtcccatacaaatagaaaacgatgcatgcttaaacatttcaacatcatttaaagaatcaccaaaagcgacataattatctatattccataacttcataaaataagcaatacctgttgctttagaaatgcctttgattgtaatatctgcataactactttcaccaaccattacatctaattcatcaatagctttaaattcttgataatcatatcctaaaggaccataggcaatcatggcacctacttcttgatttgtatatgtacctacagttggaatagggttattgaaataattacatgagcgaataacatcttcatttggttccatattaataattcttggtgtacatttaagtgctaaaggaatgttatgttttttagaagcttctagagcttttaaaaccacttctcgagaaagattttctttgtgaattaaatttaaatctttatctaataaagcttgtccactattacatacatagccatcaaaagaaaaagtatcataaatatgtgtattttttaaagaatccacacttcttcctgttgaaactagtaaaagatgtcctttttctcttaataagtttaaagctttaacagtgctttctggtacttgatgatctgtggttgttcttaaagtaccatcaatatcaaaacaaaacaatttcttcattatttaccttgagggaaaaatcttgcaagtgaatttgcgactgctgaaataggcattgtttgaaccacaattttaccagggccagtaaccactgtattaaataatccctctcctcctaaaaatttattttttaaaccaggaactgattggatatccattttacaagtagcatccatcattgcaagataaccggtatcaataaccatttgttgacctggtagtaaattatattctacggtacttccatcaatttcaataaaacatgttccgtgtcctgaaatctttgttaaaataaaaccttcaccaccaaatataccagaagaaaatttcttattaaagcaaaccgatgtttctacattttcttcactagctagaaaagcagatttttgaatgatgacttcttttccaggttctacatcaatagcgacaatttttccagggaaacttgaggcaaaggcaatcaaaccatctttgtttgccgtataactatttctaaataaagtttcaccagaaaacattctaccgatgattttaccagcaccaccaccatttgtttccattttcatacatggatccatccaagccatagcaccactatcactaatcattttttcacctttatttaaatgacaaataacaacagggagagtatctccaacaatttcgtatttcataatttttctccttttataaagccacacaaacaggttgaataatatctaaggtatttcctgtaggcttaatttcttctttttcttcatcaaatgtgtaaagctccaaacgatcatcttcttgactagcaacaacaatataacgatcatcaataatattaaaatcacgaggtccttttccagtatgcaccatataaagtaaagtgatttttccagtttcttgattcacacgataaaggacaatactatcatgacctctattagaaacaataatatgtttaccacttgatgtcatatgaatagcagcagcacttgaaaagccatggaaatgacgaggtacacaatgaataacttgaatcaaagtaaagtgtccatcttcatattgataaaccataatactatttgcaatttcgttaacaagataacaatatttaccatcatgagaaaaaatcatatgacgaggcccactaccaggaatcacagattgacttaatgatgtttcttgtaatttttcattaataaattcatacataataattttatcagcacctaggtcaacactgtaaagatatttatgatcaggagtaattcctacataatgagcatgaggacttgtttgtcttttaagtaaatcaattcctgaaccatgatggtgaacaactgaaagtttatctccaattttatgatcctttaaagggaaagcagctgttgctccaacgtgataatttgcagtaaataaatatttttgatcaggacttaaacataaatgagtataagaacgaccatgggaattataaaaagaaagttgttttaaatcatcttcttcaatatgataacttgcgatacctcctccttcaccaacacgtgcatcttttaaagatacataaagataatcatcttttttaataacataagaaggaaaatcttcggtaggaatatgtttatttaaatgaagttcatttttagtttcatctagagtacatacataaagacctttttcttttcctttagcgtaacttgatacataaaaacgatacacaaaatcgcctccttttgaaataattgtaccataaaataactataaaaaactttctatataagaaaaaaagagatgcatgaagcatctcaaaacattatttttgcccaatgcctttacaataagtttgaacaacttcataatctctatctaaaacaacaagatcagcatcataaccaacgccaattgttcctttacgatcatcaacatgtaaacatcttgctgggtttgatgtacatgcattgatcgcgtaattaacaggaactaaagcatcttcaattaagatttttaatcctttattcacatttaatgtagatcctgctaagttaccagcttctactaagtgtgcactaccatctggataaataacaacttcttgtccaccaaaatcaaatttagtacctacagggaatcctttacacattaaggaatctgtaatcataatactgtaatcaggaccttttgaagtaaagaaattatttaaagctgcaagagttgaatgatttccatcacaaataatttctccatacatatttctaatacgtaaagcaccaccaacaagaccatttgcacgatgcgtaaatggtgtcattgcattataaacatgagtcatacttcttgctccatgagcgtatgcttgaacagcttgttcataagttgcatttgaatgtccaatacttacgaccacattattttgactacaatattttgtaagagcgtaatcttcatcattttcaacagccatagtaatatatttaattaaaccatgagcagctttttgatatcttttaaattgttcaatattaggttttacacaatattcttcaggttgagctcctttatgtgctttatttaaataaggaccttcaaaatgaatacctaagatttctgcaccttcataaccttcttctacgacttttgcgacattacttaccgcgtttgtaagaacttcttcactttgagtaagagttgtcgcaaggaaagaagtaactccttcatcaacgattccttttgcccattttcttaatccttcaggattagcatcatttgtatcaaagccataagctccatggcaatgaatatcaataaagccaggaagaattcttaaatctccataatctttcgtaacttctttttcattgtaaggatatatttctttaataattccatcttctaattctaattgtgctggcgtgaattgatccgcaatccagacttttttactttgtataatcataatttcacctcatatttattatagaacactttacttatctagacaagaaacaactcctcttatttctaataaaaattcaatttaccttacctctaaattagtatataattagagtcataataaggaggaagaggatatggatgaaaatttacttttatcattaattgaaaacaacgcgaaaatggaagtcgttgatcttgcggccgccttaaacgaaacagaagaaaatgttgataagacaattaaagatttagaaaaaaataaaacaatctatggttatcatactttgatcaattgggataaaacaaatcacgatgtgtgtacagctgtgattcaagttaatgcgaaacctgaaagagattatggatatgatcgtattgcaaaaaaaatctataattttccagaagtagatacaatgtatttattagcgggaaattatgagtttttattaattgttaaaggaaaaacaatggtggaagttgctaaattcgttaatagtcgtttagcggttattgaaggtattgaaagaacagccacaatgtatgttttgaaacaatataaaaacatgggtaaacttgttgaggatgataataaagatgcagcagaaagattattggtaactccataatggattttgaaaaaattgtaaatcctattgtaaaggatattccaccaagtggaattcgtaaattttttgatttagctaatcaaatggaaggtgttatttctttaggggtaggtgaacctgattttgcaaccccttggacaattagagaagctgcaatctattcaattgaaaaaggaaaaacattctatactgcaaatcaaggattattagaattaagaaaagaaatttgtaaatatcaaaaaagaagatttaatttagattataaaccagaacaatgtattgtcactgttgggggatctgaaggaatcgatttagcctttagaacaattattaatccaggtgatgaagtcattttattacaaccaagttatgttgcttatacaccaggtgttgcacttgctggtggagtagtaagaaacattattttaactgaagaaaatgaatttaaattaacacctgaacttttaaaagaagctatcaatgaaaaaacaaaggccattcttttaaactatccaagtaatccaacaggtggatttatgacaaaagaagactatgaaaaattggtgcctatctttaaagaatcaggaattatgatcataactgatgaaatctatgcagaactttcttatgaacataaattctgttcaattgcatcttttgatgaaatcaaagatcaagttattttagtgagtggtttttcaaaagcttatgcgatgacaggatggcgtttaggttatgttcttgctaatgaatatcttattaaaatgatgaaaaagattcatcaatatgtcattatgtcagcaccaacatgtgctcaatatggtgccattgaagcaatgagacattgtgacgaagaaattgaaaaaatgcgacaagcttatcttgcaagaagaaatttcttagtcaaaacatttaatgaaatgggacttaaaacatttacaccacaaggggctttctatgttttcccatgcatcaaatcaacaggtttaacatcggaacaattctgtgaagaattattaaatgatcagttagtagcctgcgtgccaggaagtgcttttggtgaagctggagaaggttatattcgtgtttcttatgcctatagtttagaagaacttaaagcggcaacaaagaaaattagaaaattcttagaaaataagggagttatttaactccttttttttggttttaaaacagatacaaattaatcataaaaatcatcattttcctataatatagataaagaaaaggggatgattttaatggtagttaaaagttatgaacaaatgacagatgtatcaattatggaagtaaaaacatatttattaattcatagtgacggaatttatcaacaagatatttatgatttaatgaatacgtgtattgatgtttttcaattaaaaagaaaattaaataaaagaaaagatattcaattatggcttttttcaaatattaaaagatatattgattgtagtttatcttataatgaaatggaatatcatttagtcatgatgaatttattaatcaatcaacattttaaaccattagtcgaatataaatataatttattttattatattttagatcatagtgattttaatatagaaatttattgtctagtaaggcatttgcttacatttcaaatgaatcaactcaatcaagtcattttaggtatgacacattataaaatgatgagtgatgaacaaacacattatcaagcaagtcttattcttttattagaaaaacaatataaacaagcttattttcatttaccatttgttacaatagatgaatcatttaaacgctttgaaaaatctctttataattattcaccatcccgttatgaaatgttgtatcataaagataagacatattccacattgtatgctagataggagatcattatggatagactttattacacatatttaattattaaagaatctttagattatatacctgctgttgaaataaaaaaactacttgaagaaaactatcaaattaaagtagatattaaaacaatttatcaagcaattagaaatattaatgaattatctaaatatatttatcaaaaagaaatcattaaaactaaacatcgaaaagggtatagtattgatgaagaattctttaatgatggacaatttcaatatctatgggatagtgtgcttttcaataatgatttaaatgaagatgaagtaaatgctttactcacaaaattacaaactttaagttcaagtaaacaactttcacgtattcaaaatcaaccaagaaaaaatcaaccaagaaattataatctgcttttaaatatgacaaccgtcattaaagcaattcatgaaaagaaaaatatttattttaaatatgtaagttatgaaatcaaaagaaataagtttgtagaaattgcgcataatcatggaaatcataaagaaaataatgaattctatattatttctccttataaactaattcaaagagattctaaatactatgtattaggttattttaaccaacgacctggtaaactttctatttatcgtcttgatcgtatgcgtcttgtaagaaatcataaaagcccttttgaagaaggggaacaatttgatttagaacaagaagttgatcatataaatatgtatgtttcaggacaaaaggatacacttgaaattagttttgatgaagtggttttaagagaagtcattgatcaatttggacaagatcatcctgttaaaaaagactttgaaaatcgctatcatcttactatagaagatgttcttatttctgatggattgataggatggctcatgatgttacaagatcatgtaaaagttattaaaccttattctttacaagagaaaatgaaaaaaagaattgaaaaaatgtttatacaatataagtagagctatcatttagatagctcttttgtctttttccaattaatatttttgatttgtttaataataggttgaaatacatttcttttatcttttggataaatcgcataataacgaacatgggcttctggatcagtaatcggtattaaaatacgattatcttctgcctcttctctttgaatcgtgatattgcttctaaaattaggcaaagcagacatcttagtaagttcattaaaaacagaaggatcatcttgaaataaaagatgtgattcaggaatcattcgttgacaaacttcattccaaaaaccaatgtgtgaaagaagtaaaacactttgaccgtttaaatcagaaaaagatatttctctaaaaggtgctaaaggatgtgctgggggaacagataaataaagagattcatttaaaaattcttgtgaaatatattttttatcttgtaaaggatgatgtaaaacgattaaagaaaaatctcccttgtctagtccttcaatcaatatattttcatcttgaacaagagtactttcaatttgggattctgtattatttaataaagcatattcaacaccccataaaggagctggtgcacaagaaccaaaagaaatatgattttgacttagttttgtgagttccttaatcatttcttctcgtccatcaagtaacttttgtgcaaattctaccgcaagttttccattttcattcaattcaattttatttttcttacgattaaataaagaaagtcctaaatcatcttctaatctttgcatagatcttgtaagtcctggttgagaaatcaacaattcttcagcagcttttgaaatggttttatttttcgcaatggatacaagatgttcaagttggttaaattcaatcatagtttcacgtccttttcgttattataacacactatgactttgagttatagtgagacaattgaatgataatgtgcttttttaatgcatatattaaaataaaaatattaataattagtggaagccctcgtccaagagaaaatacaaagattgccctcgatgaaatggttaaaatctttgatcaagaagatattgaaagtgaaattgagcatgttggaaataaggatattcgtggatgtattgcctgtatatcatgtaaagcaagattaggtcattgtgtctttgatgattgtgtcaatgcgattgatgatcaaaagtttgaagaggcagatggacttgtcgttggaacacctgattattatggctctgccaatgcgaccttagttgcttttctatataatacgtcctttgataaaaacgatgaaggttggaattttatggcaatatttggtaaaaaactatctttggatagctttttttgtataactgacagttatagtgagatgatttattgatattgtacttttgtttctttgaaatctacaataaagatgtaaggaggaacaagatatggaatatataactttggctaatggttatcaactaccgatgttaggatacggtactttacatataccccctaaacaaacaaaagagtgtgttttaaaagcctttgaagctggttatcgtttgattgatacggccgcttcttatcaaaatgaaaaagaaataggggaagccattaaagaatcaaaacttaaaagagaagaaatctatttgacaacaaaggtatgggttcaagatgccggttatgaaaatacgttacaggcatttcatcaatcattagaaaacttaggagttgattatttagatctttatttaattcatcaaccctatggtgattattatggctcatggaaagctatggaagaactttatcaacaaggcaaaatcaaagcaattggtgtttgtaacttttcaccagaaagattcatggatctttatatgaatagtttgatacaccctatgatcaatcaacttgagtttcatcccttctatcaacaaaaaaatcaaaaatgtgttttaaaacaatgtgattgtctgttagaagcatggggtcctttaaatgaaggacaacgcgatatctttcatcatccaatgttattagatattgcgaaaaaacatcaaaaatcagtttcacaaattattctaagatggcatctagaaaatcacattattgccattcctaaaaccacacatttaaagcgtatgaaagaaaatatagatatttttgattttcagttagataaagaagataaaaaacaaatagaacaacttgatttaggttatagtgaaattattgatcatcaaaattatatgaccgcaaaatggcttaataaatataaaatacatgattaaaaggagaaaggaatatgttattttactttacaggtacagggaatagtttgtgtgtggcgagacaaattgaagaaaagcccatcagtatccctcaaatcttacatcaagaaaacttaaaatttaaagatgaaaaaataggaattgtttatcctgtttatgcaggagaagcacccaaaattgttttagagtttttagaaaaggcaacatttgaaacagattatttctatttgattttaacttatggaaaagatgtcacagatgctcctgaatgtatcgcacgcttattagaagaaaaaggaagacatgtaaattatattcattctattttaatggtagataactacttaccatcttttgatatgaatgaacaaagagcaatgaataaaaatgttgaacaacaaatccaacaagcacttcaagatatccaaaataaaaaagaagaaattcctgaagcgacacaagcaggaagagatttccatgcttctgccaaagaaatctttgtgaaaaatccagaactcattaatggtgaacaaattacggtaaccgataaatgtgttggctgtggtatttgtacaaaggtttgtccaagaggtcttttctatattgaagataaaaaggctaaaagaaaacaaaatacctgtgaattttgcttagcatgtgcacaaaactgtccatcaaaggctatcatcacaaaattgaaagacgccaatcctaatgcacgttatagacatgaaaaagtaagtctaaaagatattattgaagcaaatcaacaagtataactgacagttatactaacatgcactatttatattgtacatttatagaatttaaaactaaaataaagatagaaattggaggagataataatgaaaacttttgaattaaataataaacaaacaatccctgcagtaggatttggagtcttcatgattcctaatgatggacctacttacgaagcaactttagctgctttaaaagcaggatatcgtcatattgatacagctgctggttattgcaatgaaagtgatgtaggaaaagcaattaaagatagtggtattgatcgttcagaaatctttattacttctaaattatggttacaagattatggttatgaaaatgcgaaaaaaggtattgaaacttctatgaaattattaggagtagattatattgatctttatttattacatcaaccttatggtgattatttaggagcttggaaagctttagaagaagcgtatcaagcaggtaaaatcaaatctattggtatttctaatattactgtgaacttatggaataaatttaaagacggtatgacggtaatgccagcagttaaccaagtagaatttaacccatttgttcaacaaaaagaattaagaaaagtgatggctgaaaatgatattcgtttagaagcatggtatccattaggacatggaaataaagatttattagaaaatgaaacaattgtttcattagctaaaaaatatcataaaaatgctggtcaaattatcttaagatggatttatcaagaaggagttatttctttacctaaatctacaaatgaagaaagaatgaaaggaaacattgatatctttgattttgaattaacagatgaagaaatgaaagcaatgcaagccttagataccaataaaccatctcataatcctgaagatcctgccaacgaaacacgtttaatggggttaaaaattcatgactaattttattactttaaacaatgggtaccaaatccctcaacttggatttggtaccattcaacaatttggtaaacaaattgaagacaatgtagcttttgccttaaaccatggctatcaactcattgatacagccaaccgttatgaaaatgaagttgaagtaggaaaaggtttaaaacaatcaggattaaaaagagaagattattatttagaaacaaaattaggacctacactttatgaaaatgatcacgctattgatgatactttaaaaagattaggcgtagactatattgatgttatgattttacatcatcccgttaataattatatctatgcttataagatgctagaaaaagcctatagagaaggaaaaatcaaagcgattggactttctaatttccaagtttcacaaattcaagaaatcatggatcaatgtgaaataccaccaatgattatgcaagtagaatgtcatccttattatccagcagaacatgtatatgatttttgtaaaaaaaatcatatacaacttcaatcatggtaccctctaggacatggaaatagtgatatgttggaagaggcaatctttatagaacttgcaaagaaatatcataaatcaacggtacaaattattttaagatggcatcttcaaatgggatttggtcttgttccgggaagtaaatcattagatcatattgaagcgaacgcacaaatctttgattttgaactaacagatgaagaaatgaaagaaattgaaaaagtgaataaacatacacaattttataaagtgactaaagaatctttacaaagacttgccacaacaaaatgtaattttgaagaaggagaataattatggaatacaaaacattaaataatggagtgaaaatgccagttgttggttttggtgttttccaagttaaagatgaagaagaatgtaaaagagttgttttagatgcgattgatgcaggatatcgtcttattgatactgcacaatcttatggaaacgaagaagctgtaggtaaagcgattcaagaaacaaatgtaccaagagaagaattatttattacgacaaaagtatggatttctaattatggttatgaaaaggcaaaagcttccgttgaagaatcattaaagaaaatgcaattagattattttgatttagttttattacatcaaccatttaaagattatcatggagcttatcgtgctttaattgatttgtataaagaaggaaaaattaaagctattggtgtatctaacttctatccagatcgtttagtagacttagctttagatacagaagttgtaccagctgttaaccaagtagaagtgaatcctttccatcaacaagatacagctttaatttacaatacaaaatatggtgttcaattagaagcatgggcaccatttgcggaaggtaaaaatggtatcttcacaaatgaaacacttgtagaaattggaaacaaataccataaatccgtcggacaagttattttaagatggcttgtacaaagaggaattgtgcctttagctaaaacagttagaaaagaaagaatgcaagaaaacttaaatatctttgattttgaattaagtgaagaagatatgcaaacaattgcttcacttaataaagacacaagttcattcttctctcactatgatccagcaactgtagaaatgatttgtggcttaaaacgctagtggagaaaagtttatagcatgcttgatagtgtaagtggttagctctatataaataaaacaaagtgatctcttaatgaaattaggtttatatttaaaatatgtaagaaaatagtgggacgtagttctcacttttttgtataactgatagttatagtggtatgagatatcaataatgtacttttatgggagtatggataaaataatattagatagaaatttgattaaaggagccaggttatgaatgattcaacaaaaataaatgatattttaaaaaatctgttatttagcgatataggacaatttttattcaattacaaataatatgatcctaaaagatgtagactatttacttccttatcatagtcatattgaagtaagtacaactttagaagtattataatatttagaaaagcaaaaacaaaaaagaaatatgaaaaaactctaacccttatggaacctaaagaatggtataaagcaagtgaacttataaaagatttagatattaaagaaagaagaacaagagaacttttaaatgaacttgaagaaaaaggagttactaagggtaaacgttgtaggaaaaaataataaaaagtgagttcgtgtttataaacatggacttttttcattttacataaacttaacataaaccatacgttcttttgatttttgaaagtgttgaaaaacactatgataggagtgtcttaagaaaaggaaacaaaaataaataatatcttaagagaaaacaaaggaaggtaaataaaaaatgaaaaagaaagtattaagtgttttaatggttttcatgatgtgtcttggtttagccggatgtggcggaggatcaaatagtgcatcagatgacattagtggaaaggtaagtttaaacggatcaacttcaatggaaaaattcgttaatgccttatcagaaggaattaaagaaaaatatccaaacttacaattagaagcacaatttacaggatctggtgcaggtcttgaagcagttgcttcaaaaacaacagatatcggagattcttctcgtgctttaacagatgaagaaaaagtaaaaggattagaagaaaatattgttgctatcgatggtatcgcaacaattacaaacaaatctaataaagtaacaaacttaactaaagatcaattagcaaaaatctatacaggacaaattactaactggaaagatttaggtggacaagatgaagcaatcgttgttatcggacgtgaagctggttcaggaactcgtggagcatttgaagaattattaggaattgaagatcaatgtcaatatgctcaagaattaaatgaaactggtgctgttcttgctaaagttgctaaaacttctggatcaatcggttatgtttcattagatgtattagatgatacagtttctcctcttcaattagatggtgttgaacctagtgaaaaaactgtaaaagatggaagttatgctttacaaagaccatttgtaatggctacaaatggaaaaattagtgaacaatctaaacaagttcaagcagtatttgatttcatcaatagtgatgctggacaaaaaatcattgaaaaagttggtttagtaacaccaaataaataaaaaataaagagggaagtattatggaaaaaaagttatcaattattagccataagaaagcaaaatccctagtagaaaaaacagccgcgatgatctttcgtggctgtgctattatctctgttttagcagttgttactattacaggatatatgattatttcagggacacctgccatctttaaagaaggaattacaggtattttgttttctacaacgtgggcgccaacagcagctaatcctcaatatgggattgcttatgttatattaacatccattgttggggtttttctagcaatctgtataggagtacctattggtttatttacagcaattaaccttgctgaaattgcaccagtaaaacttagaaaaatattaaaatcagcaattgaattacttgcagggattccatctgttgtctatggattattaggaattcttattgttaatccaatgatgtataaattagaattaatggtttatcatggctctaaaacacatcaatttacgggtggagccaatttattatctgccattatcgtactagcaattatgattttacctacacttattaatatttcagaaacagccttaaaagctgtacctgatgattatcgtaaaagctcacttgctttaggggcaagtaaaattcaaacaatctttaaggttgttgtaccaagtgctaaatctggaattatgtcagctattgtacttggtgtaggtcgtgctattggagaagcgatggctattttgttagtagccggaaatgcagtatctcttccacttccatttaattcggtacgttttttaacaacagccatcgtttcagaaatgggatatgctagtggtacacatcgtcaagttttattcacaattggacttgttctatttatctttatcatgattattaacttaatcttaacatatgttttaaaaagaggtgacttagatgaataatacaatattagaaaaaaagaaacgtgttagtgatcaaattctctatgcacttattcaattaagttcatttctttcaatttttatcttattagttattattggttatattctctatcgaggaataccagcctttgatttttcttatttagtaaatacaacaagtattattaatgatactgtaggtatattacctaatattattaatacactttatattgttattgtgacacttttaattgcttgtccaataggaattggtggagcaatttatttaaatgaatatacaaaaaataaaaaattcgttagtatcatttcatttacaacggaagttttagcaggtattccatcaattatttatggattatttggaatgttgttctttggatctgtttgtcatttaggattttcaattttgacaggttcacttacacttgccattatgattttaccaatcatttcaagaaatacccaaacagctttagaatgtgttcctaaaagctatcgtgaagctgctttaggaattggagcaacaaaatggtatatgattcgtacagttcttttaccaagtgcaattcctggtatcttaacaggagtcattcttgcgatgggacgtattgttgctgaatccgctgccttattatttacggcaggctcagttgctattttacctactaatatttttaaacatttgttaagtagtgggggaactcttactattcaattatatttagaaatggctaaaggtaattatgaagtttcatttgtgattgctcttgttttagtagttattgttttaggtttaaatatgttagctaaatggatcagtcgcagatttgatgtaaataaaggggataattaagatggaaaataaaatagaagcaagacatctgaatttgtattatggacaaaaacatgctttaaaagatgtcagtttagatattaaagaaaataaaattacagcgtttattggcccttcagggtgtggtaaatcaacatttttaaaaacattgaatcgtatgaatgattatgttgataacgttaaaattgaaggggatgttatcttagatggtgaagatatttatgatagccgtgttgatacaactttacttagaaaaaaagttgggatggttttccaacaaccaaatccattccctatgtcaatttatgataatgtcgcttatggaccacgtattcatggtattaaaaataaaaaacaacttgataaaatcgttgaagatagtttaaaagcagcagcactttatgatgaagtttcagatcgtttacattcaagtgccttaggtttatctggtggacaacaacaaagattatgtattgcgcgtgctttagctgtacaaccagaagttatcttattagatgaaccaacaagtgccttagatccgatttcaacacttaaaatcgaagaacttttattacaattaaaagatcaatatacgattgctatcgttactcacaatatgcaacaagcaagtcgtattgctgattatacagccttcttcttagtaggagaaatggttgaatatggaccaacaaaagatgtctttggtatgccaaaagataaaagaactgaagattatattactggtagatttggatag

SEQ ID NO: 102 - DNA, 10934 bp, unidentified
  source 1..10934: mol_type = unassigned DNA
  misc_difference 4783: note = a, c, g, or t
  misc_difference 4784: note = a, c, g, or t
  misc_difference 4785: note = a, c, g, or t
  misc_difference 4786: note = a, c, g, or t
  misc_difference 4787: note = a, c, g, or t
  misc_difference 4788: note = a, c, g, or t
  misc_difference 4789: note = a, c, g, or t
  misc_difference 4790: note = a, c, g, or t
  misc_difference 4791: note = a, c, g, or t
  misc_difference 4792: note = a, c, g, or t
tccctgaaaatacggtgcctgcagcggagccagcttgatctgcaccggccagtttctgacctgcgctgctgcctgctccgggttcttccactttgaccgtcctgtctcctgcttcagcttctttcgctctgcgtcctgctttgcctgctgtaccgcagcctcgtcgtatgccggtgcctccctttcttcaaaggtgattgctcctgcgggacatgccggcaggcagtccccaagtccgtcacagaaatgctcccttgcaaggcgtgcctttccttccacgatctcaatagcgccttcatggcaggcagccgcacagattccgcagccattacaccttttttcctctatgtgtatgatctttcttatcatttctgttttattcctttccttagaaaatcagaaaaacagtctcatctgggcatctttaaagctcttctgctgagcctctttcacaaaatctgtttcccgaagatgtccgatcagaagcggtgagtttacatcatgccgtttcctgttttcctctacactttttctgtcataattggcatagcagtacaagcacccatgcccacaggtattgtaaacgccaatgtcagcaccaagcagacaactgcaggcctctctggcagccttcttctttggcacctgcagtccacagccgatagcctgctccagaactctctgtgacaggcagccatccgcatctacgttaggtcttaccagtgcctgattttcacagcagagattgatctgcattccatttgcacctgcaatcccggcaaaagcttctatgatcctctcctgctcggctttcgtcacctctcttgcctccctgaaattccgctttgtcttttcataaagatccagaaagctgacaacacactgaccggtatatccccgaagcttttccgccatttctgcaaagcaggcaatatgatattccacagaatatttttctgtgataaaaaccggatcataacgccagctcattctctcttttcccaccatatcggaaagctctataaagctcctgatcacatcctcctttggcggtacgaaaggctcgatctccctgtcataaggcgtgatcgtcacaaaccagaacatgtcataggcgctgagatgttccagcctgcccagcatcggctgtggattcttcgtgcagaataccagcgcatccactactgatggatccagcacatatctggtcacctgctccggatagtagggattccgcaccatcacatagccttcttcgatccttttataaaaccagtcgctgaaatatgccgggatatccgtcctgctgccggtattcaatatcatggcctgttttccctggaggcaaacagcggattggcttcccttgttttttctccgtagacactcttcagatcttcaaaagcatttctcacttcttccagtatatccacatgggcaatatagtttttccctttgggtccgtatcctttcccgtcatccgaaagcctcgggatctctcccatcagcagattcacataccggtccatatcccacatgccatgaatttcttccgtgaaaacgagtttctctccctgtgccctgacttttgctgcataggctgcataattgatgatcaccgtttccttttccgcatatttgcgaagtcccgcatccatccggttctgcatagtggcatcctgacagataataatgcttttgcaggaaatattctgtttctttaaaagctccaacagatatgtgatattgtttccacagttggtagatgctttttccagataatccacatcacagtgatagatttccttcaggtatctgctgaaaacctctgcttctgaaagtccggttgtctcgatcaccggatattcatcgtggactctctgccgcaatgcttccgtcgtatgccctgctccacctacgatcacatagtttttggcaatgttctcctgaactgcctttgcaaggacatcaccaccagccaggatactgcccccaaacaggacaaatacatctgccttctcaaatccatatttttcttttagctgttgcccggaaagctcttctatatccctctttccacagaactttccaagaatattgatcttttccgctatctgctctgttttcatatcatattcctttctgccagcaaagatgccatgctatatctttttaaaaccagattaccgattttcctggatccccctttggttgaatctgtaaaaaaggctcccggcgttttacacggagccgggaacctttctgtcatttctgcttctgtccattcaggacattacattttcttacatcagtttgcggaacagtgctgtcagatcttcgatgctggcatccttcgggttacccggtgcacacgcatctgcatgagcggattctgcaaggaacggaagatcctcctccttcagtgcttccagtttagccggaatgcccacatcctcagaaagcctgcgtacagcatcaactgctgccttgcggtaggtctcctgatccatctgatctacgccttcaacacccatggcacgggcaatttcacgatatttttcgccagtgcagtctgcattgtactccataacgataggaagcatcattgcacaggcaactccatgaggagtatcataaacagcacccaaagtatgagccatggaatgtgcgattccaagtcctacattggaaaatcccatacctgcaatatactggccaagtgccataccttcccgtccttctttggtattggcaacagcgcctcttaaagatcttgaaatgatctcgattgctttcagatggaacatatctgtcatttcccatgctgcctttgtggtataaccttcaatcgcatgagtcagggcatccataccggtagatgccgtcagtcccttaggcatggaagccatcatttccgggtctacaactgcgatgatcggcatatcatgaggatctacacagacaaacttacgcttgcgctctacatcagtaataacatagttgatcgtaacctctgctgctgtacctgctgtggtaggaactgctatgatcgggatgcagggcttctttgtaggtgctacgccctcaaggctgcgtacatcttcaaactccggattggcaatgatgataccgatcgccttggaagtatccatggaggagcctccgccgattgcaataatatagtctgctccggaagccttaaaggctgccacaccgttctttacattatcaatagtaggatttgccttgatatcggaatagatctcataagccagtccttctttttccaaaagctctgttacctttgctgtcactccaaatttgatcagatcagggtcagaacacacaaacgccttctgaaaagcatgtgcctttgcctcatttgcaatctctgcgattgcccctgctccatgataagaggtctgattcagcataattctgtttgccataagtaaaaaatctcctttctcttctttgtggtaaaaccgttacctgctgttttcattataatcgaaaatgcagaggaaaggaagtcctctttaattggatgatcttccagtcggtatataaggaatgatcctctgtgccagtcctgctgcactcatggtctgcagccataccttccccggtcccttcaatgtcgtaaggaacagtccttcccctccaaacagtacattggcaaaaccctttaccatttctgaagagtattccacgctggtttcaaaagcagctacattgcctgtattgaccttgatcacctctcccggtgccagttccctttccacgatcgtcccatccagttccaaaaatgccagaccctggccggaatacttctgaaggataaaaccctcaccaccgaaaaatcccgcctttacaccggtaacatatgcactcactgacacattttttgtcgcacagaggaaagcatttttctgcgcaatgtattcctttccactgcctatctccagcatcctgatctctccgggaaaactggatgccatggtgatctctgcattgtcatgctgtgccgcataggttgccagaaagaggctctctccggcgaacatccggccaataccgccaagcagcccgcctttcatattggtttccatggaaaatccttctgacatccatatcataccacctgactgggtataaatttcttctcccctgtcaagagtcaaggttactgctggcataggggttccaaatattctgtaatgcatactcttctccttttaccttccttcttttattttattccttccggtgtcttacgttggcagcttgtctgaccattcataatgacagttacagcatttcctctatcccgtacttctttgctagatttctcttccacatgccgccagcttcacatcatagccagatagtaaattcaataatccatatctccccattctttgtatttccttacttctatttttctgctattctgtaaataatgaaatggttataaatgattcttttttctcaacaactgattatcatgatttaaaaggagttttcaaatgtcatttactcaggttattctattatatcatatagaaaaaacaaaggaaatgcagatccgccagctctgtaagaggctttttatcacagtaaaaaccgtgcagcggaccgattattcccagtcacttggctatcttgccggcatagaaggttttgcaagaaaaaatgcagtctatcttggcagggagctgcctgctgagatgcttgtcttctccggcatgacctctgagcagatcgatctgttccttgctgnnnnnnnnnnaccgtaaaatggggatttctcccattgcctgcaaagccgttatcacacccgtcaacattttctgggatgcaggaaatcttgcagaagagctattaaaggagcaccaccagctccataaagatcccggtatctgaaacagactgcattccctttctgagacacacttctttatccccacaccatatccgcgctttcagtcgtttcttgaaaagaaatgtctgatatggtatgattttcccagtactaaatttgaggggtgaagttttttgatcagaatatgttatgtagttggtatctcactgccattcgttatttattatcttatccgcatcagctatgtagaacagcacggagataaatacacagaaactgtccgataccagattgcccgcaatgctatttccatcctgaaattcaatggtatgatccggaccgatgtttacggtcttgaaaatctgccaaaagacggcggctacgttatgtaccccaatcatcagggcaaatacgacgtgcttggtattattttcgcccacgaaaaaccctgcaccatgatgatcgatgacaaacgggccgatctgccgctgaccaaggaatttgtttccttattaaagggcagccgtcttgacaagactgacatgagaaaacaggtgaacaccgttcttcaggtcgcttccggcagaagatatatcgttttcccggaaggcggctatgaccacaataagaatgaagttcatgattttctacctggagcttttaaatgtgccatgaaggccagacgtcctattgttcctgtcgttctcatcgattcctacaaggtcttcggtgtcaacagcttaaagccggtacgcacacaggttcactttctgaagcccatgtactatgaagattacaaggatatgacttcaaaggagatttctgatctgacaagaaaccagatcatttctgtgatccagaaggctagctgatctttctgccagccaaaaaagttcccggcaggatctgatgtacagattctttgaataagaattgccaaaagaactcagtcggtgcagatacgcacgactgagttcttcttatcttttattagctaattccagtgatattctttttcatattgctcatatattccagggaactgttccggtgtaattacattctgtggcaaatacttcaggattcctgtgttaagagccgactgctgtaaagaatccatgcatgctttcatagttcttatatcttcatccgtaacaggatatttattcctattatcttttgccttattttgaaaatatacaagtgctataattcccggaataatccaccaaaggaacccaatgattatgacaatacattctcctgtgcttagtgatgttcgtttgttgatttcctgtttatagtaattgtatagaggcttaattattccatatgatgtaataaaagaatatgttttataaaatacagcatacatcgttttttcattctcaacttttttattcatttcctctgctgatttttgagcatatacacaaaagttggatatatttgtattatcttcatggtattttgccagttccaaatatgcagctgctttcatagcattattgggccaaatatcaggattctctattattttctctagctgttgaatatccttatcatatacctctctctcttttcccatctcattatgacattgcaatactaaatatgccgcaaatggtgatcccttttctcttacaggctccaaatattctaaagccttttcataattattatgcatatacaaaatatatatctctgagactaattttaatacttcatccttctgttcataattaccattcaatttttcaattcgttttatatttaataacgccttgtcatataaatgatttgtttcttctattgccatacatccggaaactcgaaattttatattcccaattattttgtaaattgttgcagctgatgataatgcttgaatatttaatgttgcactcagtttatctgcccacttttcagcctcatctgcatcatactcttcaacagcataatatcttgctacagatatcattgacactaaatcaccttgttttgccaagttcaatatactcttctcaatcatccttttcctcctgttttcctctggatttttcatctgcctgcatcataagaagcaaatatcgtgagaggacatcctcatttttttctttttcaatcattttcttcaattcacaaatttcctgataaatttcttcgagtatcttatctctgaaaggacttttttctatttggttcacgatccttggtgcttcctcataatatatttgaatgcatcttctccccacaggtgttttagacagataattgtcacgaaaagctctcatcactgtcagctcttcgcagtcatccggcaatcccttatatccacaacatgcggttgtcaaaaaacatcccgtagaagattcacaggtattgctctgatcccagtgactgcaggaatcatccggataataatagcttctatagtaagaacagtacccttttgtatcccttccttcatactcataattcctgcaggaaccacatttatacttcacaacataatctgacattttctcccctcccgtataattatttttctcatattatagtctttttaacgactatagtcaacgtttagtgaagacaataccattaagatagttttgaaaaaaggtatgggaaaacaatgattgaatatagtccattttgggagactctgaagaaatcaaatgaatctacttacacactcattaataagcatcacatttcaagctcaactctggataaactaagaaaaaacaagccattgaccactactactatcaatgatttgtgcagaattttgaattgtaatatcgaagatatagcaagatatacttcttccagcacagatcagaaactataattctgaaatcgcatatctgtctgaccaaaaaatcaatgataaagtagaacatgattcgtaaaaaaagaggaaatacggtatatttacccgatttcctcttttctcatttctttctgttatctcttcttcctgaattaataatctatatgtccttgaatgaccactcttttctgagaatgctcttcctgtctgatattgctattctatcctctgcttaaaatagttatctgctgcaagcttcagataatactgccccttctccatagattcctgaatggaaatccctctggcaatttccactgcaattacacaatttctgcaaagttcctctgccggtactttacagataccacaaaaagaaacgacttccctgttactggcatgcttcctgataccactcaaaacctttcccataaggctctgttcatccaaacatccttccccggttacaaccagatcacagtctttcacaagcgcatcaaactgacacagctccagcataccttcgatgccgctgaccgtctttgctctgagaaatgccgcacatccatatccggcacctcctgcagcccccgctcctgcctccggcagcattgcctggcagtcacgctctatcacttctgccacgtggatcagaccagcatccaggactgcaacctcttccttcgttgctcccttctgtggtgcataaatataggcagctcccagaggtccatacaagggattagtcacatcactcattaccgtaaattcagcctctccgatccgctgatccagcctcgaacattctattttcgataccgctgacagcgtccctcctgccggaacaaatgaccgtccatctctatcaaagaaagtaattccaagcgctgctgccatcccacatccgcagtctgttgtggcactgcctccaagacaaaggaaaaacttccgacagccttcatccagtgccgctcttatcagctctccaaagccaaaggtactggcctccagtgcacgaaatccggtctgctttgtcaatccgctgctttctgcaatttcaaggacagccgttccatcaggaagaatcccataggctgcctcaatcagttttccctccggggaatgtactgtcactgtcttcctgcttccgccctttgcccggagaatacagtccatgcttccttctccgccatctgcaatgggaagtctgacaacctcacacttcaaatgttcttctatggatgctgccagaatatcggttacttcctgcgatgtcatacttcctttaaaactgtccggaatcacaatcactttctgcataataaagtcatcctttcctgctcataacttcatcatatcattctccggggcatcaggctatgttttcttcccatatgccccacctcagtcatttttacgttcatttcactgccttttggggcatctgcatgcacttttcccactgatgccccgctctgcgaagttttcggggcaccacagcacattttccttcctgatacccctgaactccgaaaacactcccggtggtcctgaactccgaaaacactcccggtggtcctgaactccgaaaacacacctggtgcccctgacctccggaaatatcttccgattccggcacctctgcgacgtgcgccgcaaggcgcatcaaaaaaggtggctctgccaaaaggcagagcccccttcacttccacactcttactgcacgatcagattggtatatcccatcaggctttcatccacagcccttgctgcttccctgccctcacggattgcccatactacaagggactgtcctctgtgcatatctccggctgtaaagacattcttcacgctggtttcataggcacctgcgccggtcttcacattgcttctctcattgatatctacatggaacgcatcggttacatatttctggcttccaaggaaccctgccgcgatcagtacgatctctgcgggaagagtctgctcggagcccggcacctcgctcatcttcatccgtccgcttgcagtatccttctcccaggaaagcttcacgatcttgactgccttaaggctgccgtttttatccttcacaaattcctttaccgtagactcatagatccggggatcatgaccaaatacagcgatagcttcctcctggccataatctgtcttgcagatcttcggccattccggccagggattgctggcacttctggtatcgggagcctttggcatcatctcgatctgtgttacagacttgcagccatgacggatgctggttcccacacagtcatttccggtatcaccaccgccaatgataaccacatttttgcccttggtatccacatatttcttgtcttcaaaatcagaatccagcaggctcttcgtattggccttcaggaagtctactgcaaagtagatccccttggcatccctgcccggtacactaatatctctcgggttggaagcaccgcaggcaagtacgactctgtcatactccttcaagagcttttctgccttaatatccttaccgacatccacaccggttttaaacacgatgccttctgcctccatgaccttgatcttacggtctacgatatgcttctccagcttcatattggggattccgtacatcaaaagtccaccaaccctgtcagaacgctcatacaccgttacgctgtggcctcttttattcagctgatcggcaacagcaagtccggaagggccgcttcctacaactgctaccgtctttcctgtccggaccttgggaggcttcggatcggcatagcccttttcataggcattctcaataatcgcatattcattttccttcgtggcaaccggatccccgatcagattgcaggtgcaggctgcttcacagagcgccgggcacacacgggaggtaaactccggaaagctgttcgtctttttcagacggttataggcctgctgccagtttccggtataaacaagatcattccattccggcaccagattgtgcagggggcagccgcttgtcattccgcagatgttcattcctgcctggcagaagggcacaccgcagtccatacatcttgctccctgaagctgctgcttttctctcgggaggtgctcatggaactcattaaaattcttaatcctgtccttaggctttacgtcctttgatacttctcttttataatccataaatcctgttggttttcccat

SEQ ID NO: 103 - DNA, 8701 bp, unidentified
  source 1..8701: mol_type = unassigned DNA
  misc_difference 2021: note = a, c, g, or t
  misc_difference 2022: note = a, c, g, or t
  misc_difference 2023: note = a, c, g, or t
  misc_difference 2024: note = a, c, g, or t
  misc_difference 2025: note = a, c, g, or t
  misc_difference 2026: note = a, c, g, or t
  misc_difference 2027: note = a, c, g, or t
  misc_difference 2028: note = a, c, g, or t
  misc_difference 2029: note = a, c, g, or t
  misc_difference 2030: note = a, c, g, or t
ggtatagcagagatccacatcattgaaggctactgcaagaccctcgtagaagccgccaagctcttcaaacctcttcctctgaagcatcaggcaggctccggtcacccccatcatattgtggacataccggttccttccataatagtggtcatccttatcatccagaagctgcagcttatgcgccggtcccacatgcagattggtaatcccggcatgctggatcacagtagaatcaggatacaggagcttagcacctactgctcccacccgcttcagcgatgccttttctgccagcttcacaagccagtctccctgaatgatctccatgtcatcattcaggaaaaggagcagatctccttttgccatggacgctcccagattacacatccgcgagaaattaaaggccatggactcataatgatagcagatttctctgcacaaaggataatttttctgctgtagtgcttctatattttgtttaatcaggattttattttcttctctgcttccattatctacgagaatgatctcgtaagggatcccccctttggtacgctcggtcaacgagctgatacagtggaacagcacctccggattatccttggaagggatgataactgataccagatggtctttcccatcttccggctgccagctgtcctgtctttcatacccgaatgcacagtccgcgggcagccgcatttccttcacggctccatacccttcctccgccgtatgatacagcacctcatctatatgtctgacacagcctttccctgtcagactgatttcctgaccgattccccggttgatcacccgataacacagctcatagactgcatttttccgggtcagagcctcctttgctgacaatccttccacaagctgcttattctgatcaaggcactcgcacacggctctcgccggaagtgccaccagacttcccatatagaaatacgaaaggaaggtatccggagaccagtccggcttaaaccagggtttctctcttccctgttctgccatcacatcttcatctccatataccaggaccggcatttcttcattccatgtcttaaacagcatcggcagcgcaagatctgacagcatcccctcagccatggcaaataaaatagcatttgtatttttttcttcgccaaatgctctgatctccgggatccaggcctcttctccctttccatcctgccagaccggcaggcaaaggaatttcactgtattttccgtaccttcttctttttttcgtacttcataccagacaggtgtccggatcatttttgaatgtattccttcatttttgtatccggagccgtcctgtgtctgtttttttgcttcatttttcagacatttctcatgtactgatataatgatcttatcaattcgcagtttttcttcctgttgcctgatccatccatcataggtcattttcagcccattcagttttttttcgtaactcctgaactgttttttcatcaggatattttttgcaaaccgtttcagatctgtcacgttcattatcctttccggaacagatgcttacacccgttcataacatcaaaagccatatccatcgccactggggacagcttcatccgcaggtgcaaggtattttcaccggtaaccggcatctccagtacagaaaaggtcattcccggatccatggttgcaaatacccatgtctgatcctttaccttcctgccattggtggcaaaattcttatcacttaactgtactctgcttccgttcagcagaacctcttccatccttacgatacagcttctgtctgcagggtctacccgcagcgcccgtacattgccgtcaaaaggaatatccacttctatggtatcctcatctgcatatacatccggcagatactctgagttctgctcactgaagccttctccaaaatcacggtacacctggatcctatcatccagtatcttctgcagatgcccctttgccagcttcttcacatcaatacaataggtaccgatcccggcccggannnnnnnnnntttccctacacgacgctcttccgatctcccatggacttatgctttccggtcacctttttctggaacgcctcttccctagcccggtattcctctgcctcctgctgcgtgatatgaagcctattcatgatccggtcaagatccagtttatttcttctttcttcttccagaatatagcagtagattgcccggaaggcgatctcctttgtactgatcttttcttccatcgtccactcataatcgatcacagtgaaccggtcatcctttacaaggatattggcaaagatcagatcgtaatctgtcacaccgctgtcttcgccataggaaataagctgcagataccgttcaaacagccgttcaaattcctctgtatcatcctgaaaaagtgccttatccatcaattcttccagcgtcacaccctcttcaaagtcaaagccggcatagctgccatccgccggaagggtacattcattaatcctaaggtcacttcccgcataacgttcttttaacaatttgcaggagtgctccatttcccgtacatggccttttgcctgctctgtcagcggatatttccggatttccctgccctctgctgtctccagaagtgctgtgcaaagctgatagctttctgcccggtcattgctgtatttcacataggccgcctgtggcatttcccccgtgatcaccataaaggaattggagaaatccgggaagcttccatcctcgatcagtccgtcatatacatatttttcattaaaggtaatcagtctgtccctgtcaaagttccggatattatctgtcagctctcctaccactggcagtctcctgtcagagtagatcactgtcgggaatttataatccgggtagggataatagaaggaataatcagatactccacagctttcaaggatcctgcagagtccctttctgctgaaggttctggcactgccgccatccggatatccttcaagaccggaaaaccacgttcccaggtgatcctccttgcatccggcaaagtacttaagtcccagcttattttcaattgcgatcaccagatgaccgctctttttcacatgacgcagcatgatcttcagaaaatcttcatagggtgttttcgaggggatataggatgccccatattcaaacacaccgatcagacatacgaaatcatagtctgccggaagctccggctcgatatccttaaagtttcccacatggatcgtgatattgtcctgatcctggtttctccaggcattgatatggcttcttctggctgacagatccacacaggtcacttctcctgccttctgcgccagcttgtccgtgatcgcaccacatccggatccaatctcaagcaccttatgctccttcgtaatgggaagccattccacaatattggcgcgtaagggagataaatgatacaggatcggccagctgtttttttcctcgatcagctcctgatattccactttggaagcatttttcacgataccaagcagttcatcctcgatcgctccatcactatacagatcttttcccggataatggctgtaatccagtctgacactgccgattctttctggcaggctgctgatcagctcctcctgctgcagacggatcggctttcttactccatcctgattcatgggcttactccttttcctgctgtgaaagctccttcacaacgactctggaattcatatcatagtatccaacagtatccttatcagagatcaccgtcatgtttatcacatcatacagtctgtgatatacctgaaactcttccttttcaaaaccagtcacaccaaacgaaagaagatactctcctccctgcaggtcgatcttctgggtaaaggtgatctccatgtcgctgcctgccctcaccggagaaagaaatgccttttccaccatggtattggttcctgtgatctccacacccttgatattcttgatcgtaaaggcaaaaataggagcttctatatcatgctcaaaatgcacctgcatggtgatcgtacattcctttcccttcagcaatgcactggtctctcttcccatatcatctgttattttatatccggtgatcatggcgtccttcgttccgtattccagcagctccggattcacttcacccttcactgtgccagccgccgctgccgctgctgcggtgatctccttatcagaaaggaggctatgatcgtccgcagccggtacgtactgacctaccagcacctgtttataagcatcgatcatttccttgggggagccttctccaagcttcacgccctggttcagcagtacaaccctgtcacagtatttactgatgctgcttaagtcatggctgacaaaaacgatggtctttcccatctccttgaactcctcaaacttgtgatagcactttgcctgaaagaaaacatctcctaccgacagcgcttcatccacaatcaggatctccggttcaatattgatggctacagcaaaagccagccgtacaaacataccgctggaataggttttgactggctgatgtacataatccccaatatctgcaaaatttaaaatatcatccatctttgcatcgatctccttcttggagaagccgatcatcgtaccgttcagatatatattttcaatcccgttatattccatattaaagccggcacccagctccagcagtgcggagatccttccattcacatggacagatcctcctgttggattcagaacacccgttattattttcaggatcgtagacttgccggagccattggttccgataattcccaccgtctctccctgatagatcgtcatatccacgccctttaaggcatagtgctccttgtagcgcttctttctgccaaatccaagagcctccttcagacgatctgaaggcttatcatacagcttataggccttttccagtccttttacctgtattgcgacctttttttcatccattttcccagttcctttctctgtcctgtaaagtatgccacagtctccctacagaacatctgcaaagtgaaccttcaaccgtttaaagatcagtgatcccacacagaacagtgtcacagtaaagatccagaaatacgtggaggaataaaaatgttcaaagaaccattcatctccataaatcgcattgcgatatccattgacaatataaacaaggggattgagcttcaccagcgtcaccagtctgtcatccccgatctggccgatgttccagaggatcggtgttgcccacatcccaacctgcaggccgatattaataatctgggaaagatccctgaaaaagacggtaatcgcacaggtacagtagctcattgccagcatcagtacaaacagacagaagctgtaatacacgatctggatcgtatagatggtcgggtagtatccgtagattccggctacaacaagcagtactcccgcaaaaaatacatggataaaggtagctgctaccagcttaatgatcggcaggatactgatgttaaataccacctttttcaccagatagctgtactccagaagagcattggtgccgctggtgatcccctctgaaaaataaaaccagggaacaagacctgctgtcaggaaaagcacatacggtacctccactccgctggccaccatttcacttctggtattaaagatcacatcaaaaaccacataatacatggccaccgttacaaccggctgtaccagtgcccacagaaatccaagataagaaccggcataacgctttttaaagtcatttttggcaagcttccagatcagctccctgctctggaaaagctccctcggaatgataaacatcctgtcataatacacactgaagatcacacatgccagcaaaagaagtgcacaggcacagaatttcttcagattttccgtgtggatatctggtgccagcggattattatggctgactaccataatccccaccagaatacagatcccccagaaaatgccaattcccaccggctttggaacagatttcagcacagatgccagtgatttcttttctttactgttcatgctgtccttttctccattcggtgtaagctttaagtccgccccacttctgatccttgtctgacatcacaagctcagttcccggtgcaaagggccattccacgccgatatcaggatcatcgaacttaagaccgccctcatcacccggatgataaaaatctgtacatttataagcaaactccgcatagtcggaaaggacaaggaagccatgtgcaaaattcttgggaataaaaaactgcttcttattttctgcagaaaggacaacaccatgccattttccgtaggttgcagaaccgggacgcagatccacagccacgtcaaatacctccccgctcaccacacggaccagcttgtcctgtggatattcaatctggaaatgcagtcctctcagcacattcttcacagaggctgactgattatcctgcacaaagatctggtcaattcctgctgccttataatcattataattgtaggtttccataaaataccctctggcatctccatataccgccggggtaatgatcttcagtccttcaatctcacatgtctcaactgttatttttcccatttctgtccgggaacgtctctacagaccttccgcaacctcctttaaatattggccataattggtcttcatcagtggctccgccagctttaaaagctgttccttatcaataaagcctctcttataggcaatctcttcaatacaggagatatagagcccctgtctcttctggaatgctgccacgaaatctgccgcatccagcagggaatcatgatttccggtatcaagccacgcaaagcctcttccaagggtttccacccgcagggttcctcttcgcagatattcattgttgatactggtaatctcaatctctccgcgtgcggagggtttcacattggctgcgatctccacaacatcattgtcatagaaataaagtccaggtaccgcataattgctctttggatgctcaggcttttcttcaatggaaagagcctttccgttttcatcaaattctacgacaccatactctctcggatctctgacataatagccgaaaatggtcgctccgctttctctggctgcaacctcccgaagtacctttgaaaagctctgtccataaaaaatattatccccaagcacaagtgccacagaatcatctccgataaaatctgcgccgatgataaaggcatcagccagtcctcttggctgctcctgtaccgcataggaaaacttcatgccaagctggcttccatcagaaagcagctcctcaaatacgtggatatcacgtggtgtagatatgatcaaaacctcccgtatcccggccagcatcagtgtggataacggatagtagatcatgggcttgtcataaaccggcatgatctgcttgctgatggccttggtgagaggatataatctggttcccgaacctcctgccagaacgattcctttcattgcataaccctccattccatgcattgcataatctatatcagtataccacaaaatgggagtgattgtaaatcactcccattttatctgcgttttcatgctctgtattttattttgtatggtacatatcttcgtaatacttctgataatcaccgcttgtcacattcttcatccattcctcatgctcaaagaaccatgcgatagtctttttaatgccatccttaaaacaggtttccggctcccagccgatctctgccttaatcttgtccggtgcgatcgcatagcgtctgtcatgtcccttacgatcctctacataggtgatcagatcttcactgaccagtgcctttctcggatcatcatcaggaagcatttcctgcagagtgtcaagaataatatgaataatctcgatattctgcttttcattgtgtccacctacattataggtttcaaacaggcgtcccttttcctgtaccatatcaatggccttggcatgatcttccacatacagccagtcacggacattccttccatctccataaaccggaagcttcttgccctgcagtgcattgttgatgatcagcgggatcagcttctccgggaactgataaggtccgtagttgttggagcaattggtaatattagccgggaaatgatacgtatccatatacgcctttaccagcatatctgaccctgccttgcttgcagaataaggactgtgtggtgcataaggggttgtctcatagaaataaccgccatcctcacttaaggaaccatatacttcatcggtagatacatgcagaaacttcttatctgctttaaaactgccatccggaagctcccaggctgccttggcacagttcagcataacagcggttcccagcacattggtctgtacaaaaacctcagggtgtttaatactgcggtctacatggctctctgctgcgaagtggactactctgtcaatatcgttctcagcaaacaccctgctgatggcttccttatcacagatatctgcttttacaaaggtataattgtctcttttctcaatatccttcagattctccagattgcccgcataggtcagggcatccacattgatgatcctgatctccttatcatatttcttaaacatataatgaatataatttgagccaataaaaccggctcctcctgttaccagataggttctcat

SEQ ID NO: 104 - DNA, 6601 bp, unidentified
  source 1..6601: mol_type = unassigned DNA
atcagaatcttccatacctgctacatgctggattgctccggaaataccgattgcaaagtaaatctgaggacgaactgtctttcctgtctgacctacctgtaagtcaactggaagccatccattctctacaactgcacgggagcagcttactgttccaccaagaacttctgctaagtcctctaacagtttgaagttttctttagaaccaactccacgaccaccggatactaagatcttagcgtccatgatgtttgctgtattcttaacttcttttacgatatccatgatttcaacatatctgttgtttggtgtaaatcctggattgaactcgataacttctgcttttgcacctttgattggagcaattttctgcataacgcctggacgtacagtagccatctgaggacggttatccggacaagcgattgttgcgatggtatttccaccgaatgcaggacgggtcatcagtaactgattgtgtttctgctcctggtttccaaccggattgattgggaaatcaccaatctcaagaacagtacagtcagctgtcagacctgttgcaactcttgcagatacagtaggaccaaggtcacgaccgattgctgttgcaccaactaacataacttctggtttgaattcgttgattacagatgctaatgcatgtgcatatggctctgttctgtagttcttcagttccggatcatctactacgataactttatcagcgccgtactcagcaagctgatctgcaagacctttcacatcagaaccaattaatactgcagttacttctgtatttaaatcttttgcaagttctttgccctttccaagtaactcaaaagcaacaccatttaatgtgttgtctacctgctgtgcaaagacaaatactcctttatactcttctaaacccattttattcaccacttttccttatttttattagatgatatgtttctctttgaatttgccaattaagtaagatactgcttcgtcggtatcgagagcaaccttctcgcctgcacctttacgaactttgtcagatgcttttgcgattttggtcggtgaacctttcagaccaaggttagaatcatctacgtctttaaggtcagctctgccccatacagttacttctttgtcaaatgcatcgaagattccgcctggagtcatgtaacgcggctcgtttaattcagataatgctgtaaccaagcaaggcatttttgcttttaatacatgatatccatcttcaaactgacgctcaacgattacgctgtcaccttctactttgatatcctgtgcataggaaataaccggaagtccaagatgctctgcgatctgaggaccaacctgtgcggtatctccatcgatagcctgacgacctgtgataattaaatcatagtcaaggtttcttaatgcaccagcgattgtagtagaagtagcccaggtatctgcaccacctaatacacggtctgttacaaggattcccttgtcagcgcccattgccattgcttcacgaagaacttcatcagcctttggaagtcccatggtaagtacagtaacttctgcaccgtactgatcttttaatcttaatgctgcttccagacctgctttgtcatctgggttcatgatagtgagcattgcagctctatccaaagtaccatccggattaaattttactccgccttttgtatctggtacctgttttacacatacaactattttcacggtatattcactccttatatttttaatttgtgtgcgccatgatttttcgtttaaaatccttttgcgccgatctgtcagaaactattttaataatgcgccagaaataaccattctctgaacttcgcttgttccttcgtagatctctgtaatcttagcatcacgcatcatacgctctacatcgtattctctgatgtatccgtatccaccgaataactgaactacttctgtagtaactgccattgcggtttctgctgcgaataattttgcttttgctgcttctacagaatataccttctgtgttgctttagccatagcagctttgtaaaccagcatctgagctgcttcaattctggttgccatatcagcaagcttgaactgggtattctgctgctgagcgatagaacgaccaaactgttttctttctttggtgtatgcaactgctctgtctaatgcaccttctgcaataccaagtgcctgagctgcgataccgatacgtccgccatccagagtatgcatagcgattgggaatccttttccttccggtcctaacagattttcctttggaattctgcagtcttcgaagattaactcgtatgtagatgatccacggatacccattttcttttcttttgttccgaaggagaatccaggagctcccttgtccacgatgaatgcagagaagttcttcttctttcttcctctcttatcttcggtaacacttgtgattgcgattacgatataaacgtctgcaactttaccgtttgtaataaagcatttagatccgtttaatacccactcatcaccatctaatacagccttggtctgtgctccctgggcatctgtaccagcaccaggctctgttaatgcaaatgcaccaagcttctcacctgttgcaagtggctttacatatttctgtttctgctcttctgtaccgtaagtcataattgggtcgatacaaagagaagtatgtgcagatacgataacacctgttgtaccacaaactttagataactcttctacacacataacataggttaatgggtcacatccctgtccgccgtactcctttggtaccggaattcccatgaaaccaaattttgccattttatcaactgttccctgtgggaatacttctgtctcatcaacttcctgagccagaggttttacttcgttttctgcgaaatctctgaacagagttctcgccatttcatgtttcttatctaaactgaaatccatgttttgaaatcctccataaattttattttactgagcgtcaaccggggtctttgtacggtcagcgttgtatacatagaatccttttccgctcttagcgccgaggttaccaccacgaaccattttacggattaatggacatgcacgatatttgctgtcgcctgtttcgtggtaaagtacatccatgattgcaaggcagatgtcaagaccaatgaagtcacctaactcaagaggtcccattggatgatttgcaccaagcttcatagctgcgtcgatacctgcgatatcagatacaccttccattttgataaatgcagcttcgttaatcattgggattaagatacggtttactacgaaacctgcagcttcatttacctgtaccggagtttttccgatttctacagagattttcttaatagcttctactgtttcagcaggagtatttacaccagcgataacttcgattaatttcattctgtctgccgggttgaagaaatgcatacctaccattggacgggtaagaccatttccgatttctgtaatagaaagactggatgtattagaagcaaagatacattctggtttagcaatcttatcaagctcctggaatgttgtcttcttaacgcccatatcttcgaatgctgcttctacgattaaatcgcagtctgcgcaaagattctcttttaaacctggtgtaattttagcaaggattccgtcaacagtttcctgtgtcatttttcctttttctaccagtcttgcatatccttttgcgattttctcttttccgccatcagcccattcctgcttgatgtcgcaaagagctacttcatatccttctacctgagcaaatgcttttgcaatgccctgtcccatggtacctgcaccaataacgccaactttcatgttagtcctccttaaaaattatgtattatatttacccgaaaacgaaagccttctgggttataacttgcaacgcaagacccgagaagcgttttgcacttcccgggtatatttacttattcagaaagagtgaattagtctctctcaacgattgttgagcagcccattccaccaccgatacacagagtagcaagacctttcttagcgtctctcttctgcatctcatgaagcaatgtaactaagatacggcatccagatgctccaacaggatgtccaagtgcgattgcaccaccgtttacgtttaccttagacatatcaaatccaagatctcttgcaactgcgattgactgagcagcgaatgcttcgtttgcctcgattaagtcgaaatcatcgatagacattccggttcttgcaagaactttctttgtagaagcaacaggtccaacacccatgatttctggctcaactccgccaagtgctcctgcaacccatgtagccattggtttaacaccaagctcttttgctttttcttcgctcataacaacgattgctgctgcaccatcgttgataccggaagcattacctgctgtaacaagtccaccctctttaccagagcagcatcttaatttgcttaatgactcagcagttgtgcctggacgtggtccctcatctttgtcaaacataacagtttctttcttaaccttaacaggtacaggaacgatttcgtctttgaatctgccttcagcaattgccttttcacatttctgctggctgtttgctgagaactcgtctaactcttcacgggtaattccgtatttgtcacatacgttctctgctgtaatcatcatatgataatgattaaatgcgtctgttaatgcatcatttaccatggtatcgataattgttgcattgttcatacgatatccaaaacgagcttttgtcatagcgtaaggtgccatagacatgttctccataccacctgcaacaacgatgtctgcctgaccagccataatcatgtttgcagcttcgtttacacatttcaaaccagaaccacaaactacgtttaatgtaaatgcaggaacctcgattggtaaacctgctttgatagaagcctgacgtgcaacgttctgtccctgtgctgcctggattacacatcccatcattacttcatcaacctgttctggtttaacaccagctctgtttaatgcttctttgattacgattgcgcctaaatctgcggctggagtattgcttaaagctcctcccattttaccgattgcggtacgacatgcgcctgctaaaactactttctgtgccattttctcgtctccttctgaattaaatttgccttttactattgttatttttttaacaatcttttgtaaaaaaaataaaagaaagcctttccggctctttcccgacaatctgatgttatcatagaaaggggatttttgcaagtgaaacttgctttattgagccggattttcagctttccctaataaaatacatggtttccgattacagttccattaatcagtccgttgtttctgcggaaatataagcagtttaaggttcttgtgcctgctaatacttctgtggcagcctgcacacaggacgcatctgctccggatgaaagcactactgcgaaacgaccgctggctaccggtgagaactgcccgctctgatagatgacacctaccacggtatccgggaaataactgctgtccacacggttcatgaccacgcttccaacggcaagcttcccttcatagctttcgccgcctgcttcgcactggatcagtgctgccagcatggcaacatcactggcattcactgtcccgccaccggaagcatcacttcctgtggtattatccccggtggatgtcccatccggatttgcattattatctgaagcagctggctgctgactgttaataagttcctcttcctgacgcttaatctcctcctgacgggcagcatcttctttcgccttctgtgcctctaattcttcctcataggctttctgtcttgcgatttccgcatctgtgtctgctatttccgtctctgcatctgctacatccgactttgctgcgcttattttttcctgctgggctgccaccagactgtctgccttgctcttctgctcctgcttcgtctgttctgccgcaagcagttcttcttttgccttctctaaatcttccttctgctgttttaattcagccagtgtatcctgataatcagaaagctcctgcctgtcataatcataaatggatttggcatattccatccggtttaaaaaatccgaaaaggagcttgctccaagcagcagctccaggtaagactgattgccattttcgtacatatattgtactcttttcttcatggcttcgtactggctctcagaacgtgttgtcagctctgcaatccggctttctgctgcttcaatctccacatttttcgccgcaatttcatcctgggtatccgccagttcgttgctgatttcctgcaatccattatttaattccgtcagttcatcggaaagatttatctgatattctttcaaggaatcaagctgcgactgctgttcctctctctgacgttccagctcttccacgctgcttccggtgtccttagatgccagatccactctttccttggtgccggtgtctgcctgcaccgtcatctgtatcatcagaaacagtatcagcaatgcggaaaacatacgtcgtttactgtttttcttcat

SEQ ID NO: 105 - DNA, 17606 bp, unidentified
  source 1..17606: mol_type = unassigned DNA
ttatacaaccgtcacaacacctatttcaacttgattattgattctggggatgaatacggtgttgctcagacctgcgcagacaatcatttttgtgccgtcaaggtcaaattcgcctttgtcatatttcggaaaaagtccctgattcggagcgattactccgccgatgaacggcaattgaatctgtcctccgtgggtgtgaccgcagacgattaagtctatgtcggttttctttgcgtcctcggcaatgtattcgggctggtggtgcagaagaattgtgaaattgttctttgctttttcggcaaattcttcccacagcgttcttgacggaacatcgtcatcgggagtgtagaactcataataagggtagtcgctcattccgcctataagcacactcttgccgtttttggtgaattttatgtattcattatcgagcaatacagcgcctgttgaatctgtttcgcttttaaaatccgttccgaatttggcggcattgtcacgctcatggttgccgagacagcagtatgtgggtgcaatttttgaaagcttttcaagcacatctttcatcttcgttgtgtcgggatcgccacggttgaccatatctccgcaaactgcaataaaatcgggattttgttcctttacaagctctgcaaggtctgcgttcttttctccgtattccttgttgtgcaaatccgtgatgacaacaaatttcagctttgcgtcgttcttagtattgtttacacagtaatttgtgattgcaattgtgttgtcacagtaaacgccccatattacgagagtcacaaacagcgcaagtattattgctccgaggattatcgaaaaatttttcattcaatttaccgcccatattaagtatggtattattttaggctcgttttgtgcggttgtcaacaaatgtgtgtcgaacaagtctgattattactgttccttgtgctttgattgtcggattttgagttgatttaggaattgctttgtttgacattccttttgcactgttgtataataaatcataattgtatttatatgttactcgggaaatttacacaaagttaaacagaagaggtatgggttatgaagaagattaatttgcgtaagatgttgctggctctcgcagatgtgtttattatcgttgtcagcggtattcttgcaaattatattctcttgcttgtcggctacataggtgctgcttcaagcaaaggcttgttgagctatattgttattgatcttgtcatgtgtctgtttacgctttatataagcggaacatattcaaaattgtggcgatactttaacgcaaaggactatatggtgtgcggaattgccgtcttttcggggtttacgctcggctttgtaatctcgttgtttttgcagattccgcagagaaagattttttgtatagtacatttcgcaatagcccttgtcggaattcttgcattccgttttgttttcagaagggcttttcttgaccttaccgaggcaggaagggcagagggcggagagcgcacccttattgtgggcgcaggcaatgccggcagaatgattgttcgtgaaattcacaatgcgaaagagcagggtgatgttaataatccttcaaaaagcatcattccggtatgctttgtcgatgatgatttgaaaaagctgaatcagaagatcgaaggaatccccgttgtcggaacctgtcccgaaattgttaaaatatgtgatgaataccgcatagacaatattattgttgcacttccgtcatgtgaggaagatgagaagaggaagattcttgactactgttccgcaacagagtgcaaaatcaagattatcccttatctcggcgagcttttgtttgatgacgggcatacacagcttatttcacaggcaaaggaaatcaagattgaggatcttctcggcagaaaacccattgagtttgaccgaaaggagattcatgaccttatcaacggaaaggtttgtcttgttacaggcggcggcggttcaatcggcagtgagcttgtaagacagattgcaaagaatgatccgaaacaaatcatcattgttgatatctacgaaaacaacgcatatgacattcagcaggagcttgtgcttgaatacggcacaaagcttaaccttgtaacgcttatttcatcggttcgtgattacgacaaaatggagcttatcttcaagacatatcgccccgaactcgtattccacgctgccgctcacaagcatgttccgcttatggaaaccgttcccgaggaggctgtaaagaacaacatcttcggcacattcaatgttgcaacccttgcagaaaagtacaaggcaaagaagtttgttatgatttcaaccgacaaggctgttaatccgacaaatgttatgggcgcaacaaagcgtgcgtgcgagatgattattcagtacaaggcgcagcacagcaccgataccgaatttgtaacaacaagattcggtaatgttctcggctcaaacggctcggttattccgctgtttcgccgtcagattgaaaacggtgcgcccgttaccgtaacacatcccgatattatcagatattttatgactattcccgaggctgtttcgcttgttcttgaggcaggtgcaatggcaaagggcggtgagatttttgttcttgatatgggtgctcccgtcaagattacaacccttgccgagaaccttatcagaatgtacggtaaggttccgtacaaagatgttccgattatcttcacgggacttcgtccgggtgaaaagctttttgaggagcttcttatggacgaagaaggtcttaagtcaacacagaacaagaaaattttcataggaaatcaaattaaaatagacgaaacagatatgctgtcaaagcttgaggttcttaaaaagaccgcagaaaacaatgacagtgaaaagacagttgaacttttggcagaacttgtacctactttttgccacaaggtcaatgattaacctaaaaggagaaattttatgtgcggtattgtaggttatgtaggacctaaggattgcagtgaggtgcttgttaacgctctcacaaagcttgaatacagaggctatgactcggcaggtattgcggtttttgataacggagaaatcaagaccgtaaagaccaagggtaagcttcaggacttaaaggataagcttgcagaggtcggcactccgaaaggtcatgtcggcataggtcacacccgttgggcaacccacggcgagccttcggatgtaaactcacatccacacagcggtgcaagggttacaatcgttcacaacggtattattgaaaactatatggagcttaaagatttcctcatctcaaagggaagaacttttttaagcgacacagatacagaggttgttgctcagctcctcgactataaatacaacggaaatcctcttgaaacaattgacagtgtaatggctgagcttaagggttcgtttgcactcggaattatgttcaaggatttccccgacagagtttttgcggttcgccgtgaaagtcctcttatcgtaggcgttgcagagggtgagtgctttattgcgtccgatgttcctgcaattcttcagtacacaagggattattatcttcttgaccatgatgaaatcgtaacactttcacctgacggtgtttcattcgttgacgaacaccttgatccgattgaaaaggaacttcagacagccgactgggatatggaggctgccgaaaagggcggttatccgcactttatgattaaggaaatcaacgaacagcccgaggctatcagaacaacgattatgccgagaatcaaagagggacttccgttccttgaggagtgcggcatcacaacggaaacaatcaagaatttcaaaaatatcacaatcgttgcctgcggtactgctatgcacgcaggtatggtcggcaagtatgttattgaggatctcgcaagagttcccgtaaatgttgacattgcgtccgagttccgttacagaaatccgattgtaggcgagggcgaccttgtaatcatcatttcacagtcgggcgaaacagccgacagccttgccgcaatgcgtctcgcaaagcagaagggtgcaaaaactcttgcagtcgtaaacgcaaagggcagttcaattgcccgtgaggcggatatgctcatctacacactcgcaggtcccgaaatttccgttccgtcaacaaaggcatacatcacacagctttccgttatgtatctctttgcctttgagcttgctcttgcaaaggaaacaatcagcacagccgagtgcaagcgacttgtttcggctcttacaaaaatgcctgaggcagttcagtatgtaatcgacaactgcgaggatatctgcaagttcgttgccacaaagcttgttgcaaccgacagcttgctttacataggcagaggtcttgactatgccctttcaatggagggttcactcaagctcaaagaggtttcgtacattcactcagaaagctacgccgcaggcgagttaaagcacggcacaatttcgcttattgacgaggatgttcccgttatagccgttgcaactcagacaggtattatccccaagacaatcagcaatgttgttgaggttaagtcaagaggagcgaaggttattcttgtttgtacagacgcctgtgcaagagaactcaaggacggtgttgcggattatgttatcgaaattccgcatacagacgagcttcttatgccgattacagcggttgttccgctccagattcttgcttattacacatcaatcaacagaggtattgatcccgataagccaaagaaccttgctaagtcggttactgtagaataaacggcggtcttgtattcaattgaaaattgaaaattgaaaatgtaaaattatggtcgggaaggcagtttgcaaaatgcaaatcattgtcgcccgaccattttttatttatatgaaagtatatgcttaattgtatgagcgtccaatgaacgcttctacataacttactcttgttttcaaatttcaacggtaaaaaccttgtatttttttgacagattatgtataattaattagatatacattctaaaaagcagtattgatgaatctaatttagtttcgggggaatatacggacatgatgaaaactgtttttaaaagagctgtaacgcttgcaatttgtgccgtaacggtattttgcggtatttttgcctgttcaggcgcaacaaaagattacgagattccgcagattgacgatatgacgctttcaatgcctgacggtatgagcgctgttacaagggacagtaaaagcacagataaatatttttccgttttcggtcttgattatgacacaacaatgaaaacctttcagaacggaaatatctatcttcagggtatggataatatgtcatcggttattctgaccgtgacaatgacaaaaaatgagagcagcgagaatgtcggcaactatgctcagctttcttcaagcgagctttcaaatatacgcaacaattttcttaattccgacgagtatctgagctgtactcccgaccaaaaagaaaaagctgtgtggcttgtgtttgacgcaactgctcagagcagtaagggcgatgtgaaaacctttattgccaacacggtttatgacggtatgaacattaatatcacaatgcagagaacagagggtgatgttacaaccgttgactacgatactttttccaaaattgtatcttcggtaaaattcagcgacctgccgttttcaaagggatttattccgtacataatcatcggcggcggtgttgttatccttattttgattgtactcatcataatttttgccgtgagaatcagaaagcataaaaaggctaagaagaataacgctattcttgaggagcttgcagtcaagtataaactcggtgaaaagggtacggactacgacattgacaattttgacgattctcccgaaaagcccgataaacgctcaaagaaaaagcagaaatatgcggaagaggttgaagaagaaccggctttgccgggcagaagatatgctcccgagccgataatcgaaaatatggaagaaccggaagaaattacaagtgagtattcaaactttggttatgacacggatgatgccaaggaaaaagaaattgacgagataatcaactccgcaaaggcttacaagagtgagcttgagcgtgaggcatataaaaacaactacggttacgaggaaaacagcacggaggacgaaaaaaaaaaggagcctaccgcagcagatacctcagagactgaacccgaaaaaattgacgaaaacgaaaaagataacgcagaaacacctgaaaaacacgaggacataagctcttcgtcgggtcctacactcgttatccccgagcccgaacacgatctttttgaaacaagcgagcctgacgatatcgaccgtgaggacgatgccgatgttgaagaaaccgaggaggtttccgaacaaaagcatccgcttgaaaaaaaggttgacaagtacgcaaacatcattttcggcagtgacgatcccgaggagaaaaccggggaagaggttgatgacgaggagcttgtaagggcaaaggctaagaaaaacaagtttgacagcggttatgacttttttgacgaagctcccaaaaagtcaatgggggttatcaaaagctcagacctcagagatgccgaggacgttgatgttatcggcgaggttgaaagaaaagcagaaaccgtaaagcagaacgctcttgaaaaagagaataataaagaaaccgagggtgaaccgaatgataaacggtcaacggaagaggttcttgccaatgtaggcaaaaacatcggtaacgctctcaggggctttgcaggcggagttaagaattttggcattcactgcggatatttctgcaagaatgtttcaataatgatcaagcgtaagcgtgcgattgccaaacgcaaaaaggcagaggaagagagaagagagagagaaagacaaaaggcagagcgtgcaagaaagcgtgccgaaagaggcgaaagtgacggacttgttcaggttcacagcagaaccgaccgccgcccccagcagaatcgccaccctgcaaacagaaacaagagaagataatttcttttcttaacggaggaaaaacatggaaatgctaattaaaaacgcagtggttgtttcccctgccgacaagcttaacgaaaaaacagatattctcataaaggacggtgtgattgccgaaatcggcagcggcattacatcagacggagagattattgacgcagacggtctttgtgccgttccgggatttgttgatatgcatgtgcatcttcgtgatcccggtcagactcacaaagaggatattatcacgggatgcaaggcggctgccgcaggcggtgttacaagcctgcttgcaatgccgaacaccaacccgacaaccgacagccccgaaattgtaaagtatattcttgacaaagctaaagacgccgacagccgtgtttatgttgcggcaagcgttaccaagggacttaaaagcgaagaacccacagacattgacgctgtgaaaagtgcaggtgcaattgcactcaccgatgacggcagacctgttgaaaacacaaagtatttgagtgacgcaatgaaaaaagctccaaagctcggcatgacaattgtcgcacattgcgaggacttgtttcttgccaacggcggtaaaattaacgagggcgaggtttcggaaaagctcggtgtcaagggaatccctgccggtgccgaggactgcggaactgcaagagaaattgcacttgccgccgctcttaacgagcctattcatatctgccatgtcagcaccaaaacaagcgttgcacttatccgtgatgccaaaaggagaggtgttaaggtgaccgccgaaaccgctccgcattatgtttcgctcacggacagggagcttttaagaggtgacgctgattacagaatgaatccgcctctcagaactcaggctgatgttgacgagattatcaacgggctttgtgacggcacacttgatgccatagcaaccgaccacgcaccgcacacacccgaggaaaaggctgattttgtaaaagcccccaacggttcaatcggcatggaaacctcgtttgcggtctgcaacacatacctggttaagacaggcaaaatgacgctttcacagcttgttgagaagatgagtgttaatcctgcaaggattttgaaaatcaacgcaggcactctttcagtcggtgcaaatgccgatgttgttcttataaatcccgatgaagaatggacagttgatgttgataaacttcacggcaaaagcaaaaacaccccgtttaaaggcagaactctcacaggtaaagtcaaaaagacaatcctcggcggtaaggtagtttttgaagattgagtttgttttaattgtagatgttgatactattaaaattgtgcaaacggtagctgtactacgctcgggcataaatgttttttatttgtcaaactgtctgcacgaattggggacggcggctcgccgtgttcgctcaccaaataaatttaatttaatataaactttaacataaaggagtaaaattatggcacagaagggtgacctcctgtcggtaagacaggatatcagagtagtagacgcaacaatccgtgacggcggtctttgtaacgatttcagatttgacgacaaattcatcaaggatctttacaatgcaaatgttaaagccggtgttgattatatggaattcggctacaaggcatcaaaggaaatctttaacgaagaagatttcggtaagtggaaattctgtaacgatgcagatatcagaaaaattgtaggcgacaacaagacttctcttaaaatcgctgttatggctgatgtcggcagaacagattttaagaaggatattatcgcaaagaaggacagcccgattgacctcatcagagttgcaacatacatcaacgcaattcctgcggctgttgaaatgattgaggacgctgcaaagaagggctacgaaacaacaatcaatattatggctgtttcaaaggcaagaaccgaggatattacagcggctcttgaaactctcggcaaaactcccgtaaacgctttctacattgttgacagctacggcgcactctatcccgaggagtcaagacgacttgcagacctttactgctcaattgccgacaagtacggcaagtcggttggtattcacgctcacaacaaccagcagcttgcttttgccaacacaattgaggctatgactcagggcgtcagctaccttgacgcaaccgttgacggcatgggcagaggcgcaggcaactgtgcgcttgaacttctcctcggttttctcaagaacccgaagtatcaggttgctcctattctcaaaatcattgaggagtacacccacaagtttaaggctgagggcgttaagtggggttacgatattccgtaccttctcacaggtcagtacaacacacatccccgtcctgcaattcagttcgtaaaagaggacagacaggattattacaagttttcaaatgaactttatgatattatcaacagctaattaaatttgtagcggcgttcattgaacgccaatcgaaccgattgcaaaatcggttcgaccatacaaacgatttgaattaaagtaattaaccacgatataacaatacatttgttgtttattcgttttggtttcacaaccaaaacgattggcggtcattgaccgccgctacggttaagcaatgacattgtttaaatcaaaatatgaacgaacaaattgtttttacattacaaaaaatgaggagaatcactatggcatttgacagacttatcgaaaatattgtaaaaatgcagaatcctacggttgcaggtcttgacccaaagcttgactatgttcccgaatcaatcaaaacaaaatgctttgaaaagtatggcaagacgcttgagggtgcggctgctgcactttttgaattcaacaaggcgcttattgacgcactttatgatattgttcctgccgtaaagccacaggctgcatattatgaaatgtacggctggcagggtgttaaggctctttgtgacacaatcgcttatgcaaagtcaaagggtatgttcgttatcacagacggcaagcgtaacgatatcggcacaactatggaggcatatgctacggcacacctcggtcatacagatgttgcaggcgaaagtattgacgcattcggtgcagacgcactcacggtaaacggctacctcggaacagacggtatcaagccgcttgcaaaaatttgcgattcggacgacaagggcatttttgttcttgtaaaaacttcaaacccaagctcgggcgaacttcaggatatgaagcttgaaacaaatgagagcgtttatgagcatatgggcaagatgtgcgaaggctggggcgaagaccttatgggtaagcacggctattcggcagtaggtgcagttgtgggtgcaacatatcccgaacagctcggtgaaatgagagcaaaacttccgcacacattcttccttgttcccggttacggtgctcagggcggcggtgccgatgatgttaaaaacgcatttgacgaaaacggtcttggtgcaatcatcaactcaagccgcggcattatgtgcgcatggaaaaagcaggggcttacagaagatgattttgccgttgccgctcgtaaagaggctgagcgtatgagagatgaaatcgttggttgcatcggcaaaattaagcttggctgattaatttgcacaacagaatcacgaaatttttcgttttttatgctttagtgctatgaatttattgactttagcgtgctaaaagcgtataattaaaacgtatttatttttacaactatatttttaaattttttttaaaaagggagatatcagaaatggcaagagtatataatttttcggcaggtccttcaatgctgcctgagtctgtgcttaaaaaagcagcggcagaaatgctcgattatgagggcagcggtcagagcgttatggaaatgtcacaccgctcaaaaatttacggtacaatcattgagggtgccgaggctcttttgagagaggttatgaacattcctgacaactacaaggttcttttccttcagggcggtgcgtcaacacagtttgcggctatccctatgaaccttatgacaaagagcggtaaggctgattatgttatcacaggtcagtgggctaaaaaggctcatgcagaggctgcccgttacggtcaggctaatgttgttgcttcatcggctgacaagaccttcacatacattccaaagcttgatccttcaacattcacaaaggacgccgactatttctacatctgcatgaacaacacaatttacggtactgtttatcacgagcttcccgacacaggcgatgttccgctcgttgcagatatttcttcctgtattctttcaagaccgattgatgtttcaaaattcggcgttctctatgcaggcgcacagaagaacatggctccggcaggtcttacggttgttatcgttcgtgaggatcttatcggcaacgctatggatatcactcctacaatgcttaactggaaaactcacgctgacaacggttcaatgttcaacacaccgccttgctacacaatctacattgcaaagcttgttcttgagtggattaagaacgaggttggcggtcttgataagatgtatgaaatcaacaagaagaaggctgaccttctctacggtttcctcgattcttcagagcttttcaagggtactgttgttcccgaggatcgttcgcttatgaatgttccgttcgttacaggtgacgctgaccttgacgctaaattcgttaaagaggctactgaaaacggtcttgttaatatcaagggtcatcgcacagtcggcggtatgagagcttcaatttacaacgctatgccttatgagggcgttgaaaaactcgttgagtttatgaagaagttcgaggctgaaaacaagtaattattgaatattataattattgaatattatgatataacgggcgaacgctgttcgcctgttattgtaaattcttaaaataaaaaattaaaaaggattgattttgatgtataacattcttacattaaacaaaatcgccgctatcggcacaagccgtctcggtgataactataaatacggtgacgatgttcagaaccctgacgcagttcttgtaagaagtgccgcaatgcacgatatggaatttgccgataaccttcttgcaattgcaagagcaggcgcaggcacaaacaatattccgaaggataagtgcagcgagcagggcattgttgttttcaatactccgggtgctaacgcaaacgctgttaaggagcttgttatcgcaggacttcttctttcaaatcgtaaggttattgagggttatgaatgggcaaagactctcaagggcaacggtgcagctgtcggtaagatggttgaaaagggcaagagtcagttcgtcggtcccgaaatcaagggcaagaccctcggtgttatcggtcttggagcaatcggtattcttgttgcaaatgccgctgttgctctcggtatgaatgtaatcggctttgacccgtttatgtctgtgggcaacgctctcaagcttgctcctactgttaagctcatgaagagcgcagaagatgttatggtaaattgtgactacctcacaatccatgttccgcttactgacgacacaagagatatggttgatgccgatatgattgccaagatgaaagacggtgttcgtattctcaatttcagccgtgacggtcttgttaattcaacagcagttcttgaggctgttaagagcggcaaggttgccaaatatgttacagacttcggaacagacgatatcctcggtgaagagaatattatctgcctcccacacctcggtgcatcaactcccgaaagtgaagaaaattgtgctgttatggcttgtgatcaggttaaggagtatctcgagaacggtaacatcatcaactccgtaaactatcctgcaatttcacttgcaagaacaaatgctgacgatacccgtttctgcgttgctcacaagaatgttcccgagcttctcaagaaggttctttctcagataagcggaaatgttgaaaatatgctttcaaagagccgtggcgactatgcttacacaattattgatgttgcaggcgccggtgcagatgaccttgcaaaaatcgcagcagttgacggcgtaatcagagttcgtgcaatctgatttcgattttaattgaactttaattgttggttgtaaaaaattatccgagcattgttttgatgctcggattttttgcgtttatttgtacaaatggttacaatgctacactctggcatgatatgctttaatatcacaaactgtctgcacgaacggggtgcggtggtacaccgaccagatggtatttttttgcattggcaattataaatgttacggaaattgcaacggcacacaattctgcaacgggcaatgccgaccatacaccgtttatgcctataaacatcggcaaaatcagcattgcggcacactcgaaaacaagcgttcttgcaactgaaattacggctgaaatcttgccgttgttgagtgcggtgaaaagtcccgatgcgaaaatattcattccgcacaacagataatttattgcaaaaattctgaatccgctgagtgcaatctgctgaattttttcgttgcctgccgagaaaattccgacaagcggttctgcaaaaaattcagatgccgtaatcattgcaaccgaaattatcagcgtgatttttatgcataatttgaacagcttttgcagtttttcgtgattttgtgcgccgtagttaaagctgatgacgggtgaaactcccgaagtgaatccaaacgaaaccgcagtgaaaataaagtgaatgtacaaaatagcacttatagccgcaacgccttttgcgcctgcaaagtgcatcatctgaatgttgaacagcgctgttgtcacggctgttgaaagatttgtcacagcctctgacgagccgtttgccatagcaaagaggatttcacttaccttgaattcaggcttgccaaagtgcagagtctgctttttgttgaaaaagagcaaaagcggaattgcacccacagccattccgatgattgtgccgagtcctgcaccgattattccaaaatcccacacagccataaaaagaatgtcaagcacaatgtttgtgcaacccgacagtatcgagaaaacaagcatgatatgtggcttgtctgctgttacaaggtacgattggttgagcatctgccagcacattacaaagccatacggaatcataacgctgccgtagtcaatgcagtaggggagaattttttcgtttgagccgaacatcatgtacataggttcggcaaaaattgtgaacagcacagcaatgataacagaaatgaccgttgccgtgattgcaacaccggacataagtcggtttgcttcctcctgtttgccttctcccattttctttgcgattatagcatttgagcctgttgaaaacattaagcccacagccataaatacgagcgtgaacggatatacaatattgattgcggacaatgcgtcacttccgacacagttcgcaacaacgattccgtcaacaaccgtgtaaagtgacataaaaaccatcataagaacggttggcaaagtgaacttcagaatcgtttttgctttgataggttttgcataaattgatgttgccataaaatttccttaccctcaaatttatatttttcacagaccatttaaacgattgtatcataactttgtcgcaattacaaccgatttgtctttttttgtaaaatatgctattatatacagacttaaaagcgaaaaaaggggcggttttatgtttaagggcgcagtttttgatatggacgggcttatgattgacagcgaaaggcttgtttattcaatctggcaggaaatgcttgatgaggacggcaaagagtttaatcttgacattttcaaaaagacaatcggacttcgcagtgaggattcctacgaatattacaagtcggtttacggcgatgattttgactatcctgcttacaaggcggagtcgagaatccgctattttaagcgtatcgaaaagaacggtgtgcctgtaaaaaaaggcttgtacgaaatttttgattatttaaaatcagtcggttgtaaaatttcgcttgcaacttcaacctcgtcacaaacggctttgaagattatgaagaaaatcaatctctatgataaatttgacgcattcgtgtgcggtgatgatgttaaaaacggcaaacccgatcccgaggtttttttgatagccgcaaagaagctcgggcttgagccggtggactgcgttgcgtttgaggacagcattaacggcataaaatctgcacatgccgcaggtatgaccacggttatggtacccgatttgtcagagccgacagacgaaattaaaccgatgattgattttttgtgtacggatttaagcgaagcgataaagcatttataaattgaaaattacggcgagccgccgttcccaaggctccccctgcgagtttatggttcttgcatattgttggctcaattatccgagaaaattacaaataattacaaatggttacaatttacaaaaatacaatttagcagggctgattattatacacattttccacatagttttcaacaattgttaaaaaagaacggcaatacctgttgagcgttgctacggttactgcggaaaagggaaaaatgaaaaataatcattgaataacagcacgataatatgttatactttggtaaacaacaattttaacggaggacaaaatgaagaaaattataaataaaaagtcactcaagggtacgcttgctgttatgttgtgtgccgttatggcattttctgtctgtgcctgtgactttgactctgacacagaaccaaccaaaacggatgcacaaattcagtttgataaatattgtgacgatttgttttcggaagaacttgaggatgacgctcttaccgcacattttgacatttcaaatccgtcggactacggtttgaaatatgacgaggaggactataccctcggtcatgtgtccgatgaagatacaaaagaatcctttgatgaactgaaagaggcaaaaacggatttggaggagtttgaccgttcgggacttacttcttctcaaaagcagacatatgacacccttgaaagctactttgaaattcagctttcatatgagggtacaacagaattgcagagtatatttgcaccgcagtcgggaattgttgcaaacctctttaccaccctgtcagaattcactttctatgaaaaggatgataccgacctttaccttgctgttttgaaggacacaaaacgctatatggacgagtgcattgagttcacaaagaaacaggctgaggacggttactttatggctgaagatattgcacagcagtcaattgacgagtgtgaaaagcatattaagaatgacaagtccgtgcttgttgacgagtttgagtcgagaataaagtcactcggtcttagcgattccgagaaaaagactgttgtcgaaaccaataaaaagtattttgaagaatactacattcctgctttgaaatcagcaaattcagcacttgaaagtctcaaaaaatcaggcaaaaacgaagaaggtctttgcggttacggcaaaatcggcaaaaagtattattcggcaattgtcaaagacaaaacaagcagcagtatgactcccgaggagcttaagtcataccttacaaacagctttacaaaggttggaatgagcatgagcaatgtttcgcaggatgacttgagcaaatttcaggactataatcccgactttaaggacgccgatgaggtgcttgaatttttgattgagaatatcgaggaggactttccgactcccgttacaacctcttacacggcagattatatgagcgattccgcaaagagcgacaatgtgggagcgtactatgttcagggacgaattgacgatacaagcgttaatatcatcaaaatcaaccccgactttgcaaataagggtatgactcagatgtacacaactcttgcccatgaaggctatcccggtcatctttatcagtttaccgcatcaaatgcaaacaaggatatcccgaatgtccgcaagattttaagctttatcggcgctaccgagggctgggcgcagtatgcctcgaaatgtacgcttgattaccttgatacaagcgatggcattaagaaacttatctacgcaaacgatatcctcggctatattctctactcaatggtcgatgtcggtgtgaactacaacggctgggattatgaaaaagtcaaggagtatatgtcaacggcactcggttcagctgacagcgagagcgttacagccgcaacaaaagaggcgtatgaccttgcccgttcaaatccgggttactttctcccctataccgtaggctacctcaagatgattgatatgcgtgaaacagccgaaagcgagcttggctcaagctttgacgcaaaggagtatcacacattcattatgaatctcggaatcacaagcattgatgtctatgaaaaagcccttgatatgtggcttgaaagcaaaaagtaa

SEQ ID NO: 106 - DNA, 7693 bp, unidentified
  source 1..7693: mol_type = unassigned DNA
ttatatactggtgtcttcaaacttatacagctcccatcctccggctttccgacggaagtacaggatgttggagaaaccgttgccgatacctttcaacgcaagaatcttcgttgtcgagttatcgtcgtttctctgtccgtagttgatattggagaggcgttcggaaggaagttccggcttgaaggcaaaccattggtcccggtcgagcgtagtctccaaaatggagaagtcgtcatccggatcgctggtaacaaaaatcaacggttcgcgtatgcgccgactctggaaaagactgtcgacggcaaaacggccgaagaactccacaaagtcctcatcgtcgtcctgctcgataggacgcaaattgatggcttccagcatccacgctcccttgatgcgttcaaagtaatattttttcatcatccgtgtcttcacgaatatccactccacttgcacagaagtaagcgcagtatctcctactaaatccatatcttcttctttatcaaacaggagcgtatagtaatgctgcttggtaaataagtcgtcatgcttccaatggtgttcgtcgatgttcagcttcttgtctccattgtagtagggcaacggaaacttcacacgctgacgctgcaacacgtcgtcggaggcaaaattatagataaaatcgtcgaaagactcgtcggcctgtataggctgcggctcttccggcaattcttcctggtggattgaatcggttttgtaccggatggaatccacctcttttgtaatagatgcgaaggggtcaatcttagctttcttgtttccacaggaactcagtataccgagcaatatgacccctgcaattaattttttcattattttaatttctctcgtaacttttcaagcatatccaccgtcatgctttccaaatcgtaggcgggcttccacccccactcttcgcgggcacaagtgtcgtccagactgtcgggccagctatcggctatgcgctgcttcaaggggtctatgtcataaaccatctcaaactgcggcacgtgcttcttgattgcctgatatatcgtttccgggtcgaaactcatggaagcgatattgaaagcattgcggtgtatcagtcttgccggatcagcttccatcagcgtgatcgccgcgttcagcgcatccggcatatacatcatatccatcaaagtgccttgcttaatggggcacacaaacttctctcctttcactgccgaatagtaaatgtcgacagcatagtcggtcgtacctcctcccggaggggtcacattcgaaataatgcccggaaaacggacagcacgggtatcgacaccatatttattaaaatagtagtcgctcagcaactctgtcgttactttcgtgactccatacatggtacgcggacgctggatcgtgtcttgcggtgtcttggtgtgaggcgtacttgcaccaaacgagccgatagaactgggagtgaacaccgcgcatccttgttcacgcgccacttccagcacattccataatccatcaatacctatcttccaagccagcttgggtttcgactcggcaactacggacaacagggcagccaaattataaatcgtatcaatgtgatactcttttaccacagatgccaccgcctgagcatccgtcacatcggcaatcgccgaaggcccggactctttcaattctcctttaggctctgcacccggtatataacctgctacaacatttgcatttccataacgtttccgtagctccatcgttagctccgacccgatctgtccggtagctccaataatcaaaatgtgttccattttttcttctgacttagaatatcaagcttaaatagtgcgcaaagtaagcacttttttttcagattttaatcaaaaagacattgttattccaagaaaaattgtgtcctttgcaatataacttaatcacataaacaccatgtacggtaaaatgcaagaattcctcagccagacattggctgaaatcaaggaggccggactttacaaagaagaacgcctgattgagagtgcgcagcaagctgccatcactgtaaaaggtaaagaggtactgaacttctgtgccaacaattacttgggactgtccaatcacccccgattgatcaaggcttcccaagagatgatgaatagtcgcggatacggtatgtcgtccgtccgttttatctgtgggacacaggatattcataaagaactggaagcggctatttccgactatttccagacagaagacacgattctatacgctgcctgcttcgatgcgaacggcggggtattcgaaccgcttttcaccgaggaggatgcgattatctcggactcgctgaaccacgcttccatcatcgacggtgtgcgtctgtgtaaagcgaaacgctatcgttatgccaatgccgatatgaaggatttggaaagatgtctgcaagaagcgcaggcgcaacgtttccgtattgtcgtgacggacggtgtattctctatggatggcaatgtggctccgatggatcagatttgcgatctggccgagaaatatgatgcgctggtgatggtagacgagtctcactcggcaggagtggtaggcgccaccggtcacggggtcagcgaattgtataagacacacggccgcgtggatatttacaccggaacgctgggcaaagctttcggtggtgcgctgggaggatttacgacaggccgcaaagagattatcgacctgttgcgtcaacgcagccgtccgtatctgttctctaattcattggctccgggcattatcggcgccagccttgaggtgttcaaaatgctgaaagaaagcaatgcgctgcacgacaagcttgtagagaacgtgaattacttccgcgacaagatgaccgctgccggatttgatatcaaaccgacgcagagtgcgatatgcgctgttatgctgtatgatgcgaagttgtctcaggtttatgctgcacgtatgcaggaagagggtatttacgtgaccggattctattatccggtggttccgaaggaacaggcgcgtatccgtgtgcaaatctctgcaggacacgagaaggctcatctcgacaaatgtatcgctgcctttatcaaagtgggtaaagaactcggcgtattgaaataaaactttttcatatcttccattgttattattggggtgcattagaagtgccgacaagataacaatggaagattttttatttatatatggaagaactgactctcacgactcctgcccttcttttctcggcagtctcactgattttattggcttacaccaatcgtttcttatcgtacgcacagcttgtgcggcagttgcgcgaccgctatatggagaatcctacggatatcacggtagcacaaatagagaacttacggaaacgtttgaatctgacccgcaccatgcaaggactgggaattgcgagcctgtttctctgtgtggtcagtatgtttttcatttatatcggactgcaactgctgtccgcctatgtattcggagtggctctgctgttgcttatcgcttcattgggcgtgtctttccgcgaaatacagatttccacccgttcgctggagatttatctgggaacgatggagaagggaaagaataaagacaggaaatgacctgtaaacaaaaaaaagagtgtgtcgaaactctcataaactaaaaatcaccctcgccacagaaagttgtaacgagggtgatttcgataaaaggggagttttgacatatccccaacttttatttgcagcttattaactgtttgtagcttattaacgctgtcccaattgtgagtctacaaagaaaattccggtatcaccggctttcttgattttgtcaacaatgccttgcgctgtagcttcttcttctacttgttcgcgaacgaatccccacaagaaatcttgtgttgccttgtccttctcagcagcagctacgtctaccagtttgtctaccaattgagaaacatggcattcatgtttgtaaacgtgctcgaatacttccaacggactaccccaaccgttaggaacaacatctattttatcaactttagcggttcctccacgtttgataatataatctgccatagcataagcatgacccatctcttcttgagactgcttcttcatccaatgggcaaaaccactgaaaccttctttctcgaaatagaaagacattgccaaatacaggttagcagaccacatctcagcagtaatctgttcgttaattgcattctgtaatttttctgaaatcataatcgtatcttttattaagttgttaatgtagtttctttttgaactcattacaaaaataacaagatttcagtccaaattgttccatgcaccccgcatttttaaactacattcacactttgattgtggcggttcattttttacttacaacagctcgtcggaagtatatcctttcggaagctcacgacagttatagccggaagccattatttcaccgtatgcaccggcagaacgaagggctatcaggtctccacgtttgactttgttcagatcaatcgcttttccgaaaacatcggacgactcacatatcggccctactacatcgtacgcttccatcggttcttcggaagtcaggttttccatcttatggtatgcctgatacaaagccggacggatcaaatcggtcatacctgcatcgaggatggcaaatttcttcttggctccttgcttcacatacagcactttggatatcaacgtaccacactgccccacgacggcacgccccaattcaaaatgaagtgtttgataaggacgcagtttcagttgtccggcataggtggcaaaataatctttgaagttcgggatagcctgacggttgggatggccgtaatctatccccagaccaccaccgacatttatatgttctaccagaatccgacgtgcttccaacttgtcctgtaattcattgacacgattgcacaaagcgacgaaatcgcccatatcgagaatctgcgagccgatgtggaagtgaaggccgataaacttgatattcttcatttccaaagccacgtctatcactttatccatatcctgcatactgataccgaatttattttcggcaagaccggtagtgatattggcgtgagtatgcgcgcctacatccggattgatgcggaaagcgacattggctattttgttttgagcggctgccagctcgttgattacttcaagctcgggaatagattctacgttaaaacagaagattccatattctaacccgagattgatttcccagtctgctttacccactcccgcaaaaacgactttattggccgggaatcctgcacggatagcggcacggatctctccaccgctcacgcagtcggctcccattccgctttcacggatgatggcaagtaccttcggattggcattcgctttgacagcatagtgtactgaataattaggatatttggcaacctcatggttaatagccgacaatgtatcacgcagcactttggtatcgtaataatagaaaggtgtctgcaaagtgcggaatttatcgattggaaatattcccttcataactcaaaaacttgtttagttggttaaaaaaagcgcttttatcagttcggtaaaagcgctcatattattgatggaattatttgccgttgaaaagcatatcactcaacgactgtaaagccgccttcttgtcgcactcccgaatgaggaaggagatgttatagttgcttcctccgaatgaaatcattcgcaccggtatgtcgcgcatcgcatcaagcgctttggcttcaaaaccgacattttcccattccaggtcacctacaacgcagatgatacacatttctttatcaacggttaccgttccatatttcttcaggtcatccagaatttcattaagatgtttcgtgttatctatcgttacagaaacaccgacctccgaagtacagatcatatcgatggatgtctgatagctttcgaagatttcgaacaccttacgcaagaaaccgtgagccaataacatacggctggatttgatcttgatagcagtaatgttatctttggcggctactgctttgatttttcctttctctgtatcattggaaatcaatgtgccgggagcggtcggatccatcgtattcagcaaacgtacaggaatattggcatatttagccggctggatgcaggtaggatgcagaatcttcgcaccgaaataagccaattcggctgcttcttcgaaatgcagctgacgtaccggagctgtcttgtcaacgatacgcggatcgttattgtgcataccgtcaatgtctgtccagatctgaatttcggaagcattcaccgctgctccgatcagagaagccgtataatcgctaccgccacgttgcaggttgtctatctcaccataagcattgcggcagatgaaaccttgcgtgatgtagatatccatatccggataaagttcgagctgtgcctgcaacttctccttaatatatacggggtccggctccgcgttcttatcagtacgcatgaattccaaagccggaagcagtacagacttcgcaccgcattcctgcaggtagaagttcaccattgccgtagaaatcagctctccttgcgccaaaaccactttctcttcaaacaaagtgaaaaggtctttcgtataggagcggatgtagtcgaagtgagacttgatgacttcgagacctttctgtttatattcctgagttgcgaatagctcatcaacgtgctgtttatatttagcttccagcttattgataatctcgttggcaccctccggattcttcttatacagatagtccgaaatttccaccaatgtgtttgttgtacctgacatagctgaaaggacaacaatcttctgttcaccatcggtaatcaatttggctacttccttcatgcgctgagcagaacctacggaagttcctccaaactttaaaactttcattttcgttactgttttagttatctatatttaaatctatttctattgttctctgccggggcatatattcatcggtcacatcgacaatctgatggtcggcacaacgatacacccgacccggatattctttcaacaattgcagattgtgcgtggtcatcacaacggatgaaccggaactgcaaatattatgcaacaattcaacaatcgatttccccgtttccgtatccaggtttccggtcggttcatccgccaggatgatggccggagaattgagtacggcacgtgcaatcacaatgcgctgctgttcgccaccggaaagttcgttcggcagtttgtatcctttattggacattcctaccaaattgagcacttcttcaatacgttccttgatttcctgtttgttcttccagcctgtggcacgaagtacaaattccaggttattgtaaacggtacggtctgtcagcaactgaaaatcctggaatacaatgcctaacttgcggcgcaattgcgggatatgcttacgtttgatagaccgcatattataatccagtaccttagcttcaccgtcaattacatccagttcgccataaagggtcttgagcagactcgtctttcccgagcctacttttccgatcagatagacaaactctcctttgtgcaattccagatttacatcactcagcacacagagttcctgttgatggatttctacgttcttatatcgtatcaacgcctcgtcatccat

SEQ ID NO: 107 - DNA, 7263 bp, unidentified
  source 1..7263: mol_type = unassigned DNA
  misc_difference 6249: note = a, c, g, or t
  misc_difference 6250: note = a, c, g, or t
  misc_difference 6251: note = a, c, g, or t
  misc_difference 6252: note = a, c, g, or t
  misc_difference 6253: note = a, c, g, or t
  misc_difference 6254: note = a, c, g, or t
  misc_difference 6255: note = a, c, g, or t
  misc_difference 6256: note = a, c, g, or t
  misc_difference 6257: note = a, c, g, or t
  misc_difference 6258: note = a, c, g, or t
ttaattttcatccccattacgaagatcatcggcaatatcctgatgctgccgagccaactcttcctcccctatatgcagaaatgcttcggcaagatattcatgggctgcagcgtgcttcggttttaggtcgacagctttcataaagtcagaaacggcttcgtcgtaatatttcagttgaagataagattttccacgattataacgcgctttaaatgatttcgggttcagtcgcacggcttcgttcaggcaagtaaccgcctggaaaccgtcacccatatcgagaagggtcactcctttacgtacccaagcatccacaaactcaggataaagcttgagcgctttgtcgaaagagcgaatagctgcattcggatcatgcgctttcgtaatacattcattccccatcaaatagtattcgtgggcatattctttctgaatctcccgctgggcgtgtatctcctcccggagtttcttgatctgcgcccgttgagtgttcatagtttgcaatttcatacggagcaaccgttgcacttctggcttttccagctcattccgcttactgacagcagcagcgaaagcctcaaccatctctttcacattgccggatttaaaacaacgggcggcacgtgcatacaacaattccgcctcactttcacgcaaacttttttcaatcaactgccgatcattaaacatctggctgaactggacgatctctttccgcacaaagatatcatgcggagaaatccggcttttcagcaccagcccttccagagacgtacaacgacttaaagcgacatatgtctggccaccggcaaacacaccaccagtcaaatccaccacgacacggctgaacgtaagcccctggctcttatgcacggtgatcgcccaggcaagacgaatcggcaactgctcgaaagtaccgacaatttcttcttcgacctttttctccttttcgttgtatttatatttatagttgcgccaggaagtcggctcgaccagatattccctcccgtcctctaacaggacgtagacattcccattctcgtcgatccccgacaccataccgatcgtaccattgacccaacggcgttcataatcattatcgataaaaatgacctgggcctgctccttgatggataggtttaattgtgtcggtagagacgactcagggaaatcaccttcgatcttgccgtgagaaacgaactcttcaccgggcaattcccccaacttccgttcattgataaaatccacctgatcccgccgggtggcaagcgtgatgtacatatcctcgtttcgaggtataaaatcagggaaatagcgagcattcaaagtatccaactcctgtttccgggcaatattgctacggatacgatccaaaatattgataaatacaggatctgtctgccggtacactttctgcaattcaatcgggaccagatttatatctttgaagacacgggccgaaaagaaaaacggactggcatagaagagacttaatatttctttctggtcggcagggaccaccggctccaattggaagacgtcgccgacaaacagcaattgcttgcctccgaacggcaaacgcatattaccggaaaagacacgcaagatccggtcgacacaatcgatgatatctgcccgtaccatcgaaatctcgtcaataatgatcaattccacttccgaaatcaacttccgatgctctttcctgtatttgaaaaactcgaagatccgtccgttcttcagactcaaatccggatcatcgggcaacatcgggcgaaaaggtaatttaaaaaaagaatgaagcgtcaccccttccgcgttaatcgcggctatccctgtcggtgccaatacgacatatttctttttcgtatgtgcgcagatgtatttcaagaacgtggatttacccgttccggccttcccggtcaagaagacggactgacgtgtatgagtgatcagttgcagggcatcctgaaactccttattatctgtatctaactgaaattccaatcgtgtaatttttaagtagacaaagctatagaatattttatatatctactcataaaaagttcataatttatttgcatatgtccggaactttgtcttattttgtgatatcaaaataatatcaaataatgatcattatgaaaacacaggaaaagaacttcgacggcatcaaattatccggttttacggctatacttatcatgcttgctttaacagggacagccatatatctactatcgctgccacaaacaccgagtatcatcgccggtgtcatctgcgggatatgcgttgttgtcatgttacccggatttatgatcatccagccaaacaattcgcgcgtattgacttttttcggcagatatgccggaacggtcataagtaacggtttctattgggtaaacccacttttcctgaaatcaaccgtaacattacgcatcctaaacttgaacatcgacccgatcaaagtcaacgacaaagtcggaaatccgatcatgatcggagccgtggtcgtctggagaataaaagacacctacaaagccagtttcgatatatccggaaacatccgagagtttgtccaaatacaaagcgatgccgctcttcggcaagtagcaggcatgtatgcttacgacacaaacgagacgattgataaagtcacactccgttctgatgaaagcggagaaataacccaacgcctagaagacgaactcaacagccgtcttgccatcgccggaatcgaaatcgtggaagcccgtatcaactacttggcttatgcatccgaaatcgccagcgtgatgttacgccgtcagcaggcagacgccatcatttctgcccgcgaacggatcgtggaaggagctgtcagcatggttcacctggcattggaaaagttagagaaagacggtgttgtcgagctggatgaagaacggaaagcagcaatggtcagcaatctgctggtagtcctttgcgcagacgagtccgcacaacctgtagtcaatacaggtactttatatcagtaacttaatacagtaatactaaatatggccaaaaaggaaaatggaaatgcgaccaagagtttcatattgcgtgtggacgcagaaatgatggaagcgatcgaagcctgggctgccgatgaatttcggagtacaaacggccagatacaatacattttggatcaagccctacgcaaggctgggcgcctcaaaaagaaacgaatactaaaatctgaaaagaaaaataaagagtagaaaacaataataacgaaaacctgtccggacgttttttaaatatccttcagtagaaaataacttttcaactgaaggatatttctttctattcattataaatcaacggctaataaataaccacgcatccttatatttcggattggaacggagagttgccatataagattccgcagcttcgcgattatcgaacttatccgcatagatacgatacttcccgtcacaaacaaccttgctgacatgcttacattcgttacgatctacaccgacaataaattcgtccgcttgcgattctgatggaaaactggcgattacgatatgatacatttttttaggttggacaactacaggcctggacacaaacgccttcttttccggagccggaacagacacaacttttttcacttcacgcgcaatcacctcttccgatggctcttgcttcgtatctgcctccgccacagtactgtctggcaaaaccgcttcaagaagaaccggcttttgtacaaccatccccgtcggaacaaaactggctgtataagcctcttggttaacatctctaaccggagtagaaaccaacaggaacaatgccactgcagcagccgaagccatcactgtacggataagtttacggctaatcggaatataaagagtatctttcttctctttttgggatgtaagaagaaccgcttcttcgcgttccatctctagtggagcgagaactgggaaatggaaaacaggcaagccatatgagccgacactgaacagatcggtttcccccggatggaaaatcatctgtccttcttctcctatgctgaacgaacctaacacccctaacgacaactttccatattgttgcaggatgttctttatatcctccacatcttcttccagcatcagttgcgcctgacgatagctcacctcgtgcatctgcatatacgattcaggcaaaagcccgtcattatgttgcagcgtcatattgaaaccgatctcttttctcaaaggacgaaacgtatgttcctccttatgctgcatggccggaacaacctgcaaaacaaaacctccgaacttcggcacaatcacacaatcatgcactaaaagcaaacgttcaatatgtgttacaattctaagcatacaacaaaggtaaatcttttgtctggattgacaaaaaatttataggattacaattggtgaaatttgtatctttgtaaggaaaagaatcaattaatcaataaagatcatatcatgcttgcatatacatatattgaaaaaggcaaatttggtttaacagaaaaaccgaaaccgaaaattacggatgcacgggatgcgatcgtgcgtgtgaccctgggtagcatctgcaccagtgacctgcatatcaagcacggaagtgtacctcgcgcaatactcggaacaaccgtcggacatgaaatggtaggtgtcgtcgaagaagtgggaacaggcgtcacatctgtcaaacccggagacagagtaaccgtgaacgtcgagactttctgcgggaaatgcttcttttgccaacacggatatgtcaataattgtaccgaccccaacggtggatgggctttaggctgccgcatcgacggaggacaggcggaatatgtcagagtaccctatgccgatcaaggactgaatcgcattcccgacacggtcagtgacgagcaggctctgtttgtcggtgacatacttgccacaggtttttgggctactcgcatctcggaaattacggagaaagacacggtcctcatcatcggtgcagggcctaccggaatttgtactttactctgctcgatgctgaagaacccgaagcatatcattgtctgtgaaaagtctcctgaaagggttcggtttatccgtgaacattaccctgacgtcttgatcacgactcctgacaactgtaaggagtttgtactcaaaaacagtgaccacggcggagcagatgttgttctggaagtggcagggagcgaagacagtttccagatggcgtgggaatgcgctcgtccaaacgcgacagtcacgatcgtggctctttacgataaacctctacttttccctctacctgacatgtatggtaagaacctgattttcaaaactggcggagtagacggttgtgattgtgctgagattctccaactgattgaggaaggcaagatagacaccactccccttatcacccaccgctttgcattgaacgagatcgaggaggcttatcgagtttttgaaaacaaactggacagtgtaatcaagattgctatttattaaaagacttgtcaaatgcctgttatcgaaatatcttctttatctcatcccggagtcgaaatgttctgtacactcaccgaagctcagttgcgcaatcgtatcgagccagacaaaggtatttttatcgtagaaagcccaaaggttatcacgagggctctggatgtcggctacgaacctttagccattttgtgcgagcacaagcatatcagaggagatgcttccaatatcattgaacgttgtagcaacgtgcctgtctatacaggagaaagggagttgcttgcgacattgaccggctatgtcctgacacgcggtgtcctttgcgccatgcgtcgtcctgagccacgcggcatggaagatgtatgccagaaggcccgacgcatcgtcgtaatcgacggagttgtcgacacgaccaatatcggtgctattttccgttcggcggcggctcttggaattgatgccgtattactgacacgcaactcttgtgacccattgaaccgtcgcgcagtcagagtgtcaatggggacagtctttcttgtgccctggacttggatggacggttctcttggcgacttgggaaaacttggttttcgtacggcagccatggcactcacagacaattctatttccattgataatcctgtcttggcaaccgaacccagattggcaatcgtgatggggactgaaggggacggactttcgcaggaaacgattgccgcagccgactatgttgttcgcatcnnnnnnnnnncgcacggtgtcgattcactcaatgtggcagccgcagcggccgtggctttctggcaacttcgtgctccaaatccacaataattccccgattgcatatcgttcacctacaaccattgtaaatagattcaattatgattacttttgccatcctattaaaaagcgaaagatcatggcagacaactatctggaaaagaaatacgaagaatataaatcccgcaaggagggacgtacgaaccatccgtacaatggcaggaaaacaaccgttatccacaaaaccaggagagtctttgtaacaggaggtgcggaaggtataggcaaagcgatcgtaagagctttccgttccgccggacaccgcgtggcgttctgcgaccgtaacgaagcggcgggaaaagagacagcgttgcagaccggaacctcttttttccatgttgacgtaagtgaccaagaagcgctagagaactgcatgcagcagattttcaaggaatggggcgatatcgatatcataatcaacaatgcgggaatcagttgtttctcccctatcacggaaaccggtgtggaagatttcgaccggatattatccgtgaacttgcgtccggttttcatcacttcccgcagattggccattcaccgccaatcacaagaggtacccaatccgttcggacggatcgtcaatatctgttccactcgctatctgatgagcgaacccggcagcgaaggttatgcggcatccaaaggcggtatctattcgctgacgcacgcccttgcactatcacttgcccaatggcatatcacggtcaactcgatttcgccgggctggatcgagacgcgcgactacgaacagcttcgcccagaagatcacgcccaacatccgtcggggcgagtaggtaaaccggaagacatcgcccgtttgtgcctgttcatctgccaggaggaaaatgattttatgaacggcgagaacgtaacgatcgacggagggatgacaaagaaaatgatctatatcgagtga

SEQ ID NO: 108 - DNA, 12442 bp, unidentified
  source 1..12442: mol_type = unassigned DNA
atgctaaatagaatcagtaaatcactattgcttacggctatgatgacaggagtttcttattcctttgcacagcagcttccggcagtagcctataaaaatccgactttgcccgtagaaacaagagttgcggatttactatcccgtatgacattagaagagaaagtcggtcaactcctttgtcctttgggttgggagatgtatgaaatcaaaggtaacgatgtgctcccttctgataaattcaaacaactcataaaagacagaaatgccggaatgctatgggcaacctatcgtgccgatccgtggacaaagaaaacattagcaaccgggctgaatcccgcattggctgcaaaggcaggaaatgccttgcaaaaatatgtgatggagaatacccgtttggggattcccttattcctggcagaagaagcaccgcacggccacatggcgattggtacaaccgtttttcctaccggaatcgggatggctgcaacttggtcaccccaactgataaatgaggtaggtaaagcaatcggcaaagagatacgtcttcaaggcggacatatcagctatggacctgtgctcgatttggcccgtgatccccgttggtctcgcatggaagaaacttttggtgaagaccctgtattgacgggtgaaataggaaaggcgatggtggcaggattaggtggtggagatttgtcacgtccatacagcacgctggctaccctcaagcacttcctcgcttacggtatctcggaaagcggacagaacgggaatccctcttttgcaggtatgcgtgaactgcatgaaaactttctgccaccatttagacaagctatcaatgccggagcattatccgtaatgacttcgtataattcgatggacggtatcccttgtacagccaatcattatctcctgaccgaacttctacgggatgaatggaagtttaaagggtttgtcgtttccgatctatacagtatcgaaggcattcatcaaagccattttgttgcttctacaatgaaagaagcggctgtaatggccttatctgccggggtcgatattgatctggggggcgatgcctatatgaatcttatggatgcggtgaaccggaaggaaataagtaaagaaatccttgatgcagccgtgagtcgtgtacttcgattaaaattcgagatgggattgtttgaaaatccttatgtggatcccggaaaagcgaagaaagaagttcgtagcaaagaatacgttactctggcacgccaagtggcacaagtctcgatcaccttattgaaaaataaacactcgctgcttccattagacaggagtatgaaagttgcactgatcggacctaatgccgataaccgctataatatgttaggagattacaccgctccgcaggaagaagaaaatgtgaagaccgtactggatggaatcagagcaaaactttcttcctcacaggtggaatatgtgaaaggctgttccattcgtgataccgtgacgtctgatattgaacaagccgttgcagccgcccagcgttccgaagtcgttattgctgtggtaggaggctccagtgcccgtgatttcaaaaccagttataaagaaacaggtgcggccattgctgatgaaaagacaatcagcgatatggaatgtggtgaaggcttcgaccgtgcaacgctttctttattaggaaaacagcaggaattactcaaagccttgaaagctaccggaaaaccattaatagtagtttacattgaagggcgtcctttggataaaaactgggcatcagaaaatgcagatgtactgctgacggcctattacccgggacaagaaggggggaatgccattgctgatgttttattcggtgaatttaatccggcaggacgattaccattctctgtgccccgttccgtcggacaggttccggtatactataataagaaggctccccaaagccatgactatgtagaaatgtctgcttctccgctttattctttcggatatggcttgagttataccacttttgaatattcagatttacatctgtcggctctgacaccacactctttcgaagtttcatgcaaaatccggaacaccggaaagtacgatggtgaagaagttgttcaactttatttgagagatgaatatgcttcagtagtgcaaccgttgaagcaattgaaacactttgcacgcctctttttgaagtgtggagaagaacaggaagtgaagtttattttgtccgaagaggattttgcacttgtcgatcggaatttgaaaagggtggtagaaccgggaactttccaagtaatgatcggtgctgcttctgatgacatcagattacagacgaaagtggagataaaataggagatactctctattcatctatgaaacaaaaatatcaaatttagatctcacagtgatttgtacctgttttattgtcaaattgtcaatataatatctaaacggatgaatatcaatgctatagtgtctgacaatagccactgaaaacaggctgacaataaaagatatcaacttctattgtcagccttgcttttgtatcctataatatctttactacctgatatacagtacctttataagtatgtttcgaggcaattccgcacttttgaagcattcttccgaagtgatatactttgttgtcggacaatgaaatgccgcttttcttcttcaagtaattcagtatttctaccggagtaaagaattctccttcctctccctcttgtggagctctaaagtattgataaaacagttggatcatagccggtgtttgttcaaactcacggttgttctcggtcataatctgctcgtcttcactattaaaccaataacgctcaccatgagaaatttcgtgcatggcttgcgcgtaaagctgttcataatctatcggctgtgtagtgtcgatgtttcctgtcacttcaatacagataaagcgacggctccccgaagggtcggtcagcaaatccttctgattgcttgtaccgataaatgaagcataccgttgtaattcaagcaccgagcggccatgtggctttcgaaggttgaccaccgttttttggagaatatgtttcagaaacccctgttgggtcagcttaatctgatcgaactcatcaatgttgatgagcgcaaaacgattcagatacagttccgcatcccgtttctggctgaaatcaatactgtccgtatagtaagctcggagtgcaggaggaatcatttcacggcaaaaagtagatttatgagttccttgtgctcccactaatataggcgatgtactattggcatacattttatttactcccctccaatgcgaaaccatattaaggaaccagcggtgaaaaagtaattcccaatgcggattattgcagggaaccctgttggctaacgcatggatacggtcttttccatcccaatgtggcaggtgaaacagaaactcctccaacggattatagataggcacacggttggagtgcaagtaacggtctatgtccctgtcccatactccgattccttcggattgcgcatccagcataatgctgttttgtgcccgtttgtcgatgggatggaaatagaaccggaacgagaaacgctcccggtattccacctccccgatttgcgtattgtaacggaactcataacgacggttcataaattcatccatttgcaggctaaggcgttgctctttggtcagacagttgcttttcggcactcccttacattccttatatacgtttcttatcatttcacgtaccagcattggattctttcttttgttataacggatgatggtgcgtctggttgcctcctcttccggaatgcctgagtagtagcagttctcggcaagcgggactattaatatttgcaaatcatcatcccgatgccaggcttggtccatttcttcaaaggtctttcgcaatgccgcttcataaagcagtgccactgtatcctccgtatcatatcccggcagggcacgattcaatggcgatgcttctgtgctcgatttctcatgataagtcatctcgccgggcataccgataggctgtgaaagatagaaaggaacaggggtggaacgataaatcaagtccggatcatagctaagacgtgagaactgttccagtttcggctcttttagcaggatattgaaagggagttgaggctgataacatttgatggctagtcgataagcatgtgcttgaaacacttcggcttcttccgctgtttgcggcaaagtgccgtccggtcgggtgaagcaagtccatatcttgacacttttgccgcttgctcccatgaaagccagcattgtctgaggaagttcggcagccttttgcttcacaatctccacttctgtttttccggctaacggaccgacggtcagttctacaatcccattgtaggttttcatttgtctcactccgttcactcgcccgaaagctgcggcaggaatcactcgcggcaatttgcttgtgagtgaacaaggttcgtcgggtagaacaaaatgcagggcttggcgtagttcggataccgggcggagcttggtctctcttttcattttctctatcaacaggtcgatgtttaccacacttaatgcttccgtatctccattttccctgatttgtgtaattttcatttctatttatcttaaattttatagagttgtaagtgtttgtttataggtttcaaaggtacggataaggtacttgtaaaacaagctatttggcttttatcatgataaagaataagcttttggaggataagaagcggatatacttccactatcacacggatgtatttccatttgtgtgccgatatagttccgctaaggtatcggtgtctttagtttgtcacggccgtggtgagatctcaccacggctgtgatgagttcctaccacggctgtgggaagatctcaccacgaccgtgacaagttggcaatgtcggtgcattagtataaatgaataggctgacaatagaagttctagcttcttattgtcagcctattgtcagggcttattgtcagcaggtaagcggttgataatcattgcgctattcaagaaaaaacgtcagctgacaataaaaaccttcaaattaatatgtaaacctaaaacctaatgaaacctttctacttgtaatcataatctttaataatataatagtgcgttgtgcttgattttactgtggcaaagataagtcagaaagataaaatagaagtgcaattttgtttcatatatggtatacaaatgattcattgaatcagaatttatataaattggtcagtttgtatcattgttcacaaaagaaatcctccttcacttgcctaaagacagttgaaggaggattttatcgatgaatagggctctttttacctatttctcatcatttttacgaatttctacgcgacgaatcttaccgctgattgtcttcggaagttcatcgacaaattcaatcacacgcggatacttataaggagcggtcactttttttacatgattctgcaattccttaatcagttcttcaccggcacgggctttgtagtctttcgaaagaacaatcgtagcttttactacctgtccgcgaatctcgtccggtacaccggtgatagcacattcaatgactgccggatgcgtcatcaaagcgctttctacttcgaacggaccgatacgataaccggaacttttgataacatcgtccgcacggcctacaaaccagagataaccgtcttcatctttccaggcaacgtcaccggtgtagtaaataccgtcatgccaagcttcgcgagtacgttccgcatcacgatagtactctttgaagagtcctatgggtttacctttgctggtgcggattacgatttgtccttgttctccggcttcaacggaacgaccttcgtggtctatcaagtcaacgtcatattgaggattcggcagtcccatgcttcccggtttcggttccatccatggcatcgtggcgacggtcagtgttgtttcagtctgcccgaaaccttccattagtttgataccagtcaattttttgaaggtatcgaatacggccggattcaatgcttcgcctgcaatggtgcaatatttgagtgaggacaagtcgtatttcgtcaggtcttcatgaatcaggaagcggaaaatggtgggaggtgcgcaaagtgaagtgacatgatagtcgtgtatcttttgcaggatatctccgggagtaaatttctcgtggtcataaacgaagatattcgctccggcaatccattgtccgtagagctttccccaaacagcttttccccaaccggtatcggcgatggtaagatggaggctttcctcattcagattgtgccagaaactaccggttacgatatgtcccaacggataggtaaagtcatgtgctaccattttgggctcgccggtcgtgccggaagtaaaatacatcagtgagatgtcatcattggtattggcatggcgtggacgtacgaacggagcggcattctcaattccctgatggaaatcttcgaaaccttcgggaatctcaggaccgacgctgaccagcttctccacagtgggacagtcgggtatagcctccttgatatgttggagaatcactccttcgccggcagccacaatcattttgatatcggcggcgttgcaacggtagactatatctttctttgtcagcaggtgagtggcgggaatgacggtcgctcccagtttatgaagtgcgataatgctataccagaactcatagcgacgttttaaaatcagcattaccatatccccgcgtccgatacccagactttggaaataagaagccgtcatatccgtataacgtttcatgtcggcaaatgagaactgtcggctttcgcctttgtcgtttgtccaaagcagggctttcttgtcgggttgctcggcagcccaagcatccactacgtcataaccgaagttgaaattctccgggacgtttatttttaagttcttgatgaaatcctcttgtgaggcaaagttagtctttgctaaaaatctttctaccatgatattgttacataattacagccagaaaacgtaccgttttgccgtcgagcgctttcatgccatgtggaagtttggagttaaaataaatgctgtctccttgattaaggataatttctttcccttcgatgttgataagcatacggccttcgatcacaaggttgaattcttgtccgttgtgcttgttgtaatgaatcggctcgtcatcacctttcggctcaacggtcacgatgaagggatcggcggtgcggttcatgaatccggaagccaatgactggtatttgtaggctttcgtacgttctatactgacacctttgcctgcacgggttacgaaataactgctcatcttgggttcctcaccgaacatcagcgcatcaagggctatgttataagtgcgggctatcttttgcagcatactgacggagatgtcgtagtcgcctgtttctgcgagccggtattcttcggcggatatgtcactgtcgcgggcgatgtcctcagcggtcaattccaacacatcccgcaatccacggagacgttctgctatttgtttgatctggtcattcatgttatttagtgattagtttgttagtgattaatgatttgcagcagccattatttgctggccttcatggctttaatgatagcggaggtgaaaccgttatgttccagttcgttgattcctttgatggtgattcctcccggagtagtcactttgtcgatttccacgctgggatgagtgtcattattcagaatcaatgaggcggctcctttcagagattgtgccaccatagtcatggcgtctttcggacggatacccatttcgatacccgcttgcatggctgcctgaacgtatttcagaacgtatgcgataccgcaggaagccaacgctgtagcggctgttattttgtcttcggggataagcatgactgtgcccatctcgctgaatagccggaggatgaacttgtcttgttcgtcatttgtattgcgggcggcaacgagtgtcatactttccagttcgctgatggcggtgttagggatgaggcggaacatcggcatttccggtactaccacataatgtgccagctcttcaaaactgattcctgcagctacggatataagtatctgcttgcccttcagcttcaactcgcgcattaccggctgcataaaccaaggctttacggcgaggataacgatgtccgctcccgttgccgcttccgcgttattgtgagttgtagagatgttcggaaattctttcttcagctgttccagcttgccgacgctggggttggatacgataatgtccgaatcttctatcagacttccttttgccagaccacgggcgatagagccacccatgttgcctgcaccgataatagctattttcatacgacgcttgtttttaatgaattgttacagacaaaggtaacggttaattgcgaaaaaacaaaaagcagcccggataagaaataaaattctgaggtaggctgctttttatcgttggctgtttattaatcaatatgaacggttagagtacttttttgaaccggacgaggaattcgtcggcctcctccatactgagacagagagggggaagcaagcgaagtacattcgtgccgcttgcgccggtaaatacatgttcgtcataaatgagacggctacgcagctctttgatcggttcttcaaattcgagtccgatcatgagtccgcatccgcgcacttctttgatttgcgggaatttcttaagttcttgcagcaggtagttaccaaccttagccgcattctctacgagattctcctgttcgatgacgtccattacggcaagagccgcagaacaagcgaggtggtttccgccaaaagtcgttcccagttgtccgtatacaggtttgaacatcgggctgattaagacgcctgccatcgggaaaccatttccgattcctttggctacagtgatgatatccggcttgatgtcacaatattgatgggcgaagaatttaccgctacgtccgtatccgctctgaatctcgtcgagaatcagtatcgttcctgtttcgctgcaggctttgcggagttcctgcataaattcagtggtcggtatcttgataccgcctaccccctgaattccttcaatgataacagcacaggtatctccttttgacaattcttgcttcatcgcgtcgatgtcgttcagagggagataggtcacgtgaccgttattgttgataggtgcgataatcgacggattgttagtagcttctaccgccagagacgtacggccgtgaaacgccttgttgaaggaaacgattttggtacgtccgttatggaacgaagccaatttcagagcgttctcattggcttccgcgccactgttgataagaaacaggctgtagtcttcgtagccggagatttttcccaatcgttcggctacctgttgttgcagcttgttgatgacggagtttgaatagaaacccaagtttgctacttggttactgaccatttctacatagtgcggatgtgcgtgtccgatggagataacggcatgacctccataaaggtccagatattccgtgccgttttcatcccaaacgtgacaacccttccctttgactatgttgatattatataaaggatatacgtcgaataatttcataattctgttatttttaaaaagcactcggctttaaacgtaggcctacggtttcttccagattgaacatcaggttcatgttatgaacagcttgtccactggcgcctttcagcaagttgtcgatacaagagataatcaatagcttgtcgccatgcttttccagatgtatcagacatttattagtattgacgacttgtttcaagtcaatattcttgtctacgatgtgtacaaaggagtctttggcataatattcttcatacatacggacaatctcttcctgtgatactttggtctttactaccagagtggcaaagataccgcgtggaaagtcgccccggtacgggatgaaatcaatctctgcatcgaagctgttctgcaattgcttgagtgactgcttgatttccggtacgtgctggtgttcgaatgctttgtacacactcatattattgtttctccagctgaaatgactggtagctcccggttttacgccggctccggtacttcctgtaatggcatttaccatcacgtcgtctgtcaacatcagattcttggcaagcggaagcaagccaagctggatacaggttgcaaaacaaccgggattggctacgtgcttcgccgtacaggtggcgcggcggttcagttccggcagtccgtagatgaagtcatgatcgtcacttttgatgcggtaatccatggaaaggtcgataatcttcaagtcttccggtatgttatggctttccatgaatttctttgtgtcaccgtgggcagtacagaagaagagaacatcgatttcgtccaaaggcaattgatcggtgaatctcagatctgtctcaccgtacaatccttcatgtacgtcggtgattttgtttccggcattactgctgctgttgataaatacgatttcggtttccggatggttgagtagcagacggattaactcgcctgctgtatatcctgcgccaccaatgattcctgctttaatcatatctcttcgtctttatggttattatagtaaacacgcaacggagtagaagtcactttgataaagcctttggcgtcttcagccgtccagcctttctgcatctcaccgtattctccgaatttagtcttaacaaggtcatcttcggattctacgcctacggtagagaaagaaagcggacgaagttcgaggatggccgtaccgtttacgttgcgttggctttcctgcaacatcgcttcgatatcacgcatgaccggttccaaatactggctttcgtgcaggaacataccataccagttggctacctgatctttccaatattgttgccatttgctcaatgtatatttttcgaggaaacggtgagcgccgataatcaacatcggagcggcagcttcgaatcctacgcggcctttgataccgataatcgtgtcacctacgtgcatatcacggccgataccgtaagctgcgccaatctcttccactttctggatagccttgatcgggtcgtcaaacttctcgtcgttgacagccttcagttcgcctttctcgaaagtcagacggagctgttcgcttccttctttctgaacgtgtttcaagtaagccgattccggcagtccttgtgcggaatcaagaatctcgccgccacaaatggaagtaccccaaaggcctacgttataagagtatttcagtttggtgaagtctgcgctgaaaccatgcttgttcagatagtctatttcctcctggcggctcaatgccatatcacgggttaatgtgataatctccacgttcggtgccagcactaagaaagtcatgtcgaaacggatctggtcgttacctgctccggtagaaccgtgagcgatggcgtccgcaccgatttcattggcatagcgtgcaattgccaatgcctggaagatacgttcggaacttaccgagatagggtaagtgccgttgcgcagtacattaccgaaaaccatgtatttcagactcttctcgtagtattcctgagtgacgtccagcgttacatatttcacagctcccagtttgtaggcgttctcttcgttcgtctttagttgttctgcgctgaaaccgcctgtattggcacaagctgcatatacttcgtaacctttttctttggcgaggtacatgacggtgaacgatgtgtccagtccgccgctgaatgccaccactacttttttcttcttttcttccatagtgtgtatattttaaatgttatttctttcttgttctttttttatgttccgtgggtctgtcggatcatacagcatggctgtgcagatacagaacttacggttcttggcaaccaatatgtcgtggttgatacatccttcacatcctttccagaaagcttcgtcgtctgtcagctcgttgaaagtgacaggaacgtagcccagttccgtattcatcttcattacggccgcaccggaagtcagactgaatattttcgctttcggccatcggaggcgtgccagttggaaagaagcctgtttgatacgttttgccagtcccaaaccacggaaatccggatgaacgatcagaccggaagttgctacatattgcttgttcccccatgattcgatgtaggtaaatccggcaaatgtctctccacaaagtgcgataatcgcttttccttctttcatttttgtcgctacgtattcgtgggtacgttctgcgattcctgttccgcgtactgcggcagcctttctgatagtgtccaaaatagtgtcaacgtaaacctcgtgtgaggcgtcggctaccataacatctatttgctgagtgtccat

SEQ ID NO: 109 - DNA, 6296 bp, unidentified
  source 1..6296: mol_type = unassigned DNA
ttatttcaacaagtttccagagataaccatacgctgaacttctgatgttccttcgtaaatctctgtgatcttagcatcacgcatcatacgttccacatcatattctctgatgtaaccataaccaccatgcaactgaactgcttttgttgttacttccatagcaacttcggcagcatataatttagccattgcagcttctacggagtaagaaactcttgctccatctgcaaattcctgtttcttcaatgcagctttatatacaagagatttggcagcttctacttttgtagccatatccgcaagctggaactgtgtgttctgctgtgcagcgatggaacgtccaaactgttttctctcttttacgtaagcaacggttgtctcaagagcaccttctgcaataccaagtgcctgagcagcgataccgatacgtccaccatccagagtatgcattgcaatagggaatccttttccctgtggtccaaggatattttcctttggaatacggcagtcttcgaaaatcaattcataagtagaagatccacggatacccatcttcttctcttttgttccgaaggagaatcccggagttcctttttctacgataaatgcggagaagttctttttctttcttccacgtttgtcttctgttacacttgtgatagcgattacgatgtaaacatctgctactttaccattggtaatgaagcatttgcttccgttaagtacccactcatctccatcaagaacagctttggtctgtgctccctgagcatcggtaccggcacccggctctgtcaatgcgaaagcaccaagtttttcgccattgcaaagaggtggaaggtatttctgtttctgctcttctgtaccataagtaaggattggatcacagcaaagacttgtatgtgcagatacgataacacctgttgtaccacagacttttgaaagttcctctacgcacattacataggtcaaaatgtcgcatccctgtccaccatactgctttggcaccggaattcccataaatccatatttacccattttgtctaccgtagactgtgggaaaacttctgtttcatctgtttcctgtgccaacggctttgcttcattttcagcgaaatctttgaacaatgttctcgccatttcatgtttctgatctaaagtaaaatccattattaatgaaccgcctttctgtatatttgatggatcctatatccaccgaaattatttgctgtaatcgtagaatccgataccagtttttcttccgagctttcctgcacgaaccatcttgcgaagcaatggatgaggacggtatttaggatcacctgtctcagcctgaagtacttccatgatagcaaggcagatatcaagacctaccaaatcgccaagtgcaagaggtcccattgggtggtttgcaccaagctgcattgctgtatcaataccttcaacagaagctacaccatcagcatagatgccaactgcttcgttgatcataggaatcaaaatacggtttacaacaaatccggctgcttcttttacttctaccggtgtttttccgatctctttagagattgcaacgattttctcaaccatctcggctggtgtattctcacctgcgataacttcgatcaatttcataaccggagccggattgaagaaatgcataccgataaccggacgatccagtcctgcaccgatctctgtgatagaaagggaagatgtgtttgtagcaaacatacaatctttctttacgatatcctgaagttctttgaatgtctgtttcttaacatccattacctcaagagctgcctctacgatcagatcacagtctgtacagatttcttttgtacctgttgtgatcttagcaaggatgctgtcagcagcagcctgatccatttttccttttgcaatacgcttttcaaaaccttttgcaattttgtttttaccgtttgcagcaaattcatcattaatatcacacaagcaaacttcataaccttctgtctgagcaaatgcctgagcaattccggaacccattgttccagcaccaataacgccaactttcattgatacatacctccgtttttttattctccggaccggacagatccgatccggaaagttattatttcatgctaaattatttattctggaaaggaactactttgagttttttctctttgtccttctcaaggaagttacccattcctgctttctggtcttctgtctcaaagcagtcaccgaaaagtttctcttcgatcacgattgcctgatccatatcaacctgaagtccttcattgattgctttcttgcagttacgaacagcgatcggagcctgcatagcaatacctgcagccattttctttgctgccggcataagttcttccaaaggatataccgcatttacaagaccgacgcggtatgcttcctcagctttgatgttgcgtgctgtgtagatcatctgttttgccattcctacagggattacacgagcaagacgctgtgttccgccaaatccgggagtgataccaagacctgcttccggctgaccaaatacagcattttcagaacagatacggatgtcacagctcatggagatctcgcatccaccaccaagagcaaatccgtttactgctgcaataacagggatagggaaagtttcaagtttgcggaatacatcatttccttttttaccgaaagcttctccttctgcttttgtcaatgtgctcatctctccgatatctgcaccggctacaaaagatttctctccggcaccggtaaggatcagacaacgaatcacatcaagatctacaccatccaatgtagcatctaactcatccagcacctggctgttcaaagcgttcaatgcttttggacggttaatggtaataataccaactttgtcttctacttcatacgtaatgaattccattttgggaactctcctttctgtactgttttttcagaaattagtcacgttctacgattgtagagcatcccattcctccaccgatacaaagtgttgcaagacctttctttgcatcacgtttctgcatctcatgaagaagtgttacaaggatacggcatccggaagctcctaccggatgtccaagtgcgatcgcaccaccgtttacgttcaatttactgaggtcaaatccaagttctcttcctactgctacagactgtgctgcaaatgcttcgttagcttcgataagatcaaaatcatcaatactcatgcctgtcttagcaagaactttctttgtagatgcaaccggtccgatacccatgatcttaggatccacaccgccaagagcacctgctacgaaagtagccataggtttaacaccaagttcttttgctttttcttcgctcataacaacgatagctgctgcaccatcattgattccggaagcattaccggcagtaacaaaaccgtctttgttgattggacgaagtcttgcaagtccttccattgtcgttccaggacgtggtccctcatctttattaaagataattgtctcttttttcttcttaacttcaaccggtacgatctcatcatcaaatttaccggcttcctgagcagctacagcttttgtctgacttgcaacagcaaactcatccagttcttcacgtgtcaggttccatcttggatccttacagatgttatctgctgtctggatcatatgataatcattgaatgcatcccaaagagcatcgtttaccatcgtatcgataatggtattgttgttcatacgatatccgaaacgagcctgtttcaaagcgtatggagccatggacatgttttccataccacctgctactacgatatctgcatctcctgcctgaatcatctgtgctgccatatttacacagttcaaaccggaaccacaaacaacgtttacggttactgcaggtgtctcgattggaagtcctgcattaatagaagcctgacgtgcaacgttctgtccaagacctgcctggattacacaacccatgtaaacatgatccacctgatctgccggtactcctgctctctccaaagcttctttgatcacgatagaaccaagtactggtgcgggtgttgtactaaggcttccacccattgtaccgatggcagtacgacatgcgcctgctaatactacttttttagacataatatgtatcctccttgttttttgtcattactttaattttttatattgcagccggataaaatccggtttataaaccttatattattcagaaaacctttcctgcagtttcttttcaacaatcgccggtacaaaatgcgaaacatccgaaccatacgatgccacttcccgcacgatcgtcgagctcaaaaatgcatattccaggctggtagtaaaaaacatcgtatcgatttccggattcaggctgtgattcgtttgtgcaatctgcatttccgattcaaaatccgataccgcccgaagtcctcggaccatcactttggctccgacttccttcgcaaaatctacggttaatccctgaaatgtcgcgacacggacattattaaagtttttcgtcgcctctttgagcatctctacccgctcgtccatcgaaaacaatggatttttcccactgtttaccaaaacagcaacgattacttcatccactaccttcgaagctctctcaatgatatccagatgtccataagtgaccgggtcaaaacttccggggtaaactgcttttaccataatatgctccattctgcattcaatcgtatttgaaacctgacaaaaaataactacattgttatttttttaacaatccatcttatcaagtaacaaatacataataacaccattactccctattgtcaaataattatcaatctttttttttcaaatcttcccccttgaccccccttttcataaatgttaaaataatatcaaagtctaacggttaccatgtaacttaaataattaggaggcgtctttattatggattaccaacagatgtatcaaaacaaacttacgacagcagcttctgctgcaaatgttattcaatccggtgactgggtcgattacggctggtgtgtcaacactccggttgccgtggataaagaagtagcaaaacggctgccatctcttgaaaatgtaaatttccgcggcggaatcttaatgtgggttcctgagattttccagattgaagatcctgcagctcatatgacatggaactcctggcatatgggaggtatcgaaagaaaagccgttgcacagggattttctttctactctccgatccgttattcggaactcccacgttattaccgtgatttgagctgtccttcccgtgtagcgatcttccaggtatctccgatggacgaacatggctatttcagttttggtccgagtgcttctcatctggctgcctgctgcgaacgcgccgaagtgatcatagtcgaagtaaatgaaaatatgcctcgctgtcttggcggttttgaaaatggcattcatatttctaaggttgatatggtcgtagaaggcgataacccaccaatcggtgaaatgggcggcggcgctgctgctaccgctgtcgatcaggctgttgccaaattgatcgtagaagaaattccggatggagcctgtctccagctcggtatcggcggtatgccaaatgctgtcggtacgatgatcgccgaatctgatctgaaagatcttggtgtgcatactgaaatgtacgtcgatgcctttgtcgatattgcaaaagccggaaagattaccggagcaaagaaaaacattgaccgctatcgtcaaacctatgcatttggtgccggtaccaaaaaaatgtacgattacttaaatgacaatccggaatgtatgagtgctcctgtcgattatacaaacgacatccgctcgatttccgcattggataattttatctccatcaacaatactgtggacatagatctctacggacaggtaaatgcagaaagtgccggaatcaaaaacatcagtggtgccggtggacagcttgacttcgttcttggagcttacctttccaaaggcggaaagagtttcatctgctgctcttccacattcacaaacaaacagggggaaaaagtttcccgtatccgtccaacgttagccaatggatctatcgttaccgatacacgtgcaaacatccactactttgttacagaatatggtaaagtaaatctgaaaggactttcgacctggcagaaagcagaagctattatctctgtcgctcatccggatttccgcgatgagctgatcaaagaagcggaaagcatgcacatttggagacgctctaacaaataa

SEQ ID NO: 110 - DNA, 14059 bp, unidentified
  source 1..14059: mol_type = unassigned DNA
atgaaagaagactggaaacccggaacaatgatttatccgctgcctgccgtattggtgagctgcggaagcactccggaggaatataacattctgactatcgcatggacggggacgatttgtacgaacccgcccatgtgctacatctccgtacgccccgaacgccactcctacgacatcatcaagcggaatatggaattcgtcatcaatctcaccacgaaagacatggcccgtgccacggactggtgtggcgtacgctccggaaaggactacaacaaattcgaggaaatgcatctgacaccggggaaaagcaccgtagtcagcgcgcctcttatcgaggaatcaccgctttgcatagaatgccgggtaaaggagattatggctctcggttcgcacgacatgtttatagcggatgtggtaaatgtacgtgccgatacccgtaatctgaaccctgaaaccggcaaactggaactggcggaaacgaatcccttggtctatgtgcacggtggatattatgagctgggagaaaagataggcaaattcggatggtcagtagagaaaaagaagtaataatgcgataaaggttttaagagatggagttgcgacgaatcttgatgggcttatatctgttggccttccccgccatgatgtggggacagactccggttgtgcccggtactgccgacgaagagcattccggacaccgcaaggaaactccggtcaatttcggtttcaaaggcggtttcacctcttccttgttccttgtatcccagttcagcgtcaacggagtgcccattgacgaagtgcagaacaattacaaaataggatatttcggttcccttttcatgcggataaacttcgaccgccacttcctgcaaccggaaatatcctacaacatcaaccggtgcaacatcaccttcgagaaacctctgcccgaagacgccgcatcaggagcccggccggaggaagcctccattacatcgtccatccacagtatagacatccccgtcatctacggatacaacttcatcaaggaggggccgtacagccttgccgtctttggaggacccaaagtgcgctatatatgggacaggaaaagtgacatcgacttcgagaatttcgaccaggtgaatatccgtgaaaggctgcgtccgctcaatctcagtttcaccgtcggcgtatccgtcaccatctcacgcgtctttttcgacttccgttacgacatggggctgcacaacatctccaagagcgtgacatacgatattccggccgacaacaacgctgcagacgaaaacacgaaaaacgaaatacgttttcaccgcagggacaatgtgctgagtttttctttcggagtgttcttttgacagtaaatttcttccttttctttcaatttattcatttatttcccgtaaatttgtgcgcttaataagagaacacagatttatcaaacttatctaataagcagaatgaaaagagatgatttaattttcgaacttatcgaaaaagaacaccaacgtcagctcaaaggcattgaactgattgcatcagagaactttgtaagtgaccaggttatgcaggcaatgggctcctgcctcaccaacaagtatgctgaaggataccccggcaagcgttactatggtggttgtgaggtagtggaccagagtgagcagattgccatcgaccgcttgaaacagatcttcggcgcagaatgggccaacgtacagccgcactccggtgcacaagccaatgcagccgtattcctcgccgtgctcaatccgggcgacaaattcatgggactgaaccttgcacacggcggtcacctctcccatggttcactggtcaacacttccggtattatctatactccctgcgaatacaatctgaaccaggaaaccggacgtgtggactatgaccagatggaagaagttgccctgcgcgagaaacccaaaatgattatcggcggcggttctgcttattcccgcgaatgggactacaagcgcatgcgcgaaatcgcggacaagataggtgccatcctaatgattgacatggctcatcctgccggactgattgcagccggtgaactggataaccccgtgaaatatgcccacatcgtgacctccactacccacaagactctgcgtggtcctcgcggtggcgttatcatgatgggtaaggacttccccaacccctggggcaagaaaactccgaagggagaaatcaagatgatgtcccagttgctggattcagccgtattccccggtatccaaggtggtccgctagaacatgtcatcgcagccaaagccgttgccttcggcgaaatcctgcaaccggaatggaaagaatatgccaagcaggtgaagaaaaacgccgctgtcctggcacaagccttgatagaccgtggcttcaccatcgtttccggcggtacggacaaccactccatgctggtagacctgcgcagcaaatatcccgatttgaccggtaaggttgccgagaaggcgttggtatctgccgacatcaccgtaaacaagaacatggttccgtttgacagccgctcggctttccagacttccggtatccgtctgggtactcctgccatcacaacccgtggtgccaaggaagacctgatgctcgaaattgccgagatgattgaaaccgttctgtccaacgtagacaacgaacaagtcatcgcagaggtacgtgcacgcgtcaatgcgaagatgaaagaatacccgctgtttgcttattaataagcaaacagaattaaaaattaagaattaaaaattaaaggctgcgcagttcaaagcgaacattgcgcagcctttaatttttaattctaaacgcgctccgcgcgtttagctcagcccttctatatttccgtccacaatatcaatgtgttcggcttgtggtttcttgggtaatcccggcatacggagaatttcaccggcgatggctacaatcatttccgcaccgttattgaccacaatatccttgatgtggaactcaaagttgttgactgcaccgtatatcttcgggtcggcagagaaggagtactgcgtcttggcaatacagacggggtaatggctgatacccatctgctctatcagtttgataaccttgcgggagtggagactgtaagtcactacgcttgccccgtagaggttgcaggctaccttttctattttacgttccacgcaatcgctctcttcgtaggtgaaggtcagcggttcggatggtttgttctcgatagtatctactaccagattggcaaggtcaacggctccctctcctcctttggcaaaggcgttgttcacggcaaaacctacctcaagcttttcttcgcaatggcggcggatagcttccacctcctcgtccgtatcactggcaaaacggttgaatgccacgatgacctgctggccgaatgaacgcaaattgcgtacatgcttgtccagattgccgaagccctctttcagtccttccatattgggttccttgatgcggtccagactgacaccgccatgcatcttcagtccttgtgcggtagcaacgattatcgtcagcttgggctgtaggccgctcttgcggcacttgatgttgtagaacttctccgcacccaggtcagccccgaaaccggcttccgtcactacataatcgccgaatgtcatggccatttttgtggcaagaatggagttgcaaccatgggcaatatttgcgaacggtcctccatgaataaaagcagcagagccttcggtagtctgtaccaggttggggttgatggcatctttcaacagtacggtaatggcaccggctactcctaactccttcactgtgaaaggagtaccatcgaaacggaatcccagaataatattttcaatacggcgacggaggtcgtcgaggtccgttgccagacagagaatagccataatttcggaagccggggtaatatcgaagcccgactcctcagtaatgccgttggtgctcggtcccaatccggtgacaatgctccgcaaggaacggtcattcacatcaagtacgcgccgccagatgatttctttcagtccgaagccgtctgcctgatgctggtacaagtaattgtcgagcaaagcggaaatcatgttgtgtgcggaggtaatggcgtgaaagtcgcccgtaaagtgcaggtttatcttctccatgggaagcacctgggcatatcctccaccggcagcaccgcctttcatgccgaagcaaggacccagcgagggttcgcgtaaagccacaatcgctttcttgccaatcttgttcagccccaatgccagcccgatggacacggttgttttaccgatacccgctttcgtagccgtgatagccgtcaccagtatcagattgctcttcttcactttctcttcatcaatcagatgcgtaggaatcttggctatgtaacggccatagttctctacttcgtcacgcgggatatccacactttcagccacctgctttatcttcttcagctctatgctgcgggctatttcaatgtccgatttcatacagagtcttttctttaaataacaactttaatgttttgaaagttgcaaaagtacgaaagatgtggcaaagtacaaaagaataccgtattttcacctgaccacctgcatcttctatctatttgaaccgcgacgtatccactgcctcccgttgcttctccttatatccaccgaatttataggtgaacgatacgccgaattcgcggaagcatgagtaatgattcgtcacattctgcgtcttgaaacggatgcggggagaaatctgtcccgtctcaaaaatatcgttgtaatagaggttgagaatggctttgttcttggcgaagccgtagcgcagggcaatattcacattgcccgacgtaggcaggtcgtagatgccctgaatggctttactatgcacaaatccggtcaccgtcagcttcaagtcgggtttggtggagagagtaaaagtattgttcatctgggcaatgccatagcattgctttctatcgaaaggaatatcccagaaatcaccatccttttcgcgatgccacaagccgatgagggtaagacgagaattcaaccaattcttcaccttaaacggtatagaggcttgtatacctgcttgttgctgataatcaaaattgagtgtcttgtagatttcaaccagacgttcggaagattggtagagcgtctgtacggagtagtccttggtatggttgaaccaagcgctgaagatgtatttgctcttcaaaatataggtcattttaagctcatactcttgcgccggtttcagcaacggattaccatgcagctcagagtatccgccaccgatgtaagagacggcatcctgcaccgcccagtagtcgggatagtccttgtcgctgctcaaggagagctggaggatatgtcccggtgccggcatatagttcaagttgacaatgggataccagtcccactggtcccagacgggagtcttgtaatgctccacagccagggaagcgtccaaagcaagtttgtcgccgaaactcttgctgaaacctgcatagatattccaggtctgctcgcggcggcgggacttcatattgctcaaggcatccgatgaggtcagttgtccgccggtttcggggtcataataatattggtagctgttgtcgatgctggtagtatagatggctccgtaattcaaatcccaaccttttcccagactgtgctcctgggccagaaagaatttccagcggttgatgcgctgacagtcttccgtgtagaaatcgagttcctcatcctgcatacggctatgcagtagttggttggacggagagcggtagtaggtcagttcggcaccggctttgaggccgaaaggggtacgatagtccagacggccgttgtgcagccagtcggtgctattgccatgagttgtggacacctgtgtgcccgtcacgcccttccagttgtgggaagtggaatagccaccgttatagacgagactcagctgatggttcttggcgatattatagtccgcccctacccggaagctatgggtatggctgcggccacggcccacctcatctgttgtcatggggtgaaccgagccgtctgccagagtgtgcacagcctctttgtcggtagtagagtagccccggccatggctgtgcgagtaaagaaaatctgctgagaatttatttttgctgaagagcaggctggcgcgttcctcaaagccttcgttatgcttctggcgatacttggcatagagttcgccttgccaggagccggggccgcctaccgattgtttcaaggtgatattgataagtgcgccacgcacctggtagcgtgcaggggcgttgtacatcacttccgccttctctatgcggctggcagggatgctgcgcagcaaggaatagagctgctctgtgctgagggtggttactttgccgtccaggataacggtgactccctgacctgccaactgcagccctccattcatctcgatgacgccgggaagctctttcacggcatcgtaggcattgtctacggggaggttctggataaggcggggcaggtcgtacaccagcttgccttgcgctgccttaacgatggggcgttcaccggtaatcatcacttccggcaaggtctgataaagactgtccagacgggcatcggtcgtgataaggctgtcggcgctgaggatgcggttgtcgtccgcaccggaggtggttgcagtaccgttgttctcttgtgccgaaaggctgatgctcaaagcacagcatacaatagggagtaaatagaatcgtttcatgtccttctttttatttatgtttatattcttcttctgcaaatcttcgtctgcaaagtacggcagaatcagcagaaacttgtgttatcagcggcttaccaagtgttatccagtgttatcgggagtgttatttagtcttatcggatgatagggttcacaatattaatcttacctttgtatgcataaaagtaaccggaaacaaacatgaaactgccattcaaatatattgccatacttgtcatcgtctccctggccggtatcttcgcctaccaagcctactggctgacggggctctaccataccatgcacagtgaaatggaaagggacatcaccgaagccatgcgcatgagcgactataacgaaatgatgatacgcgtggataaaatgaagcaggacgacataaaccacggtgaagtcagcgtatcagccggatacagcgatgacggaaaatcatttgtccgtagcagtaccaccatctcccgtgaagattctttggacaacaccaccctgcacgaaaccttcatgcccaaaggagacagtgtttacgtgacccacccgaacgattcaacccgcgtggaagtcagtgtcagggactcagacagctctccccaatccgcattgagtgccaaagggggactggatgtgattttgcgcgaccaaaacagtatgctggaactcgccacctacttccagcgcggactgcattcgggactggacatcatttccgaccccgacgtagtgctttatgacagcctgctgacttcattcctgcatgaccgtaacatcaatcttccccataggctgctacatcttcacaaaggcagtaaatgggactctaccattctctatatagatacattggtaaacatcggtactcccggctatgtgcctacctcaaaagctgtggaatataattattctttcgacatcaatacaagtcaaagctaccgtctcatcatggaaccggtcggcatgctggttctgcggcagatgtcgggcattctcaccacgtcattcatcatcttgattgtactcgctttctccttctggttcttgatacgcaccatcttgaaacagaagacactggaagagatgaagagcgatttcaccaacaacatcacccacgaactgaaaacccccatcgccgtagcatatgccgccaacgacgctctgctcaacttcaaccaagcggaggaaaaggcccagcgcgacaaatacctgcgtatctgccaggaacagcttcagcgcctcagtggactggttgaacagatactttccatgagtatggaacgccgcaggactttccgcctgcacccggaggagtttgcaatacgtgatattctggaaacgctcatcgaacaacacaagctgaaagcggaaagctccgtccacatatcggtggacatcgaaccggaagatttgagcgtacttgccgaccgtacgcatttcagcaacatcatcagcaacctgatagacaacgccatcaaatattcgcacggagaggccgaagtggccatccattgccgcaaggtaaccgtcgaagggcagaatgaacagaccgaaatctccgtcagcgaccacggtatcggtattgctcccgagaagcagaagcacatcttcgacaaattctaccgcgtacccacgggtaatctgcacgatgtgaaaggctatgggctgggattgttctatgtgaagaccatgatagagaagcatggtggcagcgtatcggtaaagagtgagttgggaaaaggaagtacctttacgataaggatatgataacattatttgttagggtactttacattacttgttaaggagctttacattacttgtaacaaaagcgacaattatggaaaagataaccgtacttctggttgaggacgaacagaccctcgccatgattatcaaggacacattggaagggcagaacttcatcatccacaccgcagcagacggtgaagagggattgcgcaagttcttcgacctccgtcccgacgtgctggtggcagacgtgatgatgccccgcatggacggctttgaaatggtgcaccgcatccggcagaccgacaaacagaccccggtactgttccttaccgcccgctccaccatcaacgatgtggtggaagggtttgagctgggtgccaacgactacctgaaaaagcctttcggaatgcaggaactcattatccgcataaaggccctggtaggcaaagctttctcctttacagaggaaaagcccaaagaaactaccgtttttgaaatcggtgactaccgtttcaattccgtcactcaacgacttgcttttgcaggcagcaccccgacttcacctaacgcggatacggaagtggaactctcccaccgcgagtccgagatactgaaacgtctttgcgagaaccgtaaccaggtggtcaacacccagaatgtattgctcgacctctggggagacgacagcttcttcaactcccgcagcctgcatgtgttcatcaccaaactgcggcataaactggccggagacgagcgcatccgtatcgtcaatgtgcggggaataggatataaactaatagtgaactaaactaaaactaaactactatttatgagaaagttattattcattacttttatctgttcctcactctgcgcctatgcacagagcgagattccggaagacacaataaagaaccggcctcccgtaaagaaagagcagattcccttttctccaaaagagaacaagcgtacgggccttgatgaaagccagccccaacaaagcctgcagggcgaacagcaggaagagataaatctccatctccctccctccgactatgtggagcccctgccctggacggacatgaaaaagatacacttccagaagaacatctttgaatgggacttccagcgcttcgccgatttcctgctctcgccggaagtcgtactgacgatgtacggcagccataacacctatcctgcaatgggctccatcatgcaggctggcgcaggagtcacttattacagtcccgacggacattgggaattgagcggaggggtatatgccgcccactattccatttctaccccctcctccattgccggcgcccgatatgccaaaagggatgcccctcggggtacccaatgggacgtaggttacaatgcctccgtatcctaccgcatcaatccctacatgcgcctgcatgccttcggccagtattcgggctacgggagaagcaactcctttcatggatatatgaacccgatgtatccgcaaagcggttatggcatggtactggaactgaaagtgacggactggctcgacctcaacggaggcctggaacggagctacgaccccaccaaaatgaaatgggtgacttcgcccgtcttcgcccctaccattcgtataaagaaatagaaataatacaaagatatttccggaaatagagggaaacgagtatctttgttcagtctgcccctatgcggcagacagcaactgaaattgtgaacaaagaactatgaaacgaatcttcttctgcatcatcattttacttgcaggcatgtcatccgtcagcgcacagagcgagatgcctgccgatacggtacgtactgcagtacatggcgaagcgtctcccgaaggcatgtctccgtctgaaaaggagcttctgccggacgtgaagaattacgacggcttcctgctggatatggggctgatgaatctgtctgcccccactcttcccaaattcaccttggagataccggatgccagcaaggactatagccgcatcttccagttgaacccgaacgtgacttattcacaaggcctttcgaacatattctcactcagcaactcccggtatttcagttcaaaccccttcggactgacgggcttctggggctctaccgacaacctgcaaatgggaagtttcactttgaagaacggcatgcgcatccatacgtacggcgaatatgacaaggacggctggaaagtgcccaacccttccgcactgccttgggaaaagaacaatttcaaaggggcgttcgagctgaaatcagccaacggagcctttggcatacgcatcgaggtacagcagggcagacacgtgccctattgatgcccatcacttaacaacagaatcaatgacaagaaagaaaatactggtgataggcgccaacggttttaccggcagacgcatcctggatgatttgtcccgcaacgtgtcttatcaggcaacgggctgttccctgcacgacgacatctgtcctcattcgggcgactatcgctttatccgtacggatatatgcgaccgccaggcggtggaaaagcttttccatgaagtacagccggatgttgtaatcaatacctccgccctctccgtccccgattattgcgaaacgcaccatgcagaagcggatgccgtcaacatcactgccgtagagcatctggcagaatgctgtgaggcgggaggcagccgttttatccatctttccaccgacttcgttttcggtggtgatacggaccgaccctatacggaggagaatattcccgctcccgttaattattacggctacaccaaactggaaggtgagaaacgtatcgccgccgtttgcagggattatgccatcgtgcgtgtagtggtagtgtacggtgccgccctgcccggacagcatggcaatgtgctccaactggtggcaaacagattaaggagcaatgaggaagtgttcgtcgtatccgaccaatggcgtacgcccaccttcgtgggagacgtgtcgcaaggagtggagaagctgataagtcatccgcaaaacggtatctatcatctctgtggcagcgagtgcctgaccattgcagacatcgcttatcgggtagcggacgtattggggctgaatcgctcgctcatccgtcccgtcactacgaaggagatgaatgaaaagacgccacgtccccgtttcagcgggctgagtatagaaaaggcaagccgggaactggggtatcagccgcacacgctggaagaaggaataaagcagatgttcggatggtaaataatgcaggtgcggatggcagcagattcgactacagcaactccggctctgccagtcctttctctttgcgatacacacgtaccatctccagaatcacatctccatatttctccacccctttttttccgaaatacggaatgcgtacaagcatggccttatccgaaggaagcagattgctgatgcctagaattgccttctgctgaatgacggtgtatacgggcagccctaatgcggaagcttctgcattgcgccatgctaccaagcggttgtaaagttccggatgcagcacatccgtgggtacttcaacagccgcagcatcgcgtttccgctcacgcggacgtttctctttatcagcctgcttactgcttccctgcccttctttggcagaagcacttctccctttgcctttacccttctgcgaagccgaatcatcaatggaaagcagtgctttctgcttcaagtatcctgccatatggaaaccattctccagcacataatccagcaaatcagtcttcatgtcaaacacttcctccagctcctccatggcatcccggagcttcttcttcaactctttattatcagaagttaccgtactcgccatcaccgcatccagcggttgcaactgctcttgaaaataagtggcggcagagtgtatgcgcccctgcaaagtcgggtcggctgcatagtcctgcgcagtatcaatcaggcgggtatactggatactgaacttctgggctactttcgtcactttgtcgtgaaaacgttccatttcctccttacaggctgcgagttgcttgggaaagagcttgtacaagtgttcgtctatcagccgcacataccgccgcaaagcctgctccatgggctggaaatcgaacaagcccgacagcagttccaggaaataggtctgctgcaaggaacggaagcgtttctcgtccggctcgtttctccgtgcctccatcgtgaaggtatctactgcatggtcactgataacggcctttgcagaaagcggggcactgagcaccactccctccaatgtcttgcagcggctcagagccacataggtctgcccatgcgcaaaggaggcactggcatcaatcacggcacgttcaaacgtcagtccctggcttttgtgaatggtaatcgcccacgccagcttcagcggatattgccggaatgttccttcaatatcttctgtaatctccttggtttcctcatcaagcacgtatttggcattcgtccactcttcctcttgaagtaagaaggtagcgtcgcttcccttactgcgcacttcaattccatctgccgacacggctgtcacctctccaatcatgccattgtagtaacggtgctcaccggaggtgtcgttcttcacaaacattacctgggcaccgcgtttcagttccagtacttcatccgtgggataggaatattcgggaaactttccgtcaatcttggcacgaaaggcatacgagcgtcccggaagttgttccagctcatggtcattaatccgttgggcctgataattgtgggtcaccaggcggatgtatccttcttctttatctggtacgaaattgggaatataccggcggttcaaggcttccagcacttgcccgtcacaacggttttcgcgaatgcggttcagtagttcaagaaaagtcccatcgttctgccgatagactttctttagttctatggtgcaatattccgtctgcttcaaggcctggctggagaagaaataaggcgtgtcatagtatttgcacagcatctgccactcatcgtctttcactacgggagacagctgctgtaagtcgccaatcatcagcagttgcacgccgccaaagggtttgttccggtcgcggaaccgcctcaagacggcatccaccgaatcgagcaagtcggcacggaccatactgatttcatcgaggaccaataaatctatgctgcgtataatgttgattttctctttcccgtaacgaaaacggtaggttgccttgccatctgcgctgaatgagctttcgggcacataaggagcgaaaggtacttggaaaaaggagtggatggtgacaccgcctgcattgatagcggcaattcccgtcggtgcaagtacaatcatccgtttcggactctctgccctcagttttcgcaggaaagttgtcttaccggtacctgccttgccggtcaaaaaaagatgagtgcctgtgttttcaatgaattgccatgcaagcgctatttcgggattattctccat

SEQ ID NO: 111 - DNA, 11486 bp, unidentified
  source 1..11486: mol_type = unassigned DNA
tcagccattgtaaacctccaaaattctctgttcaaatttttctctgcctactctgtcgattgtaaacttaaatcgttcgctcggctttgcgttttctgcaaagaagttaagagcggcatcacagatttccataagtttttctttattttcgataaacggaataattgtttcgcccttgttgattgagttgccgaaaagtccgccgaatgaaacaatgtaaccgtgaattgtgtcccacgcatctgtcgggcaagccttgaagcatctgccgcagtagttacactttgaattgtcaacggaaattttcccgtcctcaagattgattgcaccctgacggcaggcctttacacagactccgcagccgatacaagcgtcctctttccatgaaaccttgattccgcccttgataccgacatcgttttcctcagctttaaggcagttgttctgacagcctgttatgccgaacttgaacttgtgcggaagttcctttgcaaaatatctgtcgtcaagctcctttgcaagagcgtatgtatcaatacaaccgccggggcagattgcctcaccctgacaggctgtaattgttcttactctcggaccgcaaacgcccggctcaacatcgccctcggcaagcgcgtccttaactgcctcaacatcatcaagctttacaaaaggaatttcaacactttgtcttgatgtgaggtgaacataaccgtcaccgtagttttccgaaacctcggcaattttcgcaagctgtttagctgtgaggttgccgcctacaactctgagcctgagtgaaaaattatttttctgtttttgacgcataaagccgccctttttaagcgtagcataatcaactgccatttctcttactcctccgattcattcacatttatactgtctacagcctgtttgaagtcagactttaaatcctcaatatcttcaatgccgacgctgattcttattgtatcatcaaacacgcctgcgtttcttttttgttcttctgttccgtgagcgtaaattgtgcttgacggatgaattacaagtgttcttgtgtcgcctatatttgttgcatttgttgcatacttcaaattgttgataagcttaaacgctctttctttacttcctgccctgattgtgaggattgcaccgccttttcccttcaacagcttttgacaaagactgtaatatggagaagcttcaagagccggatagttgacttcgattccgttttgtgtttcaaagaactttgcaagctcaatagcgttgtaacaaagacgctccatacgaagtccgagcgtttcaagtccgacagagttcataaaagcattaaacggtgcaaggcaacagcctatgtttcgccagataccgtttctcagctttgcaacatatgcaagccgaccgaattttttgtactctgcaagacctttgtatctttccgtattccattcaaaattgccgctgtcaacgattattccgctgattgaatttccgccgccgttaatgtactttgacgaggaatgaacaacgatgtccgcaccgtgttcaaacggctgaataagatacggagttgccgttgtgctgtcgataatgagcggaacaccgtgtgaatgaacaagctctgatacagcgtcaagatcggcaatttcaagtccgggattgccgataagctcggcaaagactgcttttgttttttcgtttatgagcggttcaatctcctcggctgtcaccttgttgacatatcgtgtaacaattccgaaaggctcaagatctccaaacaaatcaattgttccgccaaaaagacctgcgcttgctattacctcgtcacctgattcaagaatgttcaggagtgccatcgtaacggctgccatacctgacgaacacgcaaccgcaccgacaccgttttcaatggaagcaattctgttctcaaaagatgttaccgtgggattgcctattcgagagtaggcgtagccgggagctctgttgttgaacaccttttcaagctgttcggcagagctgtgcgaaaatgcactgacctgataaatgggagtcaaggttgagccaaaaaccttttcaccgttaaaccccttgtgaagtaatgcggtgttaaactccataatatcaccaaccccttaatttcatacaaccaacccttttgtgtaagaccgtcgtaagaatttgtctgacggcttcgattgatataggtagattatactccattaatcatagtatttcaataggtttaataagattttacctcttgcacaatttttctttaaaatttgccgtaattccattatttcctacaatgcatatttgtttagtaggtattgatttttaaattaaaaactgttaccattattatatactctttcagcaaacaaaacgcacggaaaggagatgctaaaattgaagatttcaacaaaggtggaattcggaattatcgctgttattgacattgcgtcacactcactaaacggcaatgcggtaacaactcccgaaattgccaaacggcaaaatatatctaaaaagtatcttgaacagattctctcatcactcagctcggcaggacttgtgcgaggtcaaaagggttcaaacggcggttatgttattgcaaaaaaccttaaagggattacattcaaggatatcataaacgcacttgacgcaaatgttctgagcaatgtttattttaacactcggggcgatgatgatattatgataagacttatcgacaacagtctttggtcgaagatgtcgtcatatcttcaggaatatgccgaaagcattacactagcacagctttgcgatgagtatatcaaaaacaatgaaattgaacacaacattccgatgtactacatctgatagattacaaacaaaaagccaccgatttttatgtcggtggcttttcttgtttttatcggattttatttaaagctttcaataacctgacaggttttttcaatgtcatcttccgtgtgcgcaaatgaaacaaacatcgcctcaaactgtgacggtgcggcatagattccgttttcaagcagatgattgtaatactcggcatatctctttgtgtcggctgtggttgctgtgtcatagtcaacaacctttttgtcggtaaaaaatgccgtcataatcgaacccacacggttcacattaagtcctgcgttcttcattgcattttcaatctttgcagacttgcgttcaagctcgggatatatcgaatctttatttttttcaagaattttaagcgttgcaatgcctgcacttaccgctaccggatttcccgaaagtgtgcctgcctgataaacagaaccgagaggagcaacacactccataatctcttttcgtcctccgtaaaccgcaagcggcattccgccgccgacaatttttccgagggttgtaaggtcgggttttactccgtaaagcttttgagcaccgccgagtgaaagtctgaagcctgtgattacttcatcaaaaataagaagtgagccgtgcttttccgtgatttcacgcaagaattttaaaaatccttttttgggcggaacaacacccatatttgcggcacaaggctcaacgattacacaggcaatttcatcaccgcagttatcaaaaagctgttgcacggattcttcatcattatactttgcaaggagagttgtgtctgtgtagcctttcggcacacctgcgctgttcggaattgagtttgtcagaagtcccgaaccgccttttacaagcaagccgtcggaatggccgtggtaacagccctcgaattttacgattttatccctttttgtaaagcctcttgcggcacggattgcgctcataaccgcctctgtgcctgaatttacaagtctgagcatttcaattgatggcatatttttgcggataagctcggcaagttcaatttctccgctgtggcacgcaccgaatgtaagtccgttctgacaggcagaagtcacggccttgataacatcaggctgtttgtgaccgaggatattcggtccccatgagcagatatagtcaatgaactcgtttccgtcaacatcataaatttttggaccctctgcacggtcgataaaaagcggagttcttccgaccgaacggcacgcacggacaggactgttcacaccgccgggcataaagtcaagcgcctgtgcgtatagcttttcgctttgagttgtattcataaaagcacttccctatttgtaaaattcgtcaatccattttgcaacatcaagtgcgtggtatgtgattatgatatccgcacccgccctcttgattgcaatcatattttcgaacacaattttcttttcgtcaatccagcctttttcggcagccgccttgaccattgcatattcaccgcttacattataggcaacaagcggaaggtcaaagcgttcgcttgcggcttttacgatatcgagatatgcaagtgcaggcttgaccataaccatatccgcaccctcgtcaatatcgtctgcaatttcacgcagagcctctttgccgtttgcgtaatccatctgatagctttttctgtcgccaaattcgggggcagattctgcggcgtcacggaacggtgaatagtagcctgaggcaaattttgcactgtatgacataatcggagtgttgataagtccgttttcgtcaagtgcgtttctgattgcagacactctgccgtccatcatatccgaaggagcgatgatatccgcacctgcttttgcaaggctgacagccattttagagaggagcggaagtgtttcgtcattgagaatttcgtgaccgcaaacaacaccgcaatgaccgtgacttgtgtattcacaaagacagacatcggcaataataaggagtgacggataatttttctttatgtatctgattgcgttctgagttacaccattatcgtcataggctgatgttgcaagctcgtctttatgctttggaattccgaaaataagaagtcctgcaataccgctgttttcaatttctttaagaatctcgtctgctctgtcaagcgaatactggtagacattcggcattgaatcaacaggctttttaatattttcaccctctgcaatgaaaatcgggtaaatcaaatcgcccttgtcaattcttgtttcacgaacaagactgcgaatctgttcgcctgctcttaatcttctgaatcttctcatatatttatccttctttcaaagttacttccttgattatagtttccaaaattccgtctgtgtccttcgtttttgcaatcttgaacgaatttacgccgtgactttcaagtgcctcggcggtaatttcacctatgcatacaacggaagttctgtcggaaatagttgctccgccgtcaaaaaatgtgttcacacccgacgcactcgcaaaagtaataaaatcggtatcaacaacggaattatcctgctttttctcaagctgaatgtcataggttttcacatcgtcaaagtcaatgttgttatcagccaaaatccgagtgagttcgggcgaaccgttttcggcacgcagaatcaatactttttcgccgcttttcaccgtttttgcaagcaaaattccaagttcacgggttgtgtagacattcggaatacagtcggcaaaaattccgtacttttcaagtacagccgctgttcccgaaccaatcaccgcaaacttaatattagcgaaactgcggatatcctttttcagcttacgcagtcggctcataaaaatttctgcaccgttcatacttgtaagcaccacataatcgtagccgtcaatgccgtttattgcattgtcaaaaacttcgttgtcatgatattcaatcacctttaaaaggtcatgccttttgacctccgcacccgaaagcgtgagtattttgccgagcttgtcggaaagctttctcgtacccgtaacggtaacggaaacatttttcaaaggtcttgtaattgtgggggcaaagtcaaaatttgcagtttcgccaaccactataacggcaggcggaacaacctctgcggatttaacattttcgcagattgtcgagagagttcccctcacggtctgattttttgcacaagcgccgtttgacacaactgcaacgggagtatcctccgatttaccgttacgaatgagattttccacaatatctgggagatttctcaagcccataagaaagacaagcgttccgtcggtttcggcacatttctttatattttcgggcagggtgtcctgtgccgtatgtcccgtgattatatgaacacttcggctgagatttctgtgtgtaacagggattcccgcaagttcgggaacggcaatcgaggaagaaattccgggtacaatgtcaaacggaatatcggcacttttgagggtttcaatctcctctccgcctctgccgaacacgaacggatcgccgcctttaagacggacaaccgttttgccctctctcgccttttcaacaaggatttcgttaatattctcctgcttttcgctgtgtctgcccgaacgctttccaacgcagattttttcagccgtttcgggtgcaaaaccgagcaatgacacatctataaggctgtcgtaaacaagcacatcgcaatgtctgatatactctgcaccacgcattgttatcaggtcaaaatcgccgcatcccgcaccgacaatatacactcttccgttactcaatttcgctcaccagcctttttgcaagtttgattctgtttgaaatttcatctgttccgctgactgtttttttacagtcggcagacagagaaagcgttatcctgtcgttttcaacctttgaaattgcaccgacgggagttgaacaatcggcattgaggctgtgcagaacctgtctttcggtttcaaacgaaagcattgtatttttgtcgctgatttcagcgagcattttggaaacctcgctgttttttctgctttcaatcgcaactattccctgacacggtgcagggagaaattcatcggcatcaaacggagttaccgtgtaatcctcaccgttgcaaaggtcaagtctttcaagtcctgcctttgcaagcacaagagcatcgtactcaccgttcaacagctttttaagtcgggtgtcaacattgccccttatatccttgaattttgcattaggatagattttctccgcaaaaagctttcgccttaaactgcctgttccgattataaagccgtccttaatttcaaaattgttgcgtgtaacaaaaacatcgccatagctgccccttggcaacacggcggaaatctcaagtccgtctgcaatttttgtcggcaagtcctttgcgctgtgaacggcaacatctgtttctccgctcaaaagtgacatttcaagctccttgatgaacacaccttttccgcccaaagctgtaagcggtttgtcaagggttttgtcgcctgttgtcgaaatgtaaaccgtttcaattttaacattcggaaaacggtttttcagcgtttttattaacatttcggtttgtgcaagggcaagcctgctttttcgtgttccgatttttatcgtcattgttcgtattcctcaatcaaattttcaacagttttttcatcgggttcaagtcccgaaaggcaaagcgaaagaagctgttcaaaaatctttcttctgtcatcttccctttcaactttctccttaattatcgggcgatatttccacaaaacctcggttgtgttttcgttcatactttcaagaattcccacaaaaagctctttaagatattttgcgtaaatcggacttttgcccgatgttgtaattcctgccgttatgccgtttttgcttgcaattgcaggaaaaataaatccgcatttttccttatcgtcaactgtgttgacaagaatatttttctcattgcaaagctgaaaaattctgccgttgagcgtttcatcatcggttgcgctgataacgcaaaatgcaccttcaaggtcgctgtcacaaaatctgcggtcaatgattttcacattcaaagccttgatttcatcgcagattttcggggcaacaacggttatgtcgggcgaaaacggcgtcagcttttcaatctttctgagtgcaaccgtaccgccgccgactacgagtatttttttgttttcaatgtcaatataaaacgggaagtatgccattagttattctctccgcactttctgtagatttcaagaattcttgcaaattcttctgccgaaacgtcggatttcagcttataaatgaatttttccgaaaaatctgacggcattgcgtttttcacagactgcataaacggcagaaattcgtgaaaggcaaggtcttttttgagaacttcaatttcctcaaaaattatttcttttgcactttcaacgctgtcgagtttgagagcattgttctcgtttgcaagctgttttatgcagtcaatgttaatgagccttactccgcttattttggggatattttcgtcaatgtcgggcggtacggcaaggtcaataaacagccttgatttttcggtttttatattgttttttaaatcataatatgtaaccgtgtaatgcggtccgcttgtggcactgattacgcagtctgcaaaatcaaacgctttgtatctttcgtcataatcaatcacattcgcacccgtattttcaaaaacagtttctgctttatgttttcgtgaagtcacggtaacgcttatacctttgtgcgacaagagatttttcacaacagttgagccgaccttgcctgttgcaccgattacaaggacattcagctcaccgtctttgaattttgccgcctcgtttgatgcaagagttgcaacggaaaccgatgtttttgaaatggcggtttcggtcttgattttttttgcacaggcaacagccgcctgaacgcacatattaagctcatatgcaaccgtgccgttgtcctttgcaaaggcgtaggctcgctttagctgaccgagtatttcatcttcaccgataaccattgattcaattccgcccgccaccctgaaaagatggagcaatgccctgtcaccgtagaaaagacagatgtacttttttagttcgtcaaaatcaattcccgaaaaatccgaaagaacggtttcaaccgttttcacagatgattcgtcaccgcaaaaataaacctcggttctgttgcaggtgcagagaatcaaacactcgctgatattttcagaataataaagttcgtcaagaaatgtctttttttgctcatcgggaaaggcaagcttctttctcacaaccacatttgaagttttgtgacttacgctcaggcagtacataaaaatttcgctccgttacaaataaaatccgacagtaaaatacacttttaaagttattttattactgccgacagctattgtcaattaaagttagtcagttattttaccactaaacctatctgtttggtatgttttaattatactacattcaccattctatgtcaataaatttcgggttttgcttgacaaaaacagtgattacaatataaactatacaaagatacctcccgtcagcaaacaacgggagttttattccaatgtaaatacttattgtaccgataggaatactaaatgatttgaatatgtattaaggagcgtttttatgcttaatcagttttcaagaacacagcttttgattggcaaagaagctatggacaggctttcaaaaacaagagttgcaattttcggaatcggcggtgtaggcggatacacggcggaggctcttgcaaggagcggagtcggcgagcttgaccttattgacgatgacaaggtgtgccttacaaacatcaatcgccagatttttgcaacaagaaaaacagtaggcaaatacaaggttgatgttgcagaggaaaggctcaaggacatcaatcccgacataatcatcaacaaacaccaaaccttttacactcccgaaacctcggaaaaattcgacttttcaaaatacgactatgtagttgacgcaattgacacggtaacaggcaaaattgagcttgttatgcaagccgacaaagccaagacgcctatcatctgttcaatgggagcaggcaacaagcttgatcctacagcgtttgaggttgccgacatttacaaaacctcggtctgtcctcttgcaagggttatgagacacgaactcaaaaagagaggtatcaaaaagctgaaggttgtttattcaaaagaaaagcctatcacacccgttgacgatatggcaataagctgtaaaacaaattgcatatgccctcccgaaactgaaagaaaatgcacccaacgcagacaggttcccggcagtaccgcatttgtcccgtcggttgcaggtcttatcatagccggcgaagttatcaaggatttgattaagtaaatataatttttaacaaagcaaagcaccgagagaaattaccctcggtgctttgcttgtttttataggattttttacagttgatatcgtgattaaacagattagatgataaccgattcttcctgaagtgatttgttacggagaatctgaacctcatcgcctttggtaatgaaaagccgataaagaaatacattgaccttttctccgacggtaatcggagtttcgtcaagtcctctgtacgcataaaccgtgcctccgtcacattttacggcaatttcgatattgtcgcctctgaacgaagtctttataacctcaccgacggatacagacgctttttgtgcggttgtttcgctgagctttgtcacctttacaaattcgggacggataactgcacggtcaacattatcgacaacatcaaaggtcttgaactttgtataatcgtcaagcgtagtagtctgaccgaaaaatgatgcggaaaatgcggtttgaggatgctgataaatgtcaatcggcgagcctatctgctcaattctgcccttgtttgtaattataatttcatcggcaacttcaatagcctcgctctgatcgtgagttacaaatatacttgtaacgccgagtctttcaatcatatctttaagccatgagcgaagctcctgcctaacctttgcgtcaattgcggcaaagggttcgtcaagcagaagaagattcgggtttggcgcaagcgctcttgcaaaggcaacacgctgtttttgaccgcccgaaagctggcttggataacgcttttcaagtccttcaagaccgataagctttacaagctcgtttactctttccttgataaatttcttgctctttttctgaattttcagaccgaaagcaatgttatcaaaaactgtcatatatctgaaaagagcgtagttttggaatacaaagcctatgcctcttttgcttgcgggaatatcgttgacaacctttccgtcaattacaatttcgccgctgtcgggattttcaagtcctgcaatcatacgaagaattgttgttttgccgctgcccgaaggaccgagaagtccgataagcctgcccttttcaataccaaagtttacattgtcggatgccttgtagtcaccgaaagttttatttatatttttaagctcaacatacat

SEQ ID NO: 112 - DNA, 15883 bp, unidentified
  source 1..15883: mol_type = unassigned DNA
gtgtttatgatgcagtcagaacgtttcagtgaagaagtcaaaagtttattggaagccagtcagcagcaagctgtcatgaactataaccaagaggtgggaaccgtccatctcctgtcagccatgatgagcgaacctgatagtttcctccattatgtcttaaagagccttcatatcgaggaaaacgacttcagtcgtgaccttgaccatttggtgaaggccgtcccgtctgtgaagggaacggaccagcttagtatgtccacggggatggcaagggtctttgccctcgcggaaaaagcagccggccaaaataagattaccggagcccatctgctggctgccctctgtgaagatggcgatagcgatgtggtttccctctgccgcaagtacggcattacccgttcggccatccgtggtctcgtcgaccgctatgaaggcggcaaggacagtgacgaaaaccgcaagaccttggaaaaatatgggcaggatctgacggctaaggcccgcaagggagcccttgatccggtcattggtcgtgacgatgagatccgccgtaccgttgagatcctgtctcgtcggaaaaagaacaaccctgtcctcattggggaaccgggtgttggcaagacggctattgtagaaggccttgcccgccggatcgtggcaggcgacgtgcctgaatccttaaagaacaagaccctctatgccctggatcttgcgtcccttgttgctggggccaagtaccgcggtgaatttgaagaacgcttgaagaaagtcctcaagattgttgccgattcggctggacagatcatcatgttcatcgatgaactccataccgtcgttggagccggtgcctccgaagggtccatggatgccggaaatatcctgaaaccgatgctggcccgcggtgaactccgctgtattggggccacgacccttaatgagtatcgaaagtatattgaaaaagacagtgccttggaacgccggttccagcctgtccttgtcaaggaaccaagtgtcgaggatacggtttccatcctgcgtggcttgaaggaacggtacgaagtccatcatggggtccgcatcaaggattctgcccttgtagctgcggctgcgctttcaaaccgctatatcagtgaacgcttcctgccggataaggctatcgacctcgtcgatgaagcggcagcccgtctgcgtacggaaattgattccatgccgacggaactggatgaaagccgccgccgtatgcttcagctccagattgaggaacaggccctttccaaagaagaagataagcagtcggctgaccgtctcgaaaagatccgtgaggaactgaaagagatgaaagcaaagaacgataagatgacagctcgctggcaggaagaaaaggctggcattgccaaggttcgccaggtcaaaaaagccattgaccaggtgaagaaggacatggaaacggccgagcacgactatgatctcaacaagcttgccgaactcaagtatggccgtctgccggaactgcagaaacagctccaggaactggaaaaagaagagcatgcagaagaccgtcttctcaaggaagaagtcgacgaagacgatatcgccaaagtcgtcagcacctggacggggatccctgtgagccgccttatggaaggcgaaaagaagaaactggctcacctggatgaaatcctccatcagcgggtcatcggtcaggatgaagctgtgaaggctgtctccgaagccgttatccgcgctcgtgctggtatcaaggatcccaataagcccattggttcctttatcttcctgggcccaacgggcgtcggcaagacggaacttgccaagagccttgccgaagtgctcttcaacgatgaaaagagcatcatccgcatcgatatgagtgaatatatggaaaagcataccgtaagccgcttgattggtgcgcctccgggatatgtaggctatgaagaagggggtcagctcacggaagccgtgcgccgtcatccttattcggttatcctttttgatgaaatcgaaaaagctcatgccgacgtcttcaacgtgctcctccaggtccttgatgatggccgcctgactgatggccagggccgtgtcatcgacttcaagaataccctcatcatcatgacgagcaaccttggatcccatgaaatcatggaacataaaggtgaaatcagccatgaagaagtgcgcagtatgctgatgaagttcttccgtccggaattcctgaaccgtgtggatgacattgttgtcttcaaaccgctcggcgaggatcagatccgcagcattgtccgcctcattctgggtcagctgggcaaacgcctgcaaagtcagatggaactcacccttgaggccactgatgaagctgtcgatgcccttgccaaggaaggcttcgatcctgcctttggcgctcgtccgttaaagcgcctcatcgttcatagtgtggaaaccatcgtcagccagaagattgtccaaggagacattgtaagcggcgatcatctgaaagtcgtcttgaaaaacggtaaaattgacgtggtaaaggcgtaagccttgactgctgggaaggaccccttcttcccagcatttttacgtttattgggattttttgggaaaaacctttgtgaactcgtcgtaaatgagttcacagagtaggggttccgttgtataataagaaggaatttgatgaatcgccaaggaggatttccatgaaaaaattactcacccttgtcacgcttcttatgacgctccttgccgttccttttacggcaagtgctgagcgcagcggcgccaaagcaagcggcgttcctttcaataagaccaaggttgtctatctaaaaagtctcgaaaagactgatggggaatttgttaagaataacccccaattcagacgcgatgaggatgcggtccgcctcacctatcttgggctccagaaatccttgaaggatgaaggggtgacgctttataacaatccagtcatgctgcccgaccgttacctgagaaagaccctgaccatgcaggtcgttgtcaattttgcagggactgtgcccctcgaaggagaagcggctcaggaagccatcaaggacaaacgggaaccggtggaatcccttgtctccctttccttccttgtcaccaaaggagaggcaccggtctaccgtatgaccgacgtgcgtacgagtaaggaaaagaacttggaaaaactcatccgggatatgacaaaagatgtagcaaatgaaatcacgaataatcgtatgaaactaaaagatgtaaaataagaacgccgagaggctgtgagaaatgagtacatcatttctcacagcctctttttgtatggcttgggagtgggggattatgatgttcaggtggtgtgatgctgtgatgcagggccgcactgctgttctgccactaaaatcggtgcagccgaatcttttgtctttggaatttgaatccatcaaaagactgtacagccgaccctaaaccgttccttctttaaagggggagggaccgaatccattcgcccggaaacatggccctgcgcccttgtgctttgccccaatgcgggcttgggactcgggcatatttgccttgctagctgcttgcaaggaaacgtcgctgcggtttctcatccaccaccgaaatcgggaaatccgaattggataaccgtatggatatttcccacacaacatgagtgctaataaattatattatcggccccgtcgtacacgaaaacggttcctttacctccgcagctgcaatggatttatactggtgcggctgtcaaaggcggggtatcgttttcgagtcaatgcggaagatggctatagaggatcagccgtatcatgttccgtctttttgactacgcagatgggccgatatgggcttcaggcgaatcatgtttcctttaaaaaccgaaaaaattccaagaagtggcccatccgccgaaggcatttttttgggcgtcttaaaaatgagattgtggtacgtaccttcttgcgacggggcatgtcatcatcggcatcagatcaatctttttaaagccaatgacgacacgtagccgcatcgaatcggcgcgatttccgcgccgagtaaaactacagacctctacccttgcgacaaacccatttaaaagatataattctatgagtatcatcgtgagaccagcccggttatccgccctgtgtcccccttgaggaaaggatggacgatatctatgccgatacctcttgctctttgggctgctgccggaatcggagcagcgggcatgaagctctacatgaacctgaacagtcctgaaaccgtcgtgcgcaatgcaacggagcgttataacgaagaacgctataaattctataaacaaatggaaaggctcgttcccctcatcgaggaattgggccgtttgaagttatctacgtggtccaagtataccgcgatgtttgacacgctggataagctcatcaacctccccggtcattatacctataagagccacaagaacctccacatgctgccccaggatgtgcgcaagctgcggaaggtggcagacgtcgtaaaacgaatccatacggatcatcttgatattgaagggacagggatgctgactattgttgcccttcaaggcggggcggccagtgattacagccagacggccctggccgaaggggagtcgcgcctcattctcgaacaaatcatggagcagcccctttatacgtcagaatgcggcgtccttgacgaagagcaggtcctgtgcgccgtcatggattttcccaaagtcatgccccgtggttatttcaaggaccgtcatggcagaaagcgggaacgcaaggtttccaaacgggcggcccgccgctacaaggaattgacggataaggaatcggtccgtcttgctgacgcgacggcgcgggctgatcgcctttttcatgttgtgacccatgtcctgggctatatgaagccgctcaaaaaggaacatgatgaacagcttgatttttttacggccctcatcaagaaaaacaacgattacgatcagtttacgctcgaacagaaggatcgtctcaattttggcgttaccttaggatttgtcctgcgtgaactggcccggaccgatatcatcatcaagaacgggaatgttcccatcatcaatacttcggccctgcgggcggtttatgcccgggccaaagatttgatgcctgcggaagaaatgccctatcagatataagaaaggaagaattctatgatcagtacaaaaggtttcaaagcctatgatatccgcggcgtcgttcccagcgatgtcaatgaggaacttgcttacgccttgggccgcagtcttgccttttacctcaaggcaaagacccttgtcataggtcacgacatccgtctgagcgggcccagcctgcgcgacgccgctgtacgtgggatgcgtgacatggggacacatgtcatcgatcttggtcagtgcggtacggaaatgatttattttgcggttgcccatcttaaggctgatggcggcatgatgattacagcaagccataatcctgccgaatataacgggatgaagcttgtccgcagcgagtcccggcccatttcgggagacacgggattaaaggaccttgcggccatggtcacagatcctgattttgaaacaaaatatcccaaagccgcacggcagggaagctatgagcaggtggacattgtcccaagttatgtggatcatctccttagctatatcgacactaaagagattgctcccctaaacatcgtggctaaccccggaaatggcggagccggtcccattgtaaaggaactggcaaaacacctgccctgtcactttacgtatcttaatgacacgccggacggacatttccccaatggagttcctaatccgctccttgttgaaaaccgtgatgccaccagcgacgctgtccgccgggaaggggccgatcttggcattgcctgggacggggattttgaccgctgcttcttctttgatgaaaatggacgcttcatcgaagggtattatcttgtcggtctttttgcctcttacttcctcaagaagcatcccggtgccaagatcctctttgacccgcgcttgatctggaatacagaggacatcattgcccgtgaagggggctatcctgtccgctgcaagagcggtcatgccttcatcaaggaatgtatgcgtcgggaacatgttctttatggcggagaaatgagtgcccatcactatttcgccgatttttcctactgcgacagcgggatgattccttggcttcttgtcatttctctcatgtcgacatcaggccttagtcttgctgaaatggtggacgctcgcatccgcgaatatccctgcagcggagaaatcaaccgcaaagtggggaatgccgatgccatcatggaatccctgtcgacgcgctttaaatccggcatccaggaccgtatggacgggcttagcgtcgtctatgatgaatggcgcttcaaccttcgtaaatccaatacggaacctgtggtgcgtctcaatgttgaaacaagaggagatcgggaacttctcgaacaaaagacccgtgaacttctggaccttatccagggcgagaaagcataaggaggcagcagtatgaacgttcttgttacgggcggggccggttacatcggttcccatgtcattgatgatctcatcaaatctggttatacaccgattgtttatgataatttcagtaccagtcatgccgaagcggttcccgaaacggtacagcttatccaaggggaccttcacgatttcaccttcttgaagcatatcatgggccaatatgaaatcgatgccgtcctgcactttgctgcaagttcccaggtcggcgagtccatggtcgatccgggaaaatattactataacaatgtggctggtactttgggtcttcttgacgccatgcgggaaagcggcgtcgagtatatcgtcttttcgtcgacggcggccgtttacggggaaccggaccaggttcctattacggaagacatgccccttcatccaacgaattcctatggccggacaaaactcatgattgaaaacatgctgcgtgactacagcatggcctacggccttcattatgtagccctgcgctacttcaatgctgctggcgcgtcccttttgggaaatatcggggaagaccataatccggaaacccatctcattcccctgaccatccaagccgctctgggtaagcgcgatgctatttccatctttggtacggactacgacacccctgacggcacgtgcctcagggactacatccatgtgaaggacctggcctccgctcatatccttgccctgaaccatcttgtcaagggcggtgcaagtcgggtctataatctgggaaccaagacgggactttctgtccgggaaatcatcaatgccgtcaaggaagtaacgggccgtgacttcatggtaaaggaagaaaaacgccgtgctggcgatcctgcgcggctcattgcctccagcgaaaaaattgcaaaggaactccattggaagcccgaacacagcagcgtcaaggaaattgtggagacggcatggcgctggcatagcggccaccccaatggatatcgctgagccttatggatatcctggtaaccgtcgatcatctcgccaaaagctttggcgctcatgatatctttgacaaggtgagctttaccattcgccaaggggaaaagctaggccttgtcggtgtcaacggcagcggcaagacgacgctcctgcgctgcctcatggatccctcctttgccgataagggaaccgtccaatatgcaggggaaattcgcgttggctatgtggaacaggggtttgacaatatcgaagacgaaaccatctgggagttcatgctccgttcctgcccggatattctttccctccgggaaacgatgaaggaacttgagcgggaaagcggcgaaatgacaggtgatgccctaaaggatgtcctggaccgttatggtcgggtggaaacccgctatgcccacttggacggttatcactacgaaaataacatcaagcgggtcctgatgggactgggctatccagaatccacctgggagcacaacgccctggccctttcgggcggacagaaaacgcgccttcagctggcggcggctcttgtcaattcgccggatctgctcatcctcgacgaaccgacgaaccacctggatattgtcatgagtgaatggctggaaaaatatcttcgtgagttccgcggtggtgtcctcatcatctctcatgatcgggccttccttgatgccgttgtggaaggcatccttgaaatggaaggggggaccctgcaccgctataaaggaaactattcccgctatgtggagcaaaaagagctccaggttctctcccagacccgggcttatgaagcgcagcaggaaaccatccgacgcacggaagagtatatccggcgctacaaggccggcatcaaaagcaagatggctcggggacgtcagtcccagctggaccggatggaacgcattgacgcacccgtaaaggaagaatcttttacgctgcgtctgccccatgccgctgaatccgcggaaaaggtcatcatgttggaacacctttccgttggctatgaaggaaacgcccttttaagcgacattgacctggtcctgcgccgcggggaaaaggtggccatcatcgggcccaatgggagcggcaagtcaaccctcctaaaaaccatccttcaggaaatcccgccccttcacggcgaagcaaagattggaaaccgcgtgaagattggctacttttcccaaagctatgagcgccttgattcccagcagaccattcttgacaacttccttacggagtatggcatgacggacgaacagacgcgccgtctattgggcagtatgctctttcgcggggaagacgtctataaaaccatcgggagcctttccggcggtcagaaagctcgtctggtcctcttgaaactggttcttgacggggccaattgcctcgttcttgacgaaccgacgaaccatcttgatatcatggccaaagaagccgtcgaagccgcccttgagacctttgacgggacggttcttctcgtcactcacgaccgctatctcgttaatgaagtggcaggccgcatctgggctgttgaaaaggggcacctcacgaattataacggcaattacgacttctatctggaagaacgggacaaacgccaacagcgggaagcgccgcttccggaatcctctcatcgagcgccgaaggaagaaccggtaaaacctgatggatcaaagcaccgcccccatgaggaaaaatccaaaaaccagcggatctatacgccggctgaggcggaaaaactcctgcctgaagtagaactgaaaatccgtgaacacgaggctctgcaaaaggtcctaagtcagcagattgccgatcctgaaaaccagatggaccttgaaaaaagtgcggcccttgccgcggaatacgaaaaggagcaacagctcattgatggcttcatggaaaaatgggaagctcttatggaggcccttgaatgacagcattatccattgacagtttcataaaagccctgcagggctatcacagcgatacggccttcaacccatgggccgattacgacccccagtgtgacattgggccccaggcacccctcatccgggcagccaatctgaagcgctatttgacgctccgccaaaaggcacgctttctttttattgccgaaggactgggttatcaaggcgggcacttttcaggcatggccatgacgagtgagcgcatccttttgggtcatcaccctaacgtgcggccccatgtggttcttggcgaggattacccttgccaaaggacaagcaatcccgagtcgcccctgttaaaccgcatgcagcgggaaaaaggcttcaatgaaccgacggcgaccgtcatgtggggggaacttgcggcccaagaactggcccctttccagacgattttgtggaatatttatcccttccatccctataaaccatcgggcatcctgacaaaccgcacgccgacgccaaaagagcttgacgaaggcattgactttgctcgtatgatccttgcccttgtgccggggatgcgcgtcattgccattggccgaaaaagtgcggacacgctccagaagtatggcgtagcctgcgacgcggttcctcatccttccatgggtggggccacgcgctttcgcagcgctgtggacgccttgtttgaatctgaataggtatttttggaggtaacatggaaagcaccattgccagtatgactaaggaagaggtcctcaagatttccctcacgtgcgggaaactgctcctgacaagcggcgccgaaacctatcgtgtggaagatacgatgacgcgcatctgcgccctcagggatatgcagattgctgccgtcagcacgccgtcatggatcatggtgggcgacgaaaccgtggacgggaccagtatggtctcccgcgttacgcggcgggggacggatctcaccctcatcagcgaagtgaacaacatttcctatcatatgcccacgtgggaccattcctttgccgaaaccatggccatgcttgatgaattgagtgcccgcccgtcaccgaccgcactctacagcatggtttggtccggttttgccggcggcttttttgccggcgtcattggtggcaatttctgggattttgtggcagccttcttgggctccttcctttctatggccttcatctgcctcgtgcggcccttccgccccagcagtttttgggaaacgactatggcaggcgtcatcatctgttttgtcacctatatgtgtcatctgttcattcctggtgtcactatggaatttgccattggcggcggaatcatgccctatttgcccggtatggcttttaccaacggaatccgggacttcatggccggtgacctcatgagcggaacgagccgggccggcgaggccattttccttgttggcggcattgccatcggcattgcggccttccttggcatcgtctatctttaaggaggactgccatgaacgtcatcctgaccatcgtcatcaagaccatctgctcctttttcggaaccgtggcttttggcaagatcttcaactgtcctaaacactgcctctataaagcgggctttgtcggcgctgtgggttttggcgtctacatcattctcctcagcggttttggcgtcagttccatgctcagcaattttgctggaaccgtagccctttctatctgcagtgagctctttgcccgctggtacaaggaacctgtgcctgttttttccattcctggcgtcattcctcttgtgccggggctgcccctttatcgggccatgaactatacgatgcaaaacggctacagcatgggtatgcatacctttgtctcggcggcccttgacgcaacggccatcgccatgggtattctccttatctcaggtcttgccaaggtttataagaccagtaaacgccttgtgtcgaaaaaggtccatcatcattccgaacgcttgtaaaaaaacgattgcttataaaccgcgggagtccttccttggagggactctttttgattgggcgccttacgatcttttgccttacagtcttttagcatcacagcatcttagtttccttccattttttcgcccgacagccagaactgaaggctcgtgacagccctttagaacaggcctcgaagaaaacagcttgacagctttcccctttgcgccccgccagaaaaaagattataatatccccaaaaggaggaatgccccatggccatctatcatacgcttacaagaacagtaaaggaaaacccccagacgggaagcatcatcagtgatgccatcatggatccagagaccctcggcaagggggtcaagatgtttgcccaagttacgctgaagccgggctgtgccgttcctattcatcagcatgtcggcaacaatgaaacgtattatctgattcaaggcagcggcgagtatacggacgaagacaaaaaattcaccgtcaaagcaggcgacgtgaccttctgcgctgatggcggcacccatggtctcttgaacacgggaaaggaagacctcgtcttcgtcgcccttattgccaataccatcgcctaaggcatttttgggaaggcggcctggcaggctgctatctctaaaaaatcggagccagctacgccttatcaaagggctgcgggcagcaaagcataaaaagagaagcggaggaagaaatgagcgaatcctttctttccccgtctttttttaaaatagttaatgaaagttttaaataaataagatgaaatatattcaaaacattaataaggaagcgtaacatttttctttcattcttacctaaaaatccccaaaaatgcacagaaaaaccctttctttgcccttctttccagtccgcggtggggatatatgacacactaggaaccgtgtaaacaaagaatggcataaaataaggcgtacagcgcccaaaattttcttgacagggtacgcgaggaatgctagaatagcatggtgtcacaggagaaactatgtcttgacggaggtgcgcaatgtttttggaagaagtaaaaaacggcgctccgactgtggtgggagtaaaacagacccagaaggccctcgtcaaggaaactgcccgcggcgtcatcgtggcgatggatgccagcgatcacatcacaggccccgtcagggccttgtgcgggattcatcaggttcctgtggaaacggtcccgaccatgcaggaattgggcaaggcctgtgggatccacgtgggagcagccgtggcggctgttcttgaaactcggtaaaatcttccgcttgggagattttaatacattaaatcttattcttgagaaaggaggtgccggaatgcctacaatcaatcagttgattcgtaaaggtagacaagttgttactcaaaaatccacggcgccagcattgaaaaattcaccgcaaaaacgcggtgtctgcacgagagtgtacaccaccactccgaagaaacctaactctgctcttcgtaaggttgctcgtgtccgcttgaccaatggtatcgaagttactgcttacattcctggtattggccataacctgcaggagcacagcgtagtcctcatcagaggcggaagagtcaaggaccttcctggtgttcgttatcatatcattcgtggcgcattggatactgccggtgttgctgatcgcgcacaggctcgttccaaatacggcgctaaacgcccgaaagcagctaagaaataagcacaatgcgtgaatgattcataacgaaggaggaattacagatgccgagaaaaggtcctgtaacgaaaagagacgtattaccggatccagtatatggttccaaattattaaccagattcatcaacaagattatgctcgacggcaaaaaaggtgtcgctgaacgcattgtctatgatgcatttgatctgatccattccaaaacgggcaaagaccccatggaagttttcgacgctgccatgaagaacgtcatgcctacgctggaagttaaagctcgccgcgtcggcggtgccaactaccaggttcctgttgaagtccgcgctgaccgcaagaccactctggggattcgctggctcgtcaactattcccgcctgcgtggtgaaaagacgatgtacgaacgtgttgccggcgaactgatggacgctgccaacaacaccggtgcttccgtcaaaaagcgtgaagatacgcacaagatggccgaagccaacagagcgtttgcacattatcgttggtaatctttacaaccaatcattacaaggaggagtaatctgtgggcagagagtttcccttagataaaatcagaaatatcggcatcatggcacacattgatgccggtaaaacgaccaccacggaacgtatcctgttctataccggtaagacccataagatcggcgaagtccacgacggcgccgctaccatggactggatggttcaggaacaggaacgtgggatcacgattacttctgctgcaacgacctgtacctggaaaggacattccatcaacatcattgataccccgggccacgttgacttcacggttgaagttgaacgttccctgcgtgtactcgacggctccgttgccgtattcagtgccaagggcggtgttgaaccccagtccgaaaccgtatggcgtcaggcagaagaatacaatgtaccgcgtatcgcgtacatgaacaagatggatacgacgggcgctgacttcttcaacgctgtccagatgatgaaagatcgtctcggcgcaaatgctgtgcctatccagattccgatgggtgctgaagatcagttcgtcggcctcatcgacctcgtcaagatgcaggctatcgtctatggcgatgaccttggcaaagacgaagaattcgagccgattcctgaagaatacgttgaagaagcccagaaatggcgccagaacctcttggaagccgttgctgaaggcgacgacgacctgatggaaaaataccttgaaggcgaagaccttacggaagatgaaatcaatgccaccatccgtaagatgacctgtgcctgcaagatgttccctgtcacctgcggttcttcctataagaacaaaggcgtgcagccccttctggatgccatcattgcttacatgccggctccgaccgatgtggctgacatcaagggcgtggatcctgaaacgggcgaagaaacaactcgtccttccagcgatgatgctccctttgctgcccttgccttcaagatcgcaaccgacccctatgttggccgcctggctttcttccgtgtctactccggtaaactgacggctggctcctacgtctacaactcttccaaaggcaagagagaacgtatcggccgtatcctgcgcatgcactccaaccatagaacggaaatcgaagaagtctatgctggtgatatcgcagctgccgttggcctgaaagatacgggcacgggcgatacgctctgcgatgaaaaggctccggtcattctcgaatccatggtcttccctgaaccggttatttctgtagccatcgaaccgaagaccaaggccgaccaggaaaagatgggcattgcccttggcaaacttgctgaagaagacccgaccttccgtgtccgcacggatcccgaatcttcccagaccatcatctccggtatgggtgaactccaccttgatatcatcgtcgaccgtctgaagagagaattccacgttgactgcactgtaggcaatccccaggttgcctatcgtgaaaccatccgcaaggctgttaagagcgaaggtaaattcgttcgtcagtccggtggtaaaggtcagtatggtcattgctggcttgaactgactccgctcaaaccgggcgaaggcttcaaatttgaaaacaagattgttggcggtgccattcctaaggaatacattgcacctgttcaggctggtgttgaagaagccatggaaaacggtgttgtggctggctatccgatggttgatatcggtgttaccgtttacgacggttcctaccacgaagtcgactcttctgaaatggcatttaagattgctggttccatgggctttaagtccggtgccgccaaagctgaccctgttctgctcgaaccgtacatgaaagttgaagtgacggtccctgaagaatacatgggcgacgttatcggcgacctgaactcccgccgtggccgcatcgaaggcatggaagcaagaaacggcgcccaaatcatttccgctttcgttcccctgtctgaaatgttcgggtatgcaacggaccttcgttccaagacccagggccgtggcaactactccatggaagtcgaccattacgaagaagttcctaagaacatcgcggaagcgattgttgccaaaaataagggaacggctgaataa

SEQ ID NO: 113 - DNA, 8516 bp, unidentified
  source 1..8516: mol_type = unassigned DNA
atggcagcaagaatttcaaaggcggattttgatgaaaaagtattaaaaagcaagcttccggtaattgttgatttttactcggattcatgtgtggcctgcaagaagctggcaccggttctcggagatatcgaggatgattatgaggataagcttcatgtatacaaggtcaacacaaactttgacggagagcttgctgatgagtatgaggtgactgcgaatccgacactgcttttcgtaaaagacgcagaggtcttagatagaaaggtcggcgcacaaaagcctgccgatttgaaggcgtgggttgaagaattattatagtctttagattattatataaagcagtctgatacaggataataacacatacagataccacaatctgtgacacaggaggaaataaaatgactatcacagtagcaggagagaagaaagaatataaggatggacttacattaccggagcttatcgagcttgagaatgtagatatgcctgagtatgtaacagtttcaataaatgaggaatttgttgccacagaggataagccaaagacagtgcttaaggatggcgacaatgtagagttcctttacttcatgggaggtggatgctaatggcaatgactgatgagcagatcgaacgctattcacgccacattatccttaatgaggtgggcgttaaaggtcagaagaaattattaaagggcaaggtgcttattatcggtgccggcggacttggagctccggcagccatgtatcttgcggcagcaggagttggcacaatcggtattgtggatgcggatgaggtagatttatccaacctgcagagacagattatccacggaacagccgatgtgggcaaagccaaggtaaagtcagcaaaagagacaatgaacgccatgaacccggatgttcaggtcaatacataccgtatgtttgtagatgcgtcaaacatcagagagcttatcagggattatgatttcatcatcgatggaactgacaatttcccggcaaagttcttaatcaacgatgcatgtgtgcttgagaaaaagccgttttcacatgcaggaatcatccgtttcaagggtcagctcatgacatatgtgccgggagagggaccttgttacagatgtgtattcaagaatccgccaccaaaggatgcagtgcctacatgtaagcaggcaggcgttatcggagctatgggcggagtaatcggttcgcttcaggctatggaggctatcaagtatttaatcggtgttggagagctgctcacaggatatctgcttacatatgatgcactcaccatggagttccacaagattaagcttccaaaggatacacacaactgtgcagtctgtggcgaccatccgaccattctcgagccaatcgactacgagcaggaggtctgcgaggagacagcgggcagatttgatgcacctcgtacacaggaataaaaagacagtaaggaaaggaacgatatgagtatcataagaatgaaatatccgtttctggatgaaatagcaaaatatgctaaagagcatctgccggaggaggcgtgcggtctgatagcaggcagtgaggacgaaaacggtcgtctcatcacaaaggtatattacctgacaaatacagaccatgccgaggaccatttcacaatggatccaaaggagcagctggcagccataaaggacatgagagcaaacggccttaagccgcttggcaactggcattcacacccgtctagcccttcaaggccatcggatgaggacataaagcttgcatatgatccaaatgcgagctacatgataatgtcgcttatggcagaaaatcctgtaatcaactcgtttcatatcgagggtggacaggtcacgaaagaggatttacgaatatattctgatgaatattacttctaaatcatatgttaatgttttgagtcgcagcgaaagctgcaaagaaaagtcagcttcatcgaagatggcttttcttttttagagaaagatgttattatagcatgtatatttaataaaacgaaagagcgttcgaaaatgaaattaaaaacgaaggaacttacaacatgtgcactttttgcggcacttatagcagttggagcatttatcaagattgatattccgcttcctatgtacaccatgcattttacattacagtggttctttgtgctgatggcgggatttctgctgggggcaaagctggcatcgcttagcgtgatagtatatttgtgcatcggactggtgggagtgcctgtatttgcggcaggcggtggtcctacatacattttaagaccgggctttgggttcctcttaggctttgtgcttgcagcatttttaatcggagctatcacagaaaagcttaaaaagaccaatgcgtttacactcattcttccggcaacggtcggactggtggcatattatacagttggagcgatatacttttactgcatgaaaaatttctatgcggcaacacctgtcagctggggcatcgtaatagtggattactgtctgataactgttgcaccggactttatattatgcgtatcggcagcagtgttttctgctaagcttcgtcctgtttttgaaggaatgctcaatggatacagtgtgaagcataaggcaaaaaataaagcataaagcgtataataaagtataaaataaggcatgaaataatgtatgaaataaagtatggatatggtattacagggagataaaaatggcgtattttccgatgtttgtggatatgacggaaagagagtgtctgatcgtcggcggtggaaaagtggcataccgcaaggtgatcgtaatgctggattttggcgcgaaggtcacggttgtggcagaggatatatgtgatgagctgagaaagcttacaattgatgatatagcgagcgaggataaaacgggctcatatacggcaaatatagaaaacaatcagacggactcggatgcagcagatagaattacgttcataaaaagaaagtttgaacgaaaagactgtgatggcatggaaatggttatcgctgccactgatgacaatgctttaaatcatgagattgcagagtattgcaaagctaatgacatcatggtaaatgcggtcgatcagaaggctgattgcagctttatttttccgtcatacataaaggaaaagaatcttgttgcggcattttcgagcggaggaaacagccctgtgctgactcagtatctgaaaggcaaagagcaggaggttcttactccgtttcttggtgagctgaacgaatacatgggacagatccgcgaaaaagtaatagcgcaatatgacactcaagccgagagaatgcgtgtatttaaagaaatcttgtgtgcagctattgataatggaaggattccggaaatatagtttaaagtatggtattacagattttaagttgttgttcatttataaattataaatggaaaatggcatgatccgtaggagagtaaaatgaggtatttaataggaacgagaggctcaaagcttgctcttgttcagactgattacgtgatagataagttaaaaagggcatatccggatgatgattttaaggctgttatcataaagacaacaggcgatttagagcagaaaaaggcactcgataagattggctcaaagggtatcttcgtaaaggagatagaggaagagcttttatcgggaaagattcatatggcagtccattccatgaaggatatgcctgatgaaccggcagcagggcttacatttgcaaaggcatggaagcgtgaagatccaagggatgttttggtgctaaaaaatgccgcttcactggatgagcttcctcatggtgccgtgataggaactggaagcaagcgcagaaagtatcagcttttaaggctgcgtcctgacattaaggtggttggcatacgcggaaatatcgatacaaggcttcgtaagctatatgatggtgaaattatatatgaagagattgccgataatactgtaaataacaatgagatagctaacgaaaaacagaataagtataacgaatacaggctggatggaatcgtacttgcagcggcgggaataaagcgtatcgaaagagattctgagatcacacagtacttttcggaggatgatatgattccggctccggcacagggcacactggcgcttgagctacgtgctgacaatgctaagctgatggcaaagcttgatgctttgtcagatgagaaaaccaatctgtgcgcaggcattgagagagaatttttaaagcggatcggtggaaactgtcatctgcctgtagctgcatactgtgatattgtaagtgaaaaagaccgcggtaatgacagcaaaaaaaataacaggctaaagctccttgcgatgtttggctcagaggatggaaaaaagcttgcaaggacagagcaggtatgggatattacatcagacaaaaacaatattgtggagcgtgcggtgcacgatattcggtataaattagaaatcgactaaaaatatcaagtcataatttttaatcataataattcagtagaaaaataattaggaaaatcatgagagaaaacacaggaaaagtagtattagttggagcaggaccgggagatacgggcctgctcactttaaaaggagaaaaatatataaaacaggcggattgtctggtgtatgacaggctgtcatcaccagagtttctttcaatggcaaaggcaggctgtgagcttatttatgtgggcaaggaaaatcacaagcatgtcatgaagcaggatgccataaacgagcttttgtacgagaaatcaaaatatcatgagcttgtagtccgtttaaagggcggagatccgtatgtctttggaagaggcggagaggaagctctctacctggtagatagaaatgtggaggtagaagtggtaccgggtgtcagttcgtcggttgcagcgcttgcggctgcaggaatacctatcacacacagaggtatagcaaaaggctttcaggtcatcactgcgcacagcagaaaggatgaggaggcagatatagactattcccttcttacagatgagacaatcacctgcgtatttttgatgggtcttgcgcatgtaaaaagcattgtagcagggcttatgaaagcaggacgaagagcggatactccggcagcagtgatatcgaacggcacacttgccgcgcagcgcaaatgtataggaacgcttgcggatatcggagaaaagattgaggaagcaaagctgacatcaccggctataatcgttgtgggagatgtggtttcactgaatgacaggcttgatttctttgaaaaaagactgctgtttggaagaaaaatcacagtaccgtatatcgaaacaaacgaattgatagcaaaattacagcagcttggagcagatgtcacaccggttaagacaggcataataaagccgataataattcctgaatttgccgataaagtaagatcggcagactggatagtttttacaagcaaaaatggtgtaagatcatttttctataatttggatctggcaggggcagacatcagacttatagcaaatgcaaggtttgcagtagttggaaaagctacagaaaaagagcttgcaaagcatcacataaaggcagatattattccggcagaacagaccggaaaaggacttgcaggagaattgagttcgtatatgggcgataatgatgaaatcaaagtctgcattttctcggcaaaggaggcttcacctgacattgaggcagggcttaaagaaatatgtgaattagaaaaaattgatgcatatgtaaatgagcaggcatatgagagtattcctgaaagcattggaaaaatggtaagtgaagcggtttttacaagcgcatcaaatgtggaaagattttttcatatgctgccggagaatgcatacgtggaaacagcatactcaataggtgaaaaaacaacagcagcattagagcagcacaatgtcagagagatagtacaagctgatgatagcagttatgaagcgctggtagataaaatatcttataaagatgcttttaaagattaagaatttatggtgacaaaagttatataaagttatataataaatgcaaagttatataaggttatataaacttatatacgaaacaaaaagttatataaagttatataaggggaaaacaaaatgcaaaatccatttacattatcattcgggaaaaaaccactgcaatatatatcaagaatctcacagaccaatcagatagtagagacatttaggtcagaaaatcctgcaaaccagctttttatgataaccggggtaaggggatcgggcaaaacggttatgatgaccaatatagtatcagagataaagaaggatgaggaatggctgacagttgagcttaaccctacgagagatatgcttcagagccttgcagctaagatttacagtatgcctcagatgaataaaatatttgtcaatgcaaaactggatttttcagcgtttggactgggcgtttccatagaaaatgcagcaccggttacggatatagaaaatgtgctggaattgatgcttgaaaatataaagaaacataataagcggttactcatttcagttgatgaggttatgaactgtgaatttgtaaaagtatttgtcagttcatttcagatatttctgagacaggattatcctatttttctgcttatgacggggctgtttgaaaatatatatgatctgcagaacgacaaggcacttacatttttgtacagggcgcctaagataatgcttgagccacttagctttacagcagtcaggaaacactatatggatatttttgaactggatcaaagagaggcagacaaaatggcagctcttacaaagggatatccttttgcattccaggtattgggatatctttactgggaaaacagggatgatcacacgatagaagatattttaccggaatatgatcagtgccttgatgagtatgtgtacagtaaaatctggtcggagctgtcagagcttgataaaaaaatattgttggaaatatcagtaagtggtgaagaaaaggtaaaagaaatcagagaaaaactggatatgaattcaggattattctcggtatatagagaccggctcaaaagaaagggggttatagatacctctgagtacggtaaaattactctcacacttccacgatttgaagaatttgtcaaaacgcgccaaatgtaatatactatatccatctgaaacattaacataataaaggagaagcacaatgaaagaatacagtataggtacaaagtgtgtacaggcaggctatgcagccggaaacggagagccgagacagattccgattattcagtcaactacattcaaatatgacacaagcgaggacatgggagagctttttgaccttgaggcagagggctatttctacagcagactgcagaatccaacctgtgatacggtagcaagaaaaatcgcagctatggagggtggcactgctgccatgctcacatcatcaggacaggcagccaatttctatgccatgttcaacatatgtgagtgcggagaccatatcgtggcatcatcatccatctatggaggcaccttcaacctcatcgcggtaactatggcaaagatgggtattacagctacattcgtatctcctgatgctacagaggaggagctgaatgcagcattcagaccgaacacaaagcttatgtttggtgagactattgccaatcctgcgcttacggtgcttgatatagagctttttgcaaaggtggcacacgagcacggagtaccgcttatagtggacaataccttcccgacacctgtaaactgcagaccaattgagtggggcgcagatattgtcacacactctaccacaaagtacatggacggacacggagccacactcggcggagcaatcgtagacagcggcaaattcgactggatggcacatgcagataaatatccgggactgtgcacacctgacgacagctatcatggcatcacatatgcagagaaattcggcaaggaaggtgcgttcattaccaaatgtacagcacagcttatgcgcgattttggttctatgcagtcaccacagaatgcatttatgctgaatcttggccttgagtcacttcatgtgcgtatgccaaagcatgtggaaaatggacaggcagtggctgaatttttggaaaatcatccaaaggttgcctatgtaaactactcagggcttccttcaaacaaatactatgagagagcacagaagtatcttccaaacggaggctgcggagtcgtatcatttggcttaaagggcggcagagaggcagcgtctgcatttatgaaggcattaaggcttggagcaatcgagacacatgtggcagatgcgagaacctgctgcttaaatccggcaacaagcacacatcgtcagatgaatgatgagcagcttaaggaagcaggagtgccggcagagcttatcagaataagcttaggtcttgaggacaaggtggatttgattgcagatatctcaaacgcactcgacgctataaaataa

SEQ ID NO: 114 - DNA, 11012 bp, unidentified
  source 1..11012: mol_type = unassigned DNA
atggcagaagaaaatgcaaaatttgaatggaatgcaaagcaatattccaagtttgtgaaagaccgcaccttgccctcaatcgatttggcaaaggcgattgatttgccgggcgcaaaagccgcgcttgatatcggctgcggcataggaaacagcaccgccgtgcttgcaaaggcgtttcccggcgcaagggtgatcggagcggataattcggcggatatgcttgattcggcaaagaaaaatcaccccgatttggaatttataaagcttgacgcgcaaaacgaaatcgaaaatatcgataagcgctttgatattgttttttcaaatgcctgcattcagtggattccgaatcatcacaagcttttgaaagatatgttttcgctgcttaatccgggcggcgtgcttgccgttcaaattccgcagcagggaaagcaccccgtgcatgcaataatgcgctcgcttgccgaaacggaaaaatggcgcgaaaaaattaaaacaaaaaggattttttatattctttccgaggaggaatattttgacgaacttgcccgcttaacggatgatttcagaatgtgggaagtggtttattttcatgcaatgccctcgcacgaaagtattgttgaatggtataagggcacggggcttcgcccgtatctgagccaactcaataaagcgaatcaagccgaatttttaaaggatttttcggtgcttgttaaagaggaatatcccgttcgtgaaaacggcgaaataattttcagatttccgaggctgtttttcacggcgaaaaagaaataatgcacaatatataaaaagctcattcttgcataacggggcgcactccgtaaagaagaacgtggtttaagcttcctgagttttgaccgttgcactattaaaaaaatctgccaatacgcaagtattggcagatttttgttaatgcaccacgaacaaaatcagttcgttttagcagtcgggagccgaatacaacatggtttaaagcaaccgatttccgcgtgaactgtgttaaaatactcgttaatcctgccgccttcactgcaattttaacacagtgttttgccgtttatttgatttattgagcaattattctttacggagtgcgccccccgagaatggacttttgttatttgctttcgtcttttgaaaaaatgccgttgataagtaaatatatcagtctgttgtaaaggctcaaaagatcgcccgccaaatccattgcggcttcatcgtcaccctgtttgatagcatgcactattttaaacatatcgcgcataaacatattatcgtaaacaaatgccaaaatattaagcaattcgttttctgaaatgttgattgattggccgttcatatcaagaatttctttcgatttttgaaaaagtgcgttcttatatttttgtaccaaacgcgaatatttgcccggggtttctttcggcgccgtgtttttgagcgaatggattattatgaaatgatcggggtgatccatccaataatctattcggcgtttgtaatatctgctgaaattttccgtcatcgtttcgcttgaatctattttaaaatcaactatgtttgagcaaaggttgcttacggcgtattcgattgcgctgttgaaaatatcttcctttgatgaatagtggtgtaaagcttccctttgatatatttcccgtgcggcaaagctcatttacggatatatctttgcagccgctcgccgcatattgcgaaatcgcacattccattatgtgcgccgtgcttattttgtttctctctcctgcttcatgttatctgccgcctataattcgttctattctggcataatcaagcgcaaaatggcgctggcttatcattattataagctcgtcgcccgctttaagctcggtgtcgccttttggggttatcggagtttcgtctctttcaaccgaaactatcaggcaatgcttgccccatttgatttgcgaaatcgttttgccgcaaagcgggctgttttgcggaatgataaacgattcaagcaccttttccgccgcttttgattccttaacgccctcgtgcttaacaattctgtcgagcagtgcggcataaaacggagtgttgcccgccatgttcgcaagcgcatatgatatcaagctcacaacaacaagcggcaacaggctgcttgcgttgcccgtgatttcaaataccaggataactccggttatcggcgcgcgcactattgaggcaaaaagccccgccatgccgagcaccacaaattcctgccaaaggctttgatcaagcccgaaaatatttatcgctcccgtgccgtatatcgcgccgagatatgctcccaaaacgcaaaggggataaagcgtgccgccgggtgcgcctgtgccaaagctgaaaatgccgaaaataaatttcgcaatcagcaaaatcgccatcgcgccgattgcggggtgctcgtttatgagcagctcgctcattctgtggccgccgcaaaggatttgcggcatcagcaagccgactgcgccgctgattgcaaagcctgccgccaccttaattgtgtttggaatttttgttatttttgcaactatatctctgaatcctatcataagaatattgcttataacgccaaacaatccgcaaacggcgcccatgattattaaaagccaataccagcgcaggggaatggtaacggaatcgtagctgaaaacagtgtcttgcccaaaaaacagctttgaaacaaaatccgccgtaactgccgccactattcccatgcaaagaattgctttgtcaaaggttttgtaaatttcctcaagcacaaaaacaattccggcaagcggagcgttaaatgccgcggcaagtccggcacccgcgccgcagcttatcattctcagctcggttgttttgtctgcttttgtgatttttgcaacgccctttgccgccattgctccgaattgaatgctggggccctctctgccgagcgcaagcccgctgaatatagatgccgtgctgcccacaagctttgcaataatcactttccaccagcttggggaaagatatcctttgatttcacccgtaacctgcggaatgcccgaaccgcccgaatccggcacggcttttattatcagcgccaccaacgcgccgagtattgccagcgcggcaatccaaataatgcattttacggggctgcccttaacaaaatcaatcaccctgtaaagcaagctttccgcctgtgaaagcaaaaatctgtaaagcacgcacacaagcccggcaaaaacgccgacttccgcccctcttataatcagaaaaaagctttccgccttttcacggcgaagctttcttaatgttgttttttcctgttctttcataaatatgcccgaaaagcctttcgtttttatcgcttcttataataattttaacacacgattttaggattgcaataaaaatcgtttataaatttgcacaaaaaccgccgagcatatataaatgttataatatatatttaataattttataaaaaaatcaaattggcaaaatattttacaaaaattgttgaaatatttttaagaataggttattattataaggcaagggggaatttctatatgaaagctaaaaccggactcgatgtgttcaataaaatattagcggtaattcttgttataagcattattgctttagttgttatatgcggcgtggttaaaaaaggcggcgcttcagcaactcctgctaatgcagacgccacatcaaccgaagatgttgcaactatcgatgaatttgtggccggcacttacggcggcaaagaatttaaaaccgttgaagatgttgtaaattattatgtagaatgctataactacacaaaaaccttgggcgccaactacacttatgaaggcagccccacaacaatgtataagcttgttggctcagagaatattgaagttaagaatcttcttgttgaaggcaagtcaatcagcatgatcgatcagcttatcccgggtattctcagcagcgtattcaccggcggcattaagggccttccgcccagcggcagccttgttcccggcaatgatacggtaaccgatcaaaaaatcgatgtatccaaatctctccttacagcggatgatgttcttgcggcaaatgttaaggataacggcgatggcactatttccatcacaattcagcccaaagccgtaattctttccatgcccgcacaggatgcacagggtcacttcttcaacactctcggcgatatcagctccgttgttagttcaatcagcgtgctctcattctcatccggcacaatcaatgataattttgttgttgattataagggcggttcaggcaccgtaacaattaacacagccaccaacgaaatcactgcaggcgaatatacaatgaatgttcacatcaatgttcagcatgcgaatgtgctttcattcaaagataagagcgcaacagttgatattatttacacaaactctttccctgcaacggatgaatatctcacatctcataactgcgcaaggggttaataaaattcaataattgattaaatcccgcaggatttcctgcgggatttttctttgcataaatttgtcttttttttggattttattttctcaaatgagaaaatatctgctttttcgattaagccgagcggaaaatatattttcgtcacattgacgaaaatgcgttttcttgctcccggttaagcaaaaatataagcactgtatgttaaaaatatcgaaaagaacgacaatttttgcacaatctcgtcaaaccgcttaacaaagcggtttggcggcttttcaaaggctttaaatctgcactaaaaatgatgatttaacgcccctgttttgttatagttgccgaaaatttgttaatttattgacaatcattgaaatctatattattatagagctgtaaaaaaaataaagtctcgtgtattcgaggcaataaaagttattgtgaggtaataattatgtctagaaaagttgttcttgccggtgcttgccgcaccgctatcggcacaatgggcggcacgctcagcagcactcctgctgttgatttgggcgctatcgtaatcaaaaatgctcttgaaagagccggcgttcccgcttccgaagtagagcatgtatatatgggctgcgttattcaggcaggccaaggccaaaatgttgcacgccaggctgctattaaggcaggacttcccatcgaagctccagcagtaacaatcaatgttgtttgcggctccggtcttaactgcgtaaaccttgccgctcagatggttaaatcgggcgaagcagatatcgttgttgcaggcggtatggaaaatatgagcatggctccctatgcactcaagcaggctcgttacggctacagaatgggcaatgctccaatggttgatactatggttaatgatgctctttgggatgctttcaatgattatcacatgggcatcacggctgaaaatgtttgtgaaaaatacggcatcacccgtgaagagcttgatgaatttgcggcgaacagccagcagaaatgcgaaaaagcaagagcagagggcaagttcaaggatgaaatcgttcccgttgaggttaaaaagaaaaaagaaacaatcgtgtttgacaccgatgaaggtcctcgcgcaggcacaaccgcagaaggccttgcaagacttcgccccgcatttaaaaaggacggcattgtaacagcaggtaactcttcgggcattaacgacggtgcagccgcagttatcgttatgagcgaagaaaaagcaaaagagcttggcgttaaacctatggcaacttgggttggcggcgctcttgccggcgttgatcctacaattatgggcatcggtcctgttgcagcaactagaaagcttatgagtaagcttgatctcacggtagatgatatggatcttattgaggctaacgaagctttcgccgctcagtctatcgctgttgcaagagatctcggtcttgatgcttcaaagcttaatgttaacggcggtgcaattgctctcggtcaccctgttggtgcttcgggctgccgtattcttgttactcttcttcatgaaatggaaaagagagatgccaagaaaggccttgcaacactttgcatcggcggcggtatgggctgcgcaacggttgttgaaagagactgattattcgtttaaaacttggagatagcaatggaatttataaattatgaagcagacggcgcagttgccgtattaaccataaacaggccaaaggctcttaacgcgctcaacagcgctgtgcttgatgaaatcaatgaagcacttgatgcaattgattttgacaccgttcgtgctcttatcattacgggtgcaggcgaaaaatcatttgttgcaggtgcggatatcggtgaaatgagcacgcttacaaaggcagagggcgaggctttcggaaaaaaaggaaacgatgtttttcttaaattagaaaatcttccaattccggtaatcgctgcggtaaacggttttgctctcggcggcggctgtgaaatttcaatggcgtgcgacatcagaatttgctccgaaaatgctgttttcggccagcctgaggtcggcctcggaatcacacccggtttcggcggcacacagcgccttgcaagaacagtcggcgtgggaatggcaaagcagcttatttacacggcaaggaatatcaaggctccggaggctcttcgcatcggccttgtaaatgccgtttatcctatagaagagcttatgccggcagctaagaaaatggcttcaattattgcggcaaatgctccaatagccgttcgcaattgcaaaaaagcaattaaccaaggcttacaaacggatatttcaagcgcagttgaaattgaagaaaagcttttcggcgattgctttgaaacagaagatcaaaaatacggtatggcgtttttccttgatcgcaataaagataaggttaaaaagccttttatcaataaataattattcaggaggaattgaatatgaaagtcggaattataggcgcaggcacaatgggctccggtattgctcaggcttttgcgcaggttgaaggttatgaagttgcactttgcgatattaacaatgaatttgccgcaaacggcaaaaacaaaatcgcaaagggctttgaaaaaagaattgcaaagggcaaaatggatcaggcggcagccgatgccattcttgccaaaatcacaacaggcaccaaagaaatttgcacggattgcgatcttatcgtagaagctgctcttgaggttatggatgttaaaaagcaaacctttaaagagcttcaggatatcgttaagcccgattgcatgtttgcaacaaacacatcatctctttcaatcacggaaatcggtgccggccttgacagaccgcttatcggcatgcatttctttaatcccgctcccgttatgaagcttattgaggttatcgcaggtgcaaacactcccgcagatatggttgctaaaatcaaggaaattgccgtagcaatcggcaaaactcccgttgaggttaatgaggctcccggctttgttgtaaacagaattcttattcctcttatcaacgagggtatcaccgtttatgaaatgggcattgcaagcgttgaggatatagacactgcaatgaagctcggcgcaaatcatcccatgggtccgcttgaactcggcgactatgttggccttgatattgtgcttgcaattatggaaacaatttattccgaaacaggcgatcccaaatatcgccccgcaactcttcttaagaagatggttcgcgcaggtaagcttggccgcaaaaccggcgtgggcttctatgactatcgcaaataataactgaaatcacggcggcgtgcattttttgtgcacgccgctgcggcggtagatttgaaaaagtttatcgctcggcaaggttattttcgctgcattgcagcatataattgcgccaagcccgcagcgcaactttgaaaatttatcgtacaggcgggcagaaaggctaaggaaatcaatatggattttactttcggcaaagaacatgaaatggcaagaaagctttttgctgattttactgaaaatgaagtaaaaccgcttgctgttgaaacagatgaaaccgaacaattcccaagagaaaccgtaactaaaatgcaaaagctcggcttcctcggaattcccgttccaaaggaatacggcggccagggctgtgatcccctcacttatgttatgtgcgttgaagagcttgcaaaggcttgtgccaccaccagtgttatcgtttccgcacacacctcgctttgctgcgacccgattcttacttacggcacggaagagcaaaagcaaaaattcttaaagccgcttgcttcgggcgagctgctcggcgcattcgctcttacggagccgggcgccggcactgatgctcagggcgcgcaaacaaaggctgtgcttgatggcgatgaatgggtgctcaacggctctaaatgctttatcacaaacggtaaagaagcagatatttatatcgttattgcagtaaccgatgttgttgaagataaaagaggcagaaagaaaaaacttttctccgcatttatcgttcccaaaaccgcacccggcttccttttcggcacaaaagaaaagaaaatgggtattcgcggctcttccacttatgagcttattttccaggattgcagaattcccaaggataatattcttggccccagaggcaagggtttcggaatcgcaatgcacactcttgacggcggccgcataggcattgccgctcaggctctcggcattgcagagggtgctcttgaccgcacagttgcttatgttaaggaaagaaagcagtttggcagatcaatcggcgctttccaaaacactcaattccagcttgcagatatggcagctcaggttgaggctgcaaaaatgcttgtttataaggctgcaatggcaaaggcaactcaaaagaattattcctttgaagctgcagaagctaagcttttcgctgcagaaaccgctatgaatgtaaccacaaaggctgttcagctcttcggcggctacggctatatccgtgaatatgaagtagagcgcatgatgcgtgacgctaagataacagaaatttacgagggcacttccgaggttcagcgtatggttatcagcggcaatttgctgaagtaaggaggagcagaatatgaaaatagtagtttgtataaagcaggttccggatacaaaaggcggagttcagtttaatccggacggcactttaaacagagcggcaatgctcacaattatgaatcctgatgataaagcaggccttgaggccgctctcagaattaaagatgaattcggtgcagaggtaacggctcttactatgggtcttcccaaggcagaggaggttttgcgcgaggctatggctatgggcgcagacaacggcattcttgtaacagacagagttctcggcggtgcggatacttgggcaacctcaagcacaattgcaggcgcacttcgcaatatagattatgatattatcatcacaggccgccaggcaatagacggcgataccgctcaggtcggtcctcagattgcagagcatctcggaattccggttatctcctatgcggaggatattaaggttgacggcgacagcgttgttgttaagcgccagtttgacgacagatatcatatgcttaaggctaaaatgcccgtgcttatcacagctctttcagagcttaatgatccccgctatatgactcccggcggcatttttgacgcctataaaaaagatatcaccgtttggggcagagcagatcttaaagatgttgatgattccgatatcggcctttccggctcacccacaaaaatcgcaaaggcttccgataaggtaagaaagggcgcaggcgaaaaggttgcgcttgatactcctcaggaatccgcagattatattatcgcaaagcttgaagaaaagcatatcatctaaggagggctgaataatgattacagaaaatatagaacagtataagggtgttttcatttacgctcagcaggtggataacgaaatcagccccatcgcttttgaattgcttggcaaggcaaaggatcttgccgcaaagcttgaaacagaggtaacggctgtgcttatcggctacaaggttgcaaatcttgccgatgagcttgcaaaatacggcgcagataaggttattgttattgataatcccgtgcttgaaacttacagaacagagccttatactcaggcccttgcagcagctatcaatgaatataagccggagataatgcttgttggtgcaacggctatcggccgtgatctcggcccccgtgtttcggcaagagtcggcacaggcttaacggcagactgcacagtgcttgaaattggcgattttccgcttaatcctcttccgaataaagagcaaaagcacaatcagcttcttatgactcgcccggcattcggcggcaacacaatcgcaacaattgcttgcccggacaaccgcccgcaaatggcaaccgttcgccccggcgttatgcaaaagattgctcccgttgaaaacgcaaaggctcaggttattgagtttaatcctcagcttgaagaaaacaattgttatgttgaaattcttgaagttgttaaatccgttgaaaccgttgttgatattcagcaggcaaagattcttgtttcaggcggccgcggcgttggcagcaaagaaaacttcaagcttcttgaagatcttgcagatgccctcggcggcacggtttcatgctcaagggcagttgttgataacggttggcttcccaaagatcttcaggttggccaaacgggtaaaacggttcgcccgaatgtttatttcgcaatcggcatcagcggtgcaattcagcacaccgcaggtatggaggaatccgatatcatcattgcaataaacaaggatgaaagcgctcctatttttgatgttgccgattacggcatcgtcggcgatttaaataaaatcgttccccttatcacagaagctgttaaggcaagaaaagcggcaaaataa

SEQ ID NO: 115 - DNA, 7892 bp, unidentified
  source 1..7892: mol_type = unassigned DNA
ttatttaccctcgtatgccgcctgaatctcttttttgaactcttcctcgcccactctctgaagagtaagtctgaaacgctcaccaccatttgcatgcttctcgaagaaactaattgctgcatctgtcactctgaaaagagtttccttgtcgcggataatcggaacaagctgctctcctttatagatgtggtttccgaaaagtcctccaaacgatacgatatatcccggagttcccttccatgcatctgtcggacagctctttacgcagcgcgcacagttgttacatttgtctctgtcgatgacaatcctgccatcctccatgctaagtgcaccctcgcggcatgccttcacacatacaccacactggatacaatcgtcatggctgcactctactgtcatgccgcccttgattccgacatcgttttcctcagcctttaagcagttgttctgacagcctgtgacaccaaacttgaacttgtgaggaagctctcttccgaagtatctttcatcaagttccttagccagagtgtatgtatcgatacatccgctaggacagatttctgagccctgacacgctgtgacagtacgtactctcggtccgcagacacctgttcctacaccgccctttgccagttcctcttttaccacattgatatcctcaaccttgataaaaggaatctcaataccctgacgcgatgtcatatgaacatatccgtgtccgtatttctcagcaacctctgctactgttttgatattttctgctgtaagatttcctcctacaaccgcaattctaagcgagaaacagcccttttgcttctgtctcatgaaaccgcccttttttagggccgcgtaatcaactttctccgccatttttaatctccttactgtgtaaatatgttaatgttttgttttatatgtaaatgcatatgcacgctctcatttgcatacacattgataccttattattatggcttaatcagctatatttgcaaaagcctgtgcaaaatcctccttgaggtcatctatatcctcgatacccacgctgactcttataagatcctcaaatactcctgcatcctccttctgcttatctgtgctgtgaagactgattgtagagcccggatgaatgacaagtgtctttgtatctccgatattgctgagtgtgtatggaatcgtcaggctgtctataaatttaaatgccttttccttgctgccaaccctgattgtaaggattgctccatagccgtttgcgagctgtttttttgctatttcatgccatttgctgctacaaagccccggataattaacctttatgtcaggataattgttttctatccacgacgcaagcccgagtgcattagaacattctctttccattctaagaccgagtgtctcaagtcctataatatttaagtatgcattcaccggagctaaacaggcacccatatttctgaaaaggctgtttctcagctttgcgacaaatgccataggtccatacttcacataatctgcaaaacccggatatctgttcttgtcccatttgaacttacctgagtctgtcagaataccactgattgcattgctgcttccattgatatatttggaagatgaattgaccacgatatcagctccatgctttaaaacctgtatcaggtaagctgtcgatgtggtattgtcaactacaagcggtatatcatgtgcgtgtgctatctctgcaagcttctcaatatctgtgacatccagacatggattaccgatagtctctgcaaaaatcagtctggtatgctcattgatgctgtcctctatctgctgccagttgttgttctcgacatatctggttgtgatgccgaaggcctcaagatcatggaacaaatctattgtgccaccgtagaggctggcgcttgagatgagctcatctccactgcttagtatatttaagaaggtattcatcagtgccgccatgcctgatgcgcatgccaccgatgctattcctccctcgagctttgttattctgttctcaaaagctgtaatcgtaggattggcaactcttgtgtaacagtagcccggagctttgttttcaaatattttttccagatcagccgcgctctcctgctcgaaggcgcttgtctgatataccggtggcagtgtagagccatttgtctcttttgtcacgccggcatgaagtaagcttgtattaaatctcattgttttcttcttctcgttaattcttacatagtctattatgttactaggaattgatgagattattatacaaacgtgttggttgaaagtcaatgctatcagttatacaaattatttgtgcgtggttatatattttatttataaccattaatgtcccttaaatactctgcggctgtcgttgcggcatttgctccgtcagatactgctgttaccacctgacgcagtgtcttggtacggacatctcccgccacatacagtcccggctggacacttctatcatggtcaccattttttgttgcagcatatgtgatgccgtcctcacctgccactacatatcctctctcatcgagctgcaccagattctttataagctctgactgcggtactgagccatatgccacgaatactccgtctacagccagtgtcctgccacttttaagctttatgcctgtcggctttttttctccatatatttctgtcactgtttcgtttaggacaagttctacattttctttctgctttaagagctcaactgtgctctgtgcaccgcggaagctgtctcttctgtgaaccagatagaccttctcacatatatcggacagatataatgcatcatccaaagcggtatctccgccgcccagcactgcggctgtctttcctttatagaatgctccgtcacagattgcgcagtaagatactccctttccggtatactcatcctctcccggcactcctgcctttctcggatatgctcctgcggtatagatgagcgctcttgcctctgctatcgtgtcatcatcgaatttcactctgtatatcgctgattcttctttctcaccgttttgcactgcttctatctgcactgcttctttttcgataaattctacatcaagagacactgcatgctccctgaatttctcgcccaggtcgtatccgtttatatttggaagccccagatagttgttcacatttccgctctcggctatctggcctgtcccctcgtattctttttctgctactgccacattcagattggctctctttgcatatattgctgcagacagtcctgccggaccactgcctattattattatatcatacatggaattggttcctttcagcgtccattgaattttttcggtaacttattatatacattatccttaaaaaatacaataataccgcctgcttttataaaacacctttataaaaacaagcggtatcaattttatctatcgtatatacatcctggcctcataaggtctgagcactgacatatcagaggtatccttataatttgaaatcagcacctccatgccctcacactcctttgcaagcggcattggtatctccttgtcaaagaaattgcacacaacaatcatggttttttcttcattctttctgctgtatgcaaaaatattctcatcatcctcaagtaaaagtgtgaatttaccatcaacaaataccggataatcctttctcagctgaacaagcttcttgtagcagctaaagattgaatcagggtcattcacctgtgatttggcatttattttgtcgtaattgtcatttacctttatccaaggtgttcctgtggtgaagccggcatttgccgagtcatcccactgcataggtgtccttgcattgtcacggccctttgcgtaaatggacttcatgatttcatcctttgagtatcctttttctaggcgctcatggtacatgtttatgatttcacagtccttataatcctcgatatcatactgtacatttgtcatgcccagctcctcgccctgatagatgtatggtgtaccctgcatgccgtgcagcaatatagcaagcatctttgcagattccactctgtactccctgtcattgccccatcttgacacgatacgcggcaggtcatgattgtcccagaacagactgttccagccacagttgtagagctcattctgccagtgagccattatctttttgagctttttaaacggaagcggtgcaaggtcccatttctcgccgccctccttctggtcaagccctatgtgctcaaactggaacaccatagaaaactcgctgccatccggattgctgtaaagctttgcgcgctctgtgtctgcgccccatgcctcacctacagtaatcaggtcgcccttctggaaggtctccctgctcagttccttaaaatattcctgaagccttggtccgtttatggtgattctcttgtccggctcttttgctatctggtcgattacatcaagtctgaagccgccgactcccttgtccatccaccagagaatcatatcgtagattgctcttctgacctttggattctcccagtttaaatccggctgctccggtaaaaactgatggaaataatactgtccgatttccggcacatattcccatgcgcttccaccgaaacaagccttcatatcacttggcggcacgccttcatctccgtctctccaaatatagtagtcatggtatggattgtccttgctctttttagcctccttgaaccacctgtgctcgtttgaagaatgatttaagacaagatccatcataatccttatattgtgcttctttgcctcgtttatgagctcctccatatcatcgagactgccaaacgtcggatcaatatccctgtaatccgaaatgtcataaccgttgtccgcctgcggtgatttaaataccggcgacagccatattgcattgattccaagggtctcaagataatcaagtcttttgatgataccctgtaaatcaccaaagccgtctccgttagaatcctgaaagctctttggataaatctggtaaactaccgcctttttccaccatttttcgttattgtttttgctcattatgccctccttgtctcttcattatctcttttagctgtctctttttgtaaaaattcagcctagtttctttaatgctgtatcaaattatgctattttacaagcaccaccaaaacctcacagctttcaagcttaagctcggatgctcccactgaaacagtgctcttttcagcatcatttgcgttggacaaaagcacctttttcacactgccatccagcctgatttgtgcctctttactgccaaaatttgccacaaccagcacgcgcttattttcatcctctctgtaataagccatgatgccatctgtatcctcatatgccggaacacatctgccgtaggtgaacagctccttaaattcatctgactttctgagtgccacaagccttctgtaatagttcaaaacagatgaagggtccttttcctgcgccgcaacattgatagccttatagttttcattgaccttaagccatggctttgctgtggtaaaaccggcatttgcctcatcactccactgcataggtgtccttgcattatccctgctcatccttccacaggctgcaagtgcctgctcctttgataagcctgctgcaagtgctgccttgtactgatcctttgtgctgatatcgtcatactcatctatactgttccattttgcattttgcataccgatttcctgtccctggtatataaacggaatgcctcgaagcagtacgctgacagttcctaacatctttattccggcaggattttgagcatgctttggtaaaaatcttgaggcacctctcggctcatcatgattttctatgatattggccttaaagccgtacttttctgtctcaagctgtgaaccaagaatggtctttctccatgtgtcaaaatctatttccggtgcatcataccagccatgctctccatcacttaagcactgtgcacaaaaatcaaatatcgttgaaaaatgcccattctcaccgataaactccggcagctcctcaggcttcatattgaatacctcgccaaccgtaaatgcatcatacttcttaaatgtattgttctttaattcctctaagagctctccgacaccttctgcactttcaaccatcttgtagcaggcagccagtccgtcctctgcatccggctcaaaatcagggaaatcgagatttttctttatattgattatcgcatctattctaaatcctgacaagcccttatccagccaccagttaatcatctcataaagcttttgtcttagcttttcattctcccagtttaaatccggctgctccttcgcaaacatgtgcagataatacttgtccgtgcccggcaccttctcccagcagcttccgccaaaataagagcggtaattgctcggcggattgccgtttttaccttttctgaaataaaagtaatcagcatactctccatccggatccttaagtgccttttgaaaccattcgtgcttatccgagcagtgatttattaccagatccatgatgatgtgcatatcacgcttctttgcctcggcaaggagctcatcaaactcctccatagtaccgaactcttcagctatcgcatagtaatcagatatgtcatagccctgatccacaaatggcgatttatatatcggagacagccatatgatgtcaattccaagcgattttaaataatccagctttgaaatgatacctcttaaatctcctattccgtcaccgtttgtatccagaaagctctttggataaatctgatatgccaccttgtcatgccaccattttctctccataatgtgtacctcttatctaatcataaattttgcactcatttacatcttgagcacttcgccttgatgtattatactgctattatagaaagtgtttagtataaattcttgcaatattttttcattttataacacaatactgctcttataattttaaagggtataatttttaaagctatggagaaacaacaatatgaaaaacaataatccgcctgccctcgggcagaaagaaaacgcaaagcacggagaagtatttttccccgttcagaaatatataacaagacttgcagcagattaccctgtcatcactacacactggcacgatgaggcagagctcacactgattacaaagggctcatgcacctatcagattgatttgctcgaatatgaagcaaaggaaggcgatatcatctttatcccgccactgctgctgcattccatttcaataagggactgcgacgaattttactctgaaacgtatgtattccatatcaattttttaggtggaaacaataccgatatatgctcttcaagatatctgactccgctaatcaaccatgagtttgccatgccttacctgattgcaccgaagcatccggcatattcatccctttgcaaatgcttcatgcgcataacaaagctatactccagtcaggaattcggctatgagctggctctaaaggcatttctgcttcaggcaatatttctattgctgcaatacagtgaaaaaaatgctgatttcggtgtcaacacatcctccgataagctcaaaaatgtgctcgattacatcgaggtgcactatgccgaaagcatccaggttgcagagcttgccgggctttgctatttcagtgaataccacttcatgcgtttcttcaaaaaacacatgaacatgacctgcgtgcagtatatcaacaatgtgcgtcttgaaaaatccgtggaacagttcgagcgcggcaacacctcaattttagatgtctcactgtctgtcggatttcacaatctgagctattttcacagggcatttaaaaagaggtatcatagatcggaagagcggttcagc

SEQ ID NO: 116 - DNA, 12483 bp, unidentified
  source 1..12483: mol_type = unassigned DNA
ttatttgttgtcccgtaagtcttttaccctgacggcttttccttcgctctgcggcaaggaacctttctttaccaaccgtaacttcggagttaccagaatctcgtctttcagctggcgggtaatggctttgctaatcttttgtagctcgatgtaattgtcagtagagaggtcgctaagttcaacttccacaatcatctcatcctggttattgaccgtttcgagcgtgatgaggtaattgctgcccaattcggggaattgtaccagcaccttttccacctgcatggggaagatattgactcccttgatgatgaacatatcgtcgctacggcctttgatgcggtctatacggatgtgggtacgtccgcaagggcacttgccgggcaggatgcgggtaaggtcgcgtgtacggtagcggatgaggggcatcatctctctgtccagcgttgtcagtaccagttcgccgatttcaccttccggtacgggttcgccggtttccgggttaatgatttcgaccaggtagcaatcttcccagaagtgcatgccgtcttgttcggtgcactcgaaggctacgccgggaccgttcatttcagtcataccaaagctgttataggctttgacgccaagcatgcgttcaatctttctgcgttgctcgtctgtgtggggttcggcaccgataacaagcgttttcagacttgtgccggcggggtccatcccttcttcctggaatacctctgccaagcggatggcatagctgggaatggcatgcagggcagtggtcttgaagtcggtgatgaactttatctgacgcttgctgtttccggcagcggcaggaacagtcagcgcacccagacgttcggctccatactgaaagcccagtcctccggtgaacatgccgtaaccggagctattttggaaaacatccgtcttacggatacctaccatatagaggcagcgtgccactaagttagcccaagagtccaaatcgtgttgggagtgtacgatgaccgtcggcgtgcccgtagtgccactggaagaatggatacgtactccgtcctcacgcatatcgcctgctactaatccaaaaggataattggcgcgcatatcggccttggtagtaaacggtatcttacgtatgtcttctatagaccggatgctgtcggcagtgatgccatgctcttggaatacctttttataataaggagagttggcggcaatgctgacagtcttttttaaccgttgcagttgcagttcgcgcaactgctcacggggcatcgtttcaatctcttcttcccagtatttgttattcatggtatgttgaaatttagagtcaattatagtttacatcagtttttcagcaatctctttgccggcagccaacgctttgaggttcagctctacaatggcgtcgcccttgcgttggaagatttcgcggatgctgtcttgcacctttgcgtagtcgatgccgaggaaggggatggtggcgcccagcagtacgatgttcgctacgcggggagagccgacttcttttgccacttcgtttacgttcagcatgattttatgcggcagcttgttgatttcggccttgatgtcttcttctgccggatagttgggaatgttgatgaagggggcttcattggtcaccagccaaccttcggggctgaggtaggggaggtagcgcagtgcttccatcggttccagggagatgatgaggtcgcattttcctgtgggaatgaggtccgaagcgatggattggtcgctgatgcgcaggttggactgcacgtcgccgcctcgctggctcatgccgtgtacttctgcctgcttcatgtagagtccgtccttgagggctgctttgccgattacggtggcgatggagaggataccttgtcctcctacgccggaaagtatgatgtcttttttcatggctttacttgtttctttttttgcgtgctaatgtttggatgcattctctgcgggggatgatgacggatacgccgtggtgctcgatttcttcccggatgatttgcttcatctcttcgtagttcttcttcaagggcactacgacgcggatgtgttcgggagctacaccgatgccggcgcagatggcttccagacgtccggtgccggcagagtcttgtcctccggtcatggcggtggtttcgttgtcggagatgacgatggtgacgtcggcgttttcgttgacgcaatccagcagtcccgtcatgcccgagtgggtgaaggtggagtcgccgatgacggctacggcaggatgcaggccggcatccgaagcacccttcgccatggtgatggaggcgcccatatccacgcaagagttaatggcgttgaatggggcattggctcccagcgtgtagcaaccaatgtcgctgaacaccttataagtgggatattcttctttcaatacttgggtcagcaccgtgtacatgtcgcgatggccgcaaccctcgcacaaagcgggcgggcgcatctctaccaaagaaggaacgctgaattcagccttgttctccttgcctacggcacgtgccacgctgtccgggttcagctctccgtcttgtgaaagagtgccgtccaaacggccttttactttgatgccgatgcccagatagccttttagctgtttttctacgaacggttgtccgtcttccagtaccagaatctcgtcacatgcttctaccagctgcatcagctgtttcttgggcaacgggtattgtccgattttcagtaccggatattcgcaaccttcgggatagttctccatcaggtagttgtagccgatgccgcatgccacgatacccagctttttgttggggccgtcggtatatttgttgtaagcggagttttcagaagctttgataaattcgtcctggcgttgcagcaatgctttgtaacgtttgcgtgcattacccggcaggaggatgaactgacgcgggtcttcgctgaaggaaatctcattctgcggttgttgctccttgcgctctacgccggaacgggagtgtgccaggcgcgtaaccatgcgcatcaggatgggttcgccggtctgttcggagaagttgaatccgttgtacaccatgtcgtatgcttcctgctggttgcttggttcgtacatcgggatgagggagaagtcgccatagaagcggctgtcttgctcgttttgtgaggagtgcatgctggggtcgtcggcagcaatgactatcagaccaccttttatgccggtaatggcagagttgatgaaacagtcggcagctacgttcatacccacgtgcttcatgcacaccaatgaacgcttacctgcaaaggacatgcccagggcagcttccatcgcagttttctcgttagagcaccagcggttatggatattcttttcggcagtaatcggtgccatctgaatatattcggtgatttccgtagaaggagtgccgggataggcatatacacccgaaagtccggcatctaatgcagcttgtgcaatggcttcatcgccaagtaagagttgcttgctcatatctgaatatttaagtgttagtcatggattaatatttgacgcaaatataggattttgcttttattttatcagcagattacttgaaaatctttctttcgtttaatgcattccaatattttcttgcatttttcatgtgctcggcataattggatgcaaagttatgggtgcccgagaagtcctctttggcacacatgtagaggtagttgtgtttcgtatggttcagcacagcatccagcccgatgggtgaggggatgcgtatgggaccgggaggtagtccggtgttgagataggtattgtagggggattctactgccagatgggcattcgtaattctccgcaagccgaagtcctgcaaggcaaatttgatggtagggtcggcttgcaggggcatgccggtgtgcaggcggttgatgtagagccctgccaccattggtttttcgggagtgttgtttgtctcttcctcgacgatggaggcaagggtgcagacttccgtcggggtcattccgatggcggtggctttgtctaagcgttcctggttccagaacttctggtgctctttttgcattctttcgaagaactcttctgcactcatgtcccaatagacttggtaggtttcggggatgaagaggcagggcagggtctctttgttgtatcccagtttttgttggaatgcggagtcgttcatcaatccggctatttcggcggagtctatcatgagctgtttgcctacgctgcgtgccagccggtccagtgtgcgtacgctgccgacggtgagattcgtaggttcttgatatccgcggtacagacggctgaatacgtgatatacgttttcccccggccggatggtgtagcgtccggtgtgtatattttcggaatatttcttgtattgggccatccagcggaagccggtgaagcttcgaggatggccttgttgttccaccttattatatatggagtcggcggtgtcgtcgcggtctatatagatatagactgtctttttcggatggaattgcggggcaaacagatagtagtatactgttcctgcacaagctgctccaataagaatcagtgcgacgaatgttccgataatgattttcttcttttccattttgttttactgcatctttagtcgggcaaagttagtaaaaaatggagtgaaaaccatcaagtcatatcagttaattcgatagctgacaaaggctatgcgtttgctgtccggtgcccatgagttgacattgatggtgccttgtccgccgaaaagctttaacaatgtcttgggttctccaccgtttgcgggcattaggcgcagctctacgttcttgtttgccaggtgctctcccggttccaggtcacctttgtagtaggtgatgaatacaacggattttccgtcaggggagatgtgggggaaccaggagttacgggtttcgtcaaaggtcatctgggtctgttcggagccgtctgccttcatgcgccagacttgcatgagtccggtgcgtacggaattgaaccagatgtattgtccgcagggggaatattccggtccgtcatccagaccttcggcagtggtcaggcgggtttcttcacctccttccgccgggatggtatagacgtcatagttgccgtttcgttcggcgcaataggcaagctctttgccgtcggggctccaaccgtggaggtagctgggagccataggtgttattaaacggggagtgccgcccgtgatgggaagtgtataaatgcgcgatttatagtcttctttcgtcccgtggctgatggctatctgctgtccgtcggtcgagaggacgtggtcgttgttgcagttttgggcaaatccggtgtttatcagttccggttcggcaggcgaggtgggggaaaggcggtaaagctttccttcgctgttgtatagcagccattgcccgtcgggcgtccaattgggagcttcaatccggtagggaaattcttttacgacggtccggttaccgttggttacatccagtatttcgaggacgctggtaatctcgtttttttgttgagcggttgcggtcagtgcaacagttgcaaagaaggggattagatagggtttcatgttcatatcgtatttaataaatctccgcaagatacattttttattggaaactacatagtcggagcatgcttttttcagagagaatctgtagtgatggtcgaatgcgtagtgcttatcatatgaatagtctccgggattcttgaaatagttgtccacatactgccagttgtcggtgtcgagcggcgtgtgcgaagtcatgtacgatagggagcttttgtctctactatctcgctgtccagactaatcaggtctttgcccaagcggacaatgcgggcatgtagtcggtgccgacttccctctttccgcctccaccgaatgacaaccatcctgtaccttcgtcatctatcacggcacccgggtcgaaaggagccctgcagtggcctaatccttgggtgaactggctcaccagcatacgtcttaccgtccgattccacccgcgatacgatggatggcgcccatgaggctataccccatggcgagagggcctttacgtcaatcagtccgtgataagtccaatttaccatgtcatcggtggacagcatgaccagtgaatgggatgtattggtatgtgtttttgccgtattttcccacactgtccagttgctgggtgtcattggttccatacacatagagccttccgttgtattccaccgatgtcgggtcggccacaaaaatgaaatccaacagcgggttggcgtttccactgaagaattggggtgattctaccggacgcgtgtctttctttcttgaatcggaaagcgcccacacatcatttcctgcggatatagccgccagcagcaaagccgctgtaaataacttgattctttccatttttttatagtatgttatagaaacctatggtagccttttgattttggcttgtgttcttcaatcacctcaatcctttatttaagattgaaaaatcgggttattgaaaagttgccgcaaatattgggaattactatgtataatataaggtgtattatgtttttaataatgtgcctatatgtttcaagttatcattgtaatcagatggtgctgttttaaactagctttacttgctttgggataattatgcggctatggattaaactgtttggaagggcattgtgttttatgcaaatatattcgtagaagagcgttttttattctaacaattcttgaaaagaaaaagcactgattattccagataatcagtgcttgaatatcgagccgctagccagacttgaactggcgacctacgcgttacgaatgcgttgctctaccaactgagctatagcggcaataagcttttgtttacggggtgcaaaggtacatctttatttgaaaaggcaaaaagaatctctgttttttttagaaatattttagtgggataattttctatttgaatgtcctgaactttattgccataaaaattggataataaaacgaaaagaagcatctttgtcgtaggtcctatagcaaataagtctgatactgattatgaatttaagaatctattataaatatctttcttcacgcatagcgtccaaatggacggtgttgttggtagatgtaattatcgttgtgatttccatgctttctgcatgttttttgcaatataggctttcgtccgtatcttatgaaatttctttgtatgtatggctgaccattttggctgtcttgtgtaatgtctgtttctttcatattctccgtacttatgtgggtgttatccgtttttcctcttttgtggatatttatcgtgtgctttggagtcttacgataagctatgctgtactgtttttagggaattactgttggtctgtttcggggcttggagaaactttgccgaacagcattctgtttatggcatatatgttcaccttctctctgatggcttgtatgcgcattgctgtgaagatgctttatgaagctattgcttttgatgcacgtcattgcgtgaatgtttttatttatggattccatgggactggagtcaatgttgcaaaatccttgagagttagtcgtaataatcattatcgcctgcgtggctttatttcggacgaacctgatatgataggtaaacatacgatgggatgcagggtatatcccaatgatgagcagctgtttgaccgtctaaagaaaaagaaagtggatacaatcattatctctccaagcaaggtgtcggatttggaaaattccggaatgctggataaactgttctctcatgatattcatgtaatgaccgttcctcccttaagcgattgtatggacgatggactgataaaggacattcaaatagaagattggctccgtagagaaccggtgcaagttgacatgcgtaaaattacggcccatatcgaggggcgtagagtaatggttacgggagcggcgggagctgtaggaagggaaatcgttcgccagttggctacactgaatccttatcagttgattctggtagatcaggcagaatccccattgtatgatgtacagttggaattgtctgatcattggaagaatctggaggtccgtgtattggttgcagatgttgctaaccgtacgcgtatggaggctatatttgaagaaacacgtcctcaacttgtttttcattctgctgcgtataagcatgtacaactgatggatgattttgtatcggaggcaattcaaacgaatatatcggggacagtgaatattgcggacctggcggcaaagtatagagtgtcccgtatggttatgatatctgctgctaatgcacgtcatccggagaatgctatggaatatagtaagcgtgtggcggaaatatatgtgcaatcatctgattgcaggttgaaacgcgacacaagggaaactgatatgttcatagtacgtttgggtgaggtgtatccgacgaatactcattgtttgattaccttgtctgaagcttgtatgctcaccctggaagtgggagtcatgggggatgggggagaagtgtacattgtgggagggcctggggatggacttttggattctgtaatcggtgaaaagataaagcgtgaaaaggcatctgttgatgattatgaacatgtgcgggaagaagtgctggccttggtgcaacatagttatactgaaaaaaaggctattttgattggactaatgaaaaaaatagtgccaatttttccgctttcttctacccgatgaaaagacgtgaaagtgacagttttttaatgctttttctgaaacttagaggtggaataaatgtatattataaaaataatatattacctttgtgcccgatttatatttattacaagaactcaaaagattaatcagaatatcttatgcgtagattaataacactattctttttggtatttactttgtcaggggtagcttttgctcagcagatgtcagatgatcaggttgttcagtatgtaaaaagcgctcagcagatgggcaaaaatcaaaagcagattactactgaattaatgcggcggggagtgacaaaggaacaagttgaaagaattcagaaaaagtatgaaaactctaaatctggaagtccgcagagcaatacccaagatgagaagcgttctcgtcaacgtggtgaaatgagtggcgtagtcaaagggctgcgtacaacttcggaaacttattctgccagacaaacggatgttgcaggggattctttacaaatgatggataatcgttccttgtctcaagagaaggaaacagaggatccgacttcgcaaatttatggtcataatatttttactaacgataatttgactttcgaacccaatgtgaatgttgctactcccgagaattatcgtctggggcctggtgacgaggtgattattgatgtgtggggagcttctgaaacaacgattcgacaaacaatctctccggaaggaagtattcttgtgaataatttaggaccggtttatctgagtggcaaaactgtaaaggaagccaataattatttgaaacaagaatttgccagaatatattctggagtaaccggaaatgttccgtctacccaagttaaactgacattaggagaaatacgttctattcaagtaaacgttatgggtgaagttgtggtgcccggaacttataccctctcatcatttgcttccgtatttcatgctttatatcgtgcaggtggtgtgaacccgattggtagtttgcgcagtattaaagtgattcgcaatggaaatacaatagcggatttggatgtttatgatttacttatgaaaggaaaaatgaaggatgacatccgtctgcaggatggtgatgtaattcttgtggatccttaccagtcactggtacagatattaggtaaggtaaaacgtccgatgttttatgaaatgaaacccactgaaaccgtaggtacattattgaagtattcaggtggttttacgggtgatgcttataagaaagcattacgtataatccgtaaaagtggacgtgagcatcaaatttataatgtggatgagatggattattccgtattccgcgtagatgacggtgataagataacggttgattccgttttacagcgttttgagaatcgtgtggaaatccgcggtgctgtatatcgtgaaggtttgtatcagttggacggtacgatgaatacagtgaagcagctgattaagaaagcggaaggacttcgcggagatgcattcttaaaccgtgctataatcgatcgtgaacttgaagacttgtcgcatgaggttatacaagtagatgtgaaaggtttgctgaacgggacggctgcagatattcctttgcagaagaatgacattttatatattccaagtattcatgacttgaaggaagaagctacacttaccattcatggtgaagttgccaatccgggtacatatctttattctgataaaatgacagtagaggatttggtgttgcaggctggtggcttgttggaggcggcggctacaacaaaggttgaagttgcacggcgcatgaaagatccgaagagtacatctttcagtactacagtaggccagaatttctcttttgatttgaaagatggcttattggtgggagaaggaagccaggatttccatcttgagccttttgatgaaatttatgttcgtaagagtccgtcctattttaaacaacagaatgttatggtgggcggagaagtcctttttagcggtaattatgcactatcgaaaaagaatgaacgtttgagtgacttgatagctaaggctggtggagtaactcccgatgcttatataaaaggagcgcgtcttatacgtaggatgaccgaagaagaattccgccgtaaggaagatgctctgcgtatggcgcaagcgggaggcggagattccatatctgtaaaaagattggatttgtccgatacctattctgtaggtataaatctgggagaggccttgaaaaatcctggttcagatgctgatatggtgcttcgcgagggagatgtattatttgttccggagtacgtaagtacagtgaaaatcaacggtgctgtaatgtatccgaatacagttttatataaaaagggtgaaagcttgaaatattacatcaaccaggctggtggctttggtaatgacgccaagaaacgcaaggtctatgtaatatacatgaatggtacagtttctcgtttaagagcaggaaacaagaaagccattgaacctggttgtgaaataattgttccaagtaaagaacagaaaaagaagatgactactgctgaaattctgggaatgggaagtacgacagcttctattgcagcgatgattgcgactatggttaatctctttaagtaatttgaattatgagcgaagaaagaatacaaaacataacttctccacaaccagaggaacaagaaatagatttgatagaactggcccagaaagtatgggctagtcgcaaattggtttttaaggcgtgtggtatcgctgcccttgttggactggttgttgcatttagtattcctaaggagtactctacaagtgtgacgttggctccagagagtggtggcaaatctggtggcggaagtatgggagcccttgcagccatggcgggtatcaatttgggtacttcttctggtgaagatgctttgtcacccgaactttatcctgatattgtaagttctactccttttctgattgaactgttcgatgttaaagtcaaggatcagaaagcaaaagtagacacgactttatatgcttatttgaaagaagaacagcgttctccttggtggagtgcaattttctccgctccttttaaggtgttgggatggacattgtctttgtttaaggatgaaccggaagagggggatgcaaagctggatccttttcgtcttactaaagatgagtctgccattgcagatgctttaagtaaacgtatctctgtttccgtagacaaaaagacaggtgtgacaaccttgtctgttactatgcaggatcctttgatatctgcttcgctgacggataccgtgatgcattgcctgcagaactacatcacagattatcggactaataaggctcgtcatgatttggcatttaccgaaaaactttatggagaagcaaaggccagttatgagtctgcccagaagaaatacgcaaattttgtagatgcaaaccagaatataatattgctgagttatcgcgcagagcaagagcgtttacagaatgaaatgaatttagcctatcaagtatatacacaagtgtctcaacaattgcagatggcaagagctaaggtgcaggagattacaccggtatatacggttgtccagccggctacggtacctttgaagcctgcaaagcccaataaattgatgattttgatcggcttcatgttcttggcaggtgtcggcagtgtgggatggatattatttgtaaaagatttattaaagggatggaaaaagcaaacaatatga

SEQ ID NO: 117 - DNA, 10591 bp, unidentified
  source 1..10591: mol_type = unassigned DNA
atggctttgaacaatgcgtatcttgaaagcgtttatgagaaggttgagaagagaaatcccggcgaaaaggaatttctccaggcagtatatgaggtactggaaagcctcattcctgttgtagaaaagagacctgaccttgttgaggcaggtataatcgacagaatagttgagccagaaagacagatcattttccgtgttccttgggtagatgacaacggcaaggtacaggtaaacagaggtttcagagttcagttcaactctgctataggaccatacaagggcggtatcagacttcacccttcagtatgtgcatcagtaatcaagttcctcggcttcgagcagatcttcaagaacagccttacaggtcttcctatcggcggcggtaagggtggttcagacttcgatcctaagggcaagtctgacggagaagttatgagattctgccagagctttatgacagagctttgcaagcatatcggtgctgacacagacgttccagcaggcgatatcggtactggtgcaagagagatcggctatatgttcggtcagtacaagagaatcagaaacgagttcacaggcgttcttacaggtaagggtctttcatacggcggatcacttgcaagaacagaggctactggttatggtctttgctactacacatctgagatgatcaagtgcatgaagaatgaaacattcgcaggcaagacagttgttatctctggttctggtaacgttgctatctacgctacagagaaggctacagagctgggcggcaaggtagttgcactttctgactctaacggttatgtatacgatccaaacggcatcaacctcgatgttgttaagcagatcaaggaagttgagagaggcagaatcaaggagtatgtaaacagagtacagggtgctgagtaccacgagggctgcagcggcatttggactatcaagtgcgacatcgctctcccatgcgctacacagaacgaggtcaacgaagagtcagctaaggctctcgtagctaacggtgtatttgctgttgctgagggtgctaatatgccttcaactccagaggctatcgctgtattccagaatgcaggcgttctctttggaccagctaaggctgctaacgcaggcggtgttgctacatcagctcttgagatgtcacagaacagcgagagactttcttggacattcgaggaagttgacgctaagctcaagaacatcatgacaaacatcttccacaactcatacaatgcagctaaggagtacggtcttgaaggcaacctcgttgcaggtgctaacatcgcaggtttcctgaaggtcgctgacgctatgaagtggcagggtatcgcttactaatataagcgtataaacaaagctatatacaaaacggacggtttttatgccgtccgtttttttatatcatatatgatgcggcaaaaatagaacatccccctgttagtgtcacactgacagggggatgtttgattataatttattttcaataaactcttttatttcattgtatattttagaaacattaggatcattttcatctacatacgatcttgttttatagttccatatccacaaaacgttatatttaactaaatatccaataccataagcaccattaaaataccatattatttcattaagctcattatcacttgaaataagcttacaatttatcacatctttgttaaagctttttttgcgaacaagcttaaatctatcaatattcttaattattttattgacctcgctttcttttaatggtttgtatctatcgaattcatctaaaatagtagttttatttaatgcattaataaacttatccaatccgtttccgccataccaatgcggacaagtagggtgagataccgcacatatttcagaatcagcaattaaagtttgatctaacttatcaaatgctttttgtgatagaaaaactatcaatctaggctttataatttctacaactgatttaacaacatcatttgcatgttttacatcacaatcattaaaattcaacgattttcctgctgacatttccggtcgctgaaagaaattcataaatgcaaacgctgagaaagcttcactatcagttatattttcagaagttagatctaatgcattaagcagaccttttgcgggatttctaaacatactatgtgcttttgacctgtctttatttaggaatctttctacaacatatcttgtattaaaattatttgtgttatttgctaaatcactcggaataccttcgttgtaccaatcacaaacattgtattcaatattgttcacataatgactttctcccaccagcaaaattctcgcttgcttatagtgtttgccaatgtacggcaacatttcattgtgtttcttatagtgttcaattttttttagttcatcatcataatctttaatggatttccaattattgatctctgccatacctactcctccccatatttcaaaataatgtccctagccactgatacaactctgtccgccacgctttgaggcttgattattttaacaaactgactatactgcatagtccaataaaacagggcgttttcattgacctttagtgatattacgcatttgtcattgctttctgacaacacgttaaagcccttaccaaaccaatcgattatctgcccaataaggaaacgatctatctcaagctctgcattcactgtctccccactgaacatataaatatggtctttcatgtattttgaaaggtcaaagccatggctgttgcctgccgtttttcgtatatccttctgcggcatatctatcaactgtatttccagtattttatcggcccgaaaatttgcgatattatcatatttgtcaacattgcaaataaggtagtacctgccgtttgcggtcactgtgtaatatggattaattatatatttgtcagttttcttcgggtgcagttttttatctgttccatattcgcagtataaaaattctatctgctttttctcctctattgcctgattaagcaactcgacagtataaagcacctgtgcattttctgtatgcccaatagtttcataattcactgaacctttaattctgttttcggcaaatggacttgactgtttttcaattttgctaataagtctctccgtttctctacccgtaacataccttgagaacagcaagccgtcagaaataagctttacctcactcggctccaatgtgtgattataatatatatcggtgataatcacattcacatcatcaacagatttctgcgaaccatttttgcgctctatttctgtatattcaatatcgaacccaaattcgatcaaattcataagatttcgctttacagtttttctgtcacaggtaagttcaaaatcagtttgcaagtattcctgtatatttttctgcgtcagtctatgatcaacgtcagaatgccgttttattacttccagcgtcattataagattattttttacaggctgtcttcccatacttatcatctcctgtcgacgtatttaatgccaaatatgatgcggtattagttactcatctttattatattgtaccgagttgcgtaggacaagtcaatggatatgagatgtttttcagaataaaatcaatgattttgtagacatttacaaatttgcaaatatgtttttggctactattaaaatcacagaaaactatcacagccttttcccatactatcgtatatttctttatgaaattctctaagtttggattaacatttggtgatactgttaatgtatggagattttactttaagttcatttgtaatatcattaattcgcttttgaagttctttattccgctcttgtattttgtctgctgtttttgcaaatccttttaagaaattgattattcttcgcatatttctgttggctgatgatcccatttctatgtaaaaaggaacgttatttctgatcaagcagatcgcatattttgacttttcaaggttgcttccgtcatattcacgctttttaaaccctgcaaaaattttgttatatgcctcttcaatttcccatattctgtcctgatctgacagtgtgtttgctatactctttttgcaagatcggatggtttttttgctgtgtgatatattaaagcccgtgggcttccatatcgaagaaacccatgggatttgttgtgcgttttttacagcgccttttttatatcatgccagacttatgggaatgttcccgtgggtctatttgacctgattttcctttatgataacgccacgctcaaaagcacaagcattctcaagcgttgtgcggcttatggcggctagggcttcttcggtgaaaaagccctgatgagaggtgacgataacgttaggaaaagacagaagccttgcggtcacggagctttctaggatatcctcctgtcggttttcaaagacgttctctgtttcttcctcataaacatcaagacccactccgtggaattttctgcttctgataccttttataaggtcttcggtattcacaagtgcacctcgggaggtatttacgaaaacaacattctctttcataagagagatagtttcagtattgataagatgatagcttgcctctgtcagggggcaatggagcgaaataaggtcgctttctctcaggacttcgctaaggggataatatttcacaaaatcaaggtcggggttctgataaacgtcataagctataacacgcataccaaagccgtggcatatcctgcacattgccgcacctatcctgcctgtgcctattataccagcagtcttgccatggaaatcaagtcccataagaccattcaggctgaaattgttctctcttacctttatatagcccttgtgtattcttcttgttactgcaagcgcaagcgccatggcgtgttctgccacggcttccggagaatacccaggcactctaagcactgttatgccgtatttatcggcggcttttatatcaacattattatagcctgcacatcgcataagaagaagctttacaccatgttcatggagccgtctaagcactgagcctgttatcgttgagcttacaaaggcacacacgccctcacagccctcggcaagccttgctgtgtcttccgtcaagtcggcttcaaggtagacgctttctatatcgggatagttttttcgctgcttttcaaatgaatctatatcatactgctttgcgtcatagaatattattttcatgaaaactcctccaaattttaaagtatttcattttacgcttgtattttttgcagctgtttataaaaatatacggtttttgccttaataagataaaattatcaaaggttgacaattgtgcgtaaataggatataatataggtatcggtatgtaaaaatatactttaaatatactttaaatgcctgttttctacagaaaggatatgatgccaatgtcacaattttcggaacttctcagagaatacataaagaaaaaagatattactataaaagcccttgccgaaaaatgtggtatcgacagaacatatcttcataagatactcaaaggggaaaggaaagtgccaagcgtagattttgtagaaaatataagcttgcagctcatgctttccacagaggataaaagcaggctcatggagctttataacatttctgagatgggggaagatgtctacaatcgccgcaagcaggtgtcaaagataatacacgatatggcaaacaccaacatggaagagcctgacgctctgaatttcaagacagaagttgatattgactctgtgcctgagatatccatctacaccgacaaacgtgagcttagaaaaaacctgcaggtacttatatgcagcgatgttcataatggttctgacattcaggtcatcgctcagccaacagagtttcttaccaatctgctgtccattgccgcagaaggcagcgagtctaccataaatcatctgttcttctttgacaacacctcaggtgaaaaaaacaccgcaaaatacaatctggatatttttccgttcatatgtcaccttgcgcaaaagcatgaaaaatatgaggctttttattattatgagggtgcgtcggcatatttcaactccacgaacatcatgccaaacataatgataacgaataattttctgatcagaacagacagcgattattgcgagggagttatatacagatctaagcctatggtagaattttatatgcggcagtttgaaaagttcaagacaaaatgtgcaaagcttctcgaccacgcagtggatattttggaatatgtttacttttggtacgatgacaacgcaaatttcatcggcgtagattttcagccatgcaccatgctttgtcttacagaggatatatacaacgcccatgcacttttgccagctgacgcaaagaaatttgtaaaagcaaagctcaccatgggcaagaaggctctttctgaacacaaatttgtaaatctgttcagtgaaaaggggcttgcagagtttatgacgacgggagagatttttgagcttccgagaaattcatatacttttcccactcttgcagaacgcaagataatgctacagataatgatatcgctttgtgaaaacggcatggcagactacaggataataaagaacgactattttgcggtgtcgaaaaatctttgtatcaacatttctgacaacacaagtcttaacatcattgccagaaacaactgcttctctgatttttcttatttgaagataagcgaaacgagccttgttcaggctttctgggattattttcagcactttatagattctgacgctgtttgctcgcatgaagaaactatcgagatactcaggtcttatttgtaaaaaatgggcgaccaaaagccgcccattgtaatgatattatttaagctgttcacgcattaaagtgagcagctttttttctcgccttgacacctgcacctgcgacataccaagttgttttgccgtttccatctgagttttattctgaaaatatctcaggtatataagctttctatcctccgcttcaagggaagctatgacctggcggagagagagcctgtcagcaatttctatgtcaggagcatcaacagggatatctatttgtccgtggcggtcgtcttcatctgagctttcagtaagactaacagggggcagggcgacgttcatggctagagtaacggcttcttcgctttctcctgacagctcacaaagctcgcttactgtaggttctctcccctgctgtatggaaaatcgctcacgctctcttacaaggcgcatggaaagctcttttatgctccgtgacacttttatcgtgccaccgtcacggaaaagcctttttatctcccctaatatcactggcactgcataggtggagaatttcacaccacggtcgctgtcaaaggctttcgcagcttttacaagacctatacagcctgcaccgtagagatcgtcatactctatgccacggttgcggaagcggtttgcgcacaggtgaacaagccccagattttcttctgcaagaggggtctcgactatgctgctcattttatactctttctttcaaggttttttcaaggataagggtagttccttctccaagcttgctgcgcaccttcactttatccataaagctttccatgaccgcaaagccaaggcctgctctttcctcctcaggtgcagtggtgaaaagcggctgcatagcctgctcgatatcagcgataccgcagcccttatcccttatttttatgtagacgtgtctgttctcgaatatccttatctgcatgaatatctcccctagggtgtttcggtatccgtggacaatggcgtttgtgactccctccgacactgcggtcttgacatctgcaagctcgtcgatctgagggtcaagctgagtaaggaaaccgctgactgcaactctagcaaagcgctcattttcagaatagctgggaaaactgactttcatttcattaaggggttttcgtttcaattttatcactctcctttgttttgtcatcggggctttcattctgttcctgagctgctttcttctcttgtatatacggggtcatatccgtgactatctttgtgagtctgtgcatacctgcaagctgcaagacctttcggatataagcaggaggcgacgccactatcacctcgccacccatttctgacattatcctgtatctgcccataacaagtccgatgcctgagctatccataaaagtcacctgagaatagtcgaggataagggtaagagggttatggcttctaatggctttatctatctctcccctgaaatatttcgctgtatggtggtcgatatcgccgcatatctctgccacaagagttctggctgacggatagttttttatctccacattcatgctttatcattcctttcattttttcgttttatccgctgaaaatatattatcacttacagtgggatttttttgtcgcattatcgtatgggtgaaaaaagcaggaacacacttttttgtgtgtccctgcctaggaaaattattatgttctatgcttatgtattaaagtccgttaggattattcttaatgaagttccagctatcttctgtcatttcatcaagaccatattgtgcttcccagccaaagaccttctttgcctttgctgtatcagcatagcaggttgcgatgtcgcctgcacgtcttggctttactacatatgggagcttctttccgcaggctttttcaaagctgtgaagaacgtcataaacgcttgagccttttcctgtgccgaggtttacggcttcaacacccttgttttccattacatacttgactgcgcaaaggtgacccttagcaaggtcaacaacgtggatataatctcttacacctgttccgtcaggagtatcgtaatcgtcaccaaacacaccgagcttttcaagctttcctactgctacctgacagatgtaaggaagcagattgtttggtataccgttagggtcttcgccgataagaccgctcttatgtgcgccgatagggttgaagtatctcagaagtgaaactgaccaatcgttgtcggaaacataaacatctctcagtatctgctctatcattacctttgtatagccataagggtttgttgctgatgtaggcatatcctccgtatatggagctttgtttacagggccgtaaactgttgcggaagatgagaaaactatcttcttacagccgtattttctcattgccttgataagcatgagagtgcctgtgatgttgttatggtaatattcaacaggcttctgaacagattcgccaaccgctttaagacctgcaaaatgtataacagcgtctatcttgttttcttcaaatatcttttcgagcgctgcaaggtcaagaagatctgcctcataaaaagcaaagtccttgcctgttatcttctttattctgttaagagcctccggctttgagtttgaaaagttatcaactataactacttcatagcctgcttcaagaagctcaacgcaggtgtggcttccgataaatcctgctccgcctgtaacaagtatttttgccatattctttacctcccaaatatgtcaggttttttcttacacttacattataccatattttcacgtttttgcaataccatttttgtttcaaacacatggatttttgttgcaaagagaataaaaatatgctatcatatctataacagaccatctcgcagaaaggaacacacagaatgaatacagaccgccattcctttaaatcagaccagacggacgcactttcgctgtcagtatacaacgtgggctatgaaaaatgtcaggggcttcacagttggggaagcggcgttcgtgaccattatcttatccaccacatcataaatggcaagggcatatacaaaacaccgcagggagagtatcaccttagcgcaggggacacttttcttatttacccctacactgttataacatacactgcagacaagaacgacccatgggaatactactgggcaggcttcaacggctctgacgctgaatttatccttgatcgtgcaggcttcacaagagagtgtcctgttatctccgcagactttggaagcgagcttaaagacagtcttgaacgcatttatcgtcttagtggaaacagaagctcagaccttgtgaaaatgacaggtcagctttacatcacgctgggcattcttatggaacgctcgggaagtcaaagccgttcggggagcaccgcaaaaggatatgtcacaaaggcgaaaaactacattgcacacaactacacccttgggataggggtcgagaatgccaccgatttcgttggcgtgagccgtgccacgctatatcgggctttcatggaatacgaggggctttctcctgcacagtatataactgatttccgtgtgaacgccgcctgccgtttgctggaagaaactgagcttcctgtgtcggctgtggcaaggtcggtaggatataatgacagcctttatttttcaaggatattccacaagacaaagggtgtgtcacctacggaatacagggctgacgctttgtgtacaaaaggtgaaaacaaggcgttttcggttgacaagggtatataa

SEQ ID NO: 118 - DNA, 17565 bp, unidentified
  source 1..17565: mol_type = unassigned DNA
tcaatccgcatccactacgacaaattcatcatctgcttttaggcgtaagcgatggctgagaaattcttcgatcttgaattcatttcttttgtcatagtctgcggttaatttgaagttcggatgttgcgtgagatcatatttgtccgacaaaaatggtcgcacaccacgcaactgcaagatgcacttgctgccatcgagtaccgcaagttcatccacggaagcaaggtctttaccgagcttttgataattcattccgtaagacggactgttacctcttgtgtttgatgtgttaaacgtatcaatggtttctttcccaagcgcctgattcagctctttcagagtagtaggttcagagccaccaagaaagatacgggaatccatgttgccaatgatggtatccgcattgtccttatagattgctttcagctgagattgtgcctgtaataccagacaagcggaaatttcacgacttcggattgtggcaaccagtttttccagattgggaatctgcccgatattggcagcttcatcaatcagacaacgcacatgaacaggaaggcgaccgccgtacacgtcatctgctttctcacacaacaggttaaaaagttgggtgtaaatcatggagatcaggaaattaaaggtactgtccgtatctgacatgatgagaaatagggcagtctttttatcacccaaagtgtccagctgcaactcatcataggcagttacatcccggacttcctgaatatcaaaaggagccagacgagcgccacaggaaatcaaaatactttttgctgttttgcccgcagccaatttatattttttatactggcggacggcaaaatggtcaggctttttcttttccaatgcttcaaacatcatatccacaggattttgaaactcctcatcgtcctcacgcacctccattgcgttcaagaactcaatcaaagtagagaagttctgctcctccacaggtgcttcatagtggatatatccgatcaacgcacagtagagcagggtttctgcctttgtccaaaactcatccccggcttttccatctccttttgtattggcgatcagtgtagtcaccaatttcaaaatatctttttccgagtggatatacgccatcgggttatagtgcatcgactttttgaagttgatagtattgaaaatcttgatgttgtagttgttcttcaaaagggcattgccacattcgatgacgatactgcctttcgggtctgtaactacatacgaactgtgcatctgaagcaggttcggtttgagccaaaatcttgtcttacctgaaccggaaccgccaacaatcaaaacatttttatttctggcattggcaggatttttcggacggttactcatcatcaatcgttctgtttttgtgagaatcacattgtcctcaaactttggagccataaaaggttcaatatctttggcggttccccaacgtgcagaaccatactcaacattgtggcggtacttttttgcattttttcctcgcagatatactgcaagccgtaaactggcaccgcagacaataccaatgagcaaatcaagtgggtaaaagctcggcagaggattcccgaatgcaacagagagcgtagaaaaaaggctgaggagttttgcagaactgtctgcaccctcagccatacgccatgcttctccgatatttgttgcaatcaatcccacaatgatatatgggatattcagaatcaggagctttttgatttttcttgtatctatcataaatcacgctcctgtttcttttcacgaatcttcttgggcagcgacgccaccagattcttaaatttactgagttgtgccagcacactcggctttttatccttggtcatggtccttgcctgatgctctttgcagattgcatccaaagcatccgaatcctttgcacgaacaaacacaaaatagcggggaggatcaactgttttatcctttcttacagcaaaatccacgccgtattttttggcaagacgttcaaagtctttgatgccttctttttcaatttctgcattggcagccccctggttctgtcctaacagctttttgaccgattgtttgccgtgaacagctggatctctaccttttcgggctttcaccttttcacggtgctgcaaatatttgcggatacccgcaataatcgtccgcactgtcaaccgagaagtgctgattgccaaattgactgttctgttttctacttcttcctgcaattcttatcacctcctcataatgagaattccagcatcaacgaacctgttccttatgctcataatgcaaattgccatttctgacattggcatgactgataattttaatctgacctttttgctgactctccaaagccttctcataaccggtctgggaaagatacagcctggttcgctcgcctttccaacccacaggcgaatcattcgtgagaacatcaaaaataatcatgtgcctggtatcatcggcaaatcgctgcaagtccatataagaatgtccatgatattctttggcacctgcctttattcgcatttcttccattaactctccaactgttttccccggcatctcatacctccttaaagaacatccctgtcaggactgcttttttgcggaatggcttctgatttcagaggggcatccgcagctttcaccttgtcatccggcaagggaagtgccataatactgcgccccatacggacaaacatttccggctgatggaactctttttcaaatttctccattagttgaggagagagggaagcaaagttctcctcacccaaaccgacaaccagaaaatcaccggcgacaatgtcataaatctgcccatcattatcccgtaaagcccggttcagttcgctgccattcagctttccttcgtcattaacgatcaatgccaccggttcattgtagggatagaccgcttctatatcgccgccaacagctttctgcaaatcttccagctcgccgcctatctgaaccgcctggggatacattcccggcttgacgagcaaaacatccagctgttctttctgttcctgcacaatttcacgttcagcttttgccgaaaaatccacaccggtaaaattttcagaatcgaggatatgttcggaattgtaatattcctcctcaacttttgcttgtgcagcttccattgattctgcttttacagttaccgtcttttcgagggtttcggtgattttgatgtcatattctttcaaatacatctacctccgtttctttcggatataacaaaagcgactatccacaagccttacagctcataaatagtcgcttcgttttcccactggggaatacacatttcttccagttcctcggtcagactttccggtgtaaagaacaggtcgtctctgtccttcagcagtttcacaatcgagcgatactccgtagcatagtagaagtcaccggacttgatgaccatgctgacgttgtgtaccagagcaaaactcatatcttccagcagccacagctcccgattataggaagtatcggtcatgtcgtaaatgccgatttccatatccgaataaatcagacaagctctctgcatgaacagttccttgccacggtactcgaatccacggtcgatattggtttttacgacatactcatacggtgtttctgccttatctcgcagagccatacaaacttccggcagacacaaggcagcacagccgacttcttcttcatcatacgcttcatagtcctccggctgaaacagatcaaacagccatttcaaagcatcgctcatttctttttctgtaaacatttatgtgtcctccttatctctccatagatttctcacgttttcgttgccattgttcgagcagtttgataatggtgtcctccatttgctttggggtataagatttggggaaatacttacgaagtacatcatgtttaattgttaccctatctaattcaccctttttttcctcagacatgatcgcacacatggcatccaaactgcattttccttcctggctaaattttttcagacgttgcgcctgggacagagaaggggtggattgtgcatagtccattgcttccagaaagtcttgctgttcctctggtttcagataagaaatttcgaccgcagggttaaaggcgatcttcttttcatctaccatatccaacagctcaggaatgagatttgtgagtcgaatatagcgttttacattgtcactactcattccgctttcttcacctatgatggcggtcgttaacttcggtgcaacttgcaccgaagttaaatcagtgcgcataccctggcgcttcattgcatccaatttcattttgaaagcaaaagctctctcactggggaggagtgtttccctttgcagattggaatctaccatcaaaattgtggctgcatcatcgtccatatcccgtacaatcaccggcatggtgtctttgccagcaagctcagaagcatagtggcggcgatgtccagcgattatctcatatccaccttccggacggggacgggcgattgcaggagtcataacaccaaactgtgcgatactttcgacagttttctgcatagcttcatcatccagcactttgaaggggtgtcccttaaaagggtggagttcagaaagcggaatttcctgcactcgttcctgttgagcttcctctcgtgactggtcggtctggaaaatatcatcgtagctgctcaagctgatgtttccgccttttttcggcattgctcaacacctccttcgtcaatactcgataggcatcagctactttgcctttcggatcatgcttgaaaatactggttccttctgcactgatttcttcagcacgaaccgaacggggaatatctgtcttataaactttgagtttgccaccataattttcccgaatcagattactgatgtctttggagtaattcgtgcggctatctaccattgtcagcagaatgccctcaattcgcagcttcggattgatttggcggcgcaccttattgatagtctgtaaaagctgctccaagcctttcgcagggagatatgccgcctgaactggaatcagtacgttgtctgccgcagccagtgcattaactgtaagcatacccaaagagggcatacagtccagaagaatgaaatcatagttctgttttacggtatccaggtattgcttgagaatagtttctcgactcatagcattaaccaacgatacctccaaaccggataactcaatgttggcaggcatcaagtcaacaccttccggatgatgcagaatgccttcgccaggagcaataggctgctctgaaaggatttttcccatcatatccgataatgttggagaaagctgatcaggaacaggatgaccgaggcaaatagtgagcgatgcttgtggatcagtgtctaccaaaagcacttttttaccttccattgccaaaccaacccccagattctcgcaggtagttgtttttcctgttccgcctttctggttaactactgccatgacagttgcttttgccaaaattcatcaccttacctttcctaattgtttctctcatttctatatcaccacctttcaaattaaaccagaagccatatcatgccgcacatcggcgtcaatttttatatctatcgtgactggagcattatacaaagcagcaagagcatattgtttggggttgcggattttggttgtgttgtccttaaagcagtctagtacatagcgaatgtgctcggaatttaacttcatcaaacgacttcgtacaacctcagctggcttatcatcactggctacccgaattaactttcgtttgctacatacggtttcaaccaatatttccaaaatgctttccaggacttctttatcatagggaaattccctgaaaagatagtccatttcaagttcttcataaaaatactgatagtagctctgaaattcctcatccttttccacatcccttccagaaaaatcggaagataggataggatcagtatcactatactcagtatctttaatatcagtattattaccttgtgcttttgacaactcttgaagtgttttatcgacagttccagaattgtccttttgacaattcaagaattgtctttccacagagttatccacaaagttttttacatagatataattgggcttccccagtccaatacgtttgcgttcgatcaagccacatttgttttccagctcatgcaagagctttactgcttttttctctgcacatccaagtgcgcctttaatttcttcaatcgtgaatatgatgtagacccgaccaagttcatccacccatccgttttttgccgataaattcatacggtcaagcataataccatagagcagttttgcatcagaagatatattcgagaatttttcgtctgtaaacagaactttgggaacccgatagaatgaaaatagctctgcctgctgtccatagaaataatcatacattgctcctcctcaccgcctttttcctgaagaatctttctgtgcttagaggagccattttaagagtgccatccctgatacgataaggacagcgaacaaggatcatcgccagtaatcgcaacttcattttccatcacccctttccgatgacctcacgcaagagctttttcgtacaccacccaatgcaaggctgcgctcgcccataagggcatccgtcacaatcacttttagatttaggtggcgatgaaatccgatagtaacagtttgctttgcccagactgcatccttttcttgtgtttttccagtagtagcagtatcgacagtcgcttggtttatcagcggcatattgtgttttcatgattcaaaatacctcctttcttccagtcgcttcagaagcagtctggaaacaaaaaaagagtgtctattcactccctaaaagggagaaataaacactctatgtaaacgaaaaagtattagattgtatttggtataacggcttaggacacgcaacatccacctttttaattagcaagtttttttgcagcaatttggctccaattagcaggaatgcctttctgattagcaaaaacaggctttttcttgctaatgattagctggaaattttgttttttcaccagagttcgatgtctgtttgtggtgctacaaaaaatttttttaagtaatcacagctctaagattagatgcggtgctcatctgcgactgaaaacaaataaagccgaaaacccttgaaaataaaggctttcggcgttatgagctggcgtccataagaggatttgaacctccgacccctcgcttaggaggcgagtgctctatccagctgagctatatggacgtgtctaatatatgattatagcccgaccaaagtcaaactgcaatcccttattcaattttatccagttgagcgttataacatgaccttaggaggcggacgctctatccggctgagctacgaagacgtgtattaaatttacgattattctaccacattaccatacactttccgatcaaaagtgtgtgttgcaacatattcttaggaggcgaacgctctatccaactgagctattggcacataacataactattgtatatgatggcttgcgatttgtcaagaaattgggaaattttcttattttactgaatattcaaaaaaattaaaaataagtgttgacaaatggagaaacttgtgttagaataaatcttgctgaaatgctgaaaggcaagatgagcatacggagaggtgtccgagtggtttaaggagctagtcttgaaaactagtgatcccgcgagggaccaagggttcgaatcccttcctctccgccattttattttatagtgaatttaaacttcacacggaggattactcaagtggtgaagaggctcccctgctaagggagtaggtcgctaacgcggcgcgagggttcaaatcccttgtcctccgccaagaaaaaagcacttgcttttgcaagtgcttttttcagtgaaataaatccaaaaggatttgtgaaatacctatcggtgtgaaatatggattttccatgtgaagtgcctgacggcgtgaaaggatttattttatttcactttctgcgtaagcagaaaatttcacaatacaatagtattatttcacatacgaagtatatttcacttgttataaattaaaagaggttcgtatggctgaatcaaagcttagagaattatcaattgatttatataaccggtgcggcactattcgcagaatattggttgcatctattaatactgcaaaagaaaatttacaaaaggaaaagattaattcaaaatcaaaacccaatatttccgtataatagcattaccccgattgacaccaaacttaataactggtaatataaggctgtgagaatatttgtattcttgcagcatatttttttaccaaaaggaggatggattaatgggatttttattaggaaagaccgctgttattacaggcggaggaagggctgttctcagcgacggaggttgcggttcaatcggctacggcattgctgttgcttatgcaaaagagggtgcaaaccttgttattacaggcagaaatgtcaaaaagcttgaggatgccaaagaagagctcgaaagactttacggagtaaatgtgttgcctgttcaggctgatgtcagcaaggacggcgataacgaaaaggttgttcggaatgttgttgacagagctgttgaaacattcggcggaattgatgtcttgattaacaacgctcaggcttctgcgtcgggcattacgcttgctgatcatacaacagagcaatttgaccttgctgtttattcgggattgtacgcaaccttctattatatgaaggcttgctatccgtaccttaaaaagtcaaagggaacggttataaactttgcttcgggtgccggacttttcggaaacttcggtcagtgtgcatatgcagccgcaaaagagggaataagaggtcttacaagagttgccgccaacgagtggggcaaggacggaataaatgtcaacattgtctgtccgcttgcatggactgctcagcttgaaaaatttgagcaggcttatcccgacgcattcaaggcgaatgtaaaagtgccgccaatgggacattttggtgatgtcgaaaaagaaatcggccgtgcctgtgttgcacttgcatcacctgatttcaagtatatgagcggcgaaaccatcacccttgagggcggaatgggactcagaccgtaactttatttttaaaaaattcttttgttccgttattcggtaaatcattaaataaaatataaaacatactaatatgagtattgaattttttgttcatatgatgtaatatcaagttacggagtacatacaaaaattactttgaggtgattgtatgggaatttttgatataaagaacacagatattttcagcaaggattatgactctgcaaacgcatggcttgagtataacatttttaatgaatgtacaaaggacgaaaacggagagtcatttgatgagtctgatgaaaataatttttgggattatttaaagaaaaataaataaataataagttacaaacagcgaccgcagagtgatatactttgcggtcgcttttatgtgttgttcacacacaaggacactcggcataatatgagggtgtagagaataacttgatttacgggtgttgtgtatgaaaaagagcgacataagaacatttggcataatcggcggtgacaagcgacagctttttcttgcaaaatcaatttctgacagttgttacgatgttttgctcggcggatttgacagtcttgaaagctacggttcattgagcctttgcaatgttaaaaaggcaatttcggaaagtgacgcattgatttttccgttgccgtcaataaggacagacggaagtcttaacactccgttttcaaacgagaatattttgcttgacggtgacgatattgaaattatccttaaaaagcctgtttttactacgatgaaaagcagatttttaaaggcatatccaaggctttccgacggtgaaatttttgattacggagcaagagatgattttgcaattctcaacgcattgcctacagcagagggtgcaattgaatgtgcaatgagagaatatgagggtacgatttcgggcagtaagtgtcttgtgacgggattcggcagaatcggaaaaattcttgctcacaagcttgttttactcggggcaaatgttaccgtgagtgcaagaaagccgtcagaccttgcatatgtaaaagcactcggctacaatgcacttaatacggaaaatctcagaacggtaaagcggtttgacattgctttcaacacaattccgaggttgatttttgacagggaacttcttatgaataccgacacaaacacccttattatagaccttgcgtccctgccgggaggggttgattttgataccgccgaaaaactcggaatttatgccgttagggcattgtcgctacccggaaaatgtgctccgaaaacggcaggagaaattataaaaactactgtatttgacatcatcaaggaggtttacaggtgacaaaagcaaccataggatttgcaatgtgcggttccttttgcaccttttcaaaggcttttacgcaaatgcagaggcttgttgactcaggctatgatgttattccgataatgtcgcaaaatgccttttcaacatcaactcgtttcggaaaagcggaggaaacggtaaagagggcagaagaaataacgggcaaagctgttctgcactcggttgtgcagacagaaccgataggacctaaaaaaatgtgcgacttgcttgtgattgcaccgtgtacgggcaacacgcttgcaaagctgtcgctcggaattaccgacacggcggtaacaatggcggcaaagtcgcatctgagaattttaagacctgtgctgttgtgcgttgcaacaaatgacgctctcggtgcgtcggcacagaacatcggcagacttctcaacactaaaaatatttacttcgttcctttaaaacaggacgattgcatcaagaaaccaaattcgcttgtggctgattttgataagcttgaagattgcgtaacccttgcgttgcagggaaaacaacatcagccgatttttttataacagaacaacagccgtcttgaaatgcaaattttcaaaacggctgttattttatgtttggattgtctgtgcgacaggtcagataatcaaggcttgtgccgtagcagtcggcaagtttaatgagcagggagaggggaatttctctttcgccccgttcatattttgagtacagcgactggtcgcacataagaacctttgcaatttctttttgcgtaaggtcattgtcctcacgcaaatcttttattctcagtttcattacatcaccgaataaattataaaatagtacatagtagcctattgacttttaggacaaattgtcctaaaatataattgcctgaaaaatgagaaaacaaacggcattgtctttgcggtactcatattcatataatcgtatttatcataaattgtgtattattatttgcacaagtgtccaatgagtcgcaaatacgagttgatgattactttgaaaaatttaattcaccttaaataagagcgttgcttaaataaaaataatattttatctgtatatatattgacaaataccgcaaaatgcagtaaactaatggcataaaatatcataaaaatcccgaagagcatcttcgggacgaatagcttgccgatttaattgtgcgtataattcggtaagtctttgttgtcagtcagccccaaaatatagtcggtgctggtgtgataatgttttgcgaggcaaatcaaaacaacggtggggatatcacgctgaccaagttcataattgctgtaaacctgttgtgaacaatgcagaattttgctaacttctttttgcgtgaggtcggcatcttccctcagttccctgattcttttatacacagaattcacctcgcatacagtatagcataccgcagattgttgtattgcaatataccgcaaaatgcagtaaaacagcaatggtattttgggttaatttttaaataattattcagaggggaatggtgtttaaaacaaaaatattaatcttgcatatcagataaaacaataaaatgatggaggaaattatgagaaaacattcaaaatttattacgattttgctgtctgctttgttggcggtatgtcttgtgcagacagtatttgttcaggcatttgcaaccgaaaactcagcaacacctgacgaacctacagaggatttgtatcctgtttcaatggaagttgttaaagaacccgaaagcgttactgttaataaaggtcaaattaccgatagcactttctggagcaatgttgtgttgcacattgtttacagcgatggcagggaatttgatgtgaactgtgacggcattaacagcgagggcggtattgttccgcccattgcagaaattgacggctataagggaaaaatatactatggtacaaattctgaaaatgaggatacaatcagtttttatatagcatatgattatgccgaagatgatggagtgacatgtatagtttcagcggatttttctgccgagaaaaaggtagatccacatactattgtcagatatgaattaacaaagcttcctgatatggtattcacaaagcccctttacacaggcagtcgtgatgatatttcgtctggggaggaatggaatgagtggatgaaatctcttgatgtcaacaattctatttctaatcatattgacggtatggaaattacatactattatgcaaacggcgaaaaacgcagtgtggtagttaatagttcaaatctcaagagtattgcttttatgccgtggtttgcaatgtatagagtagagaattacggtgaatttgtcgatgaatacggaaactatttattgtttcaggtagacgatttaggtgattacaaattttcggtatctttgggttcttctgatactgaaatgatttacacagcaaaatcggtagataatcctaacccgtcaattaagcctgtaagcacagaggacactcctgcaaagccgagcgataacatttcatccgcaacaagtgatgttgcaacaaatgacaatgcaaacactaacaacagcacaaacggcacagccaacaacggtgttgttgcaacaggcaactttgcaactcctgcaattatcacagtagttatgctttcggcagttgcagttatgtttgtatttaaaagaaaaagaatgttttaattttgtgtgattgtgtgaattaattttattgccatacaatttttcaaagcacctggcattaatttgtcgggtgctttttgtatgatgaatgatgcggttcgccgctacagaatggcattatctttgcggtatttatataatcgtatttatcataaattctgtgccgttactcgcgggcgcccaatggtgtgcagtgtagtaacatagtatacaacagtgcaaagacatagtatacagttttatgataaaataaatggcaagaaaatagcaaatgaaggagctgtttttatgccgtgggagtgtaaaactgtggaaaaacaaagattagaatttgttacaaaagcattagaaacaaataattttagtgctctatgtcgggaatatgaaatcacacgcaaaaccggtcgcaagtgggttgatagatttaaacagggactgcccttaactgatatgtcacgcagaccattatgttctcctaacaaaacgcctgacgacattgaagaattaatcgtttctgttcgtttcgataacccgggttggggtgatgataaaattaaaatttttcttgaaaatcaagggtataaaaacattccttgtccaagaaccattactaacattcttcataaacaccaactcatatctgaagatgaatctctcaaaagaaagccttttaaacgctttcagaaagaacattgcaatgatatgtggcaaactgatttcaagggagagtttttaactgccgataatcgttattgctatccattaactattctcgatgacagctcacgatactcaatcaaaatagcatgctttcctaacactaaaaatgtcgttattaacgcttttaagcaagctttttatgagtttggtatgccatcaagcgtactttctgacaatggttctcagtttgcaggttttaaacatggatttactatgtttgaaaaattccttatgaacaatgacattcttcccatacattgcagaattaaacatccgcaaacacaaagaaaaattgaacggtttcatggcagtatgaaaagagaacttttaaatcataatctattcaagaacttggattacgctgacaaggctctgcaagagtggcgaactaagtataattgcctgcgacctcatgaagcacttgggaacaaatgtcctgccgatgtctatactcacagcgaaaggatttttgctgacaaggtggagccgtttgaatatgaacccggctttaaagtcataaaagtaaattcgtggggatatgtccgttttcagaattttcaattatatcttagtgaaactttcatcaatgattatgttcaattcagacctaatccaaacaatgattcatttcttgtttgctatcgcaattttgttattgctgagtatgactcgtcatccggcaagcgtattcaccgcaagatttcaagattgtgaatttgtataccatgtccttgcacaggtggttaccatgttgcacttgacaaatgggacgcccctacagaatggtattatttttgttccttttataaggtttgtattaccgtaatgtttgcacttttactttttggcggtcacagaccgttgctacaaaattaaatttataacaaaactgcacaaaaatttatggataaagacagtgtggggtattgctcatgctgtctttttgtgttaaaattgtagataacaaaatgaaataacgaaggatttgtctatgaaatattgttcaaaatgcaagcgactgcataatgatgaagaaacagtctgcaaaaactgcaaggctcagcttaaaacaataaccgatgaaaacactcccgtgtatctgctcacggcatcgggctttgaattgcagagagttaaagccgcacttgaggacagcaccgttccgtgtgacgctacaatcaaaaaatgtatggaaaataaatacagtaaaagcattaaggcatacacaggctatgatgatttgacctatgatgtctatgttccgtattcggcttatgaaaaggcattcgacacctgtgtcggaatcggcgcaatcaagcttgagggcgaagaaattcttgacgaagatgttgaatacaaagaaaatgacggtgaaacgcttgacgagcagtttgagaaaatgacgggtgcaaagcgtacaaccgtaagaattgtcagcgcattactgcttttgcttatagttgcaggcgttgtgttcggaacagatgcaataatgaactttattaaagaatttttcggataattcggtatccgattttgagttaatatttagttaaaatgaatgaaattacggaggattttttacaatgaaacaggaaacaaagtgtttgcattccggctatgtgcctaagaacggagaaccaagacagatgcccatttatcaaagcaccacctttaagtatgattcaagtgacgcaatgggcagactttttgaccttgaggacagcggatatttttatacccgtctgcagaacccgtcaaatgatatgactgccgcaaaaattgccgaccttgagggcggtgttgccgcaatgctcacatcaagcggtcaggcggctaacttctttgcacttttcaacatctgcgaaacaggcagtcacattgttgcatcatctgcaatctacggcggtacatataatctgctcggtgttacaatgaagaaaatgggcattgatgttacttttgtcgatcagaatcttcccgaagaagagcttgcaaaggcattcagaccaaacacaagggcaatgttcggtgaaacaataaccaacccgaccgtgtctgttcttgacattgaaaagtttgcaagacttgctcactcacacggtgttccgcttattgttgacaacacttttgcaacccctgtcaactgtcagccgattaagtggggtgctgacattgttactcactcaaccacaaaatatatggatggtcacgctgtttctgtcggcggtgcaattgttgacagcggcaactttgactggctgaaatatgccgacaaatatccgggacttacaactcccgatgattcatatcacggcattgtctatgccgaaaaattcggcaagctcggctacattacaaaggcaacttctcagcttatgcgtgacctcggttcaatccagtcaccgcagaacgctttttatcttatgaacggtcttgaaagtcttcatgtgagaatggaaagacattgcaaaaatgctcttgaaattgcaaaattcctcaaagccaatgacaaggttgcatggattgattatcccgaccttgaagatgacaaatatcacgcacttgctgaaaagtatcttccgaacggctcatgcggtgttattgcttttgcggttaagggaggcagagattgtgcggttaaatttatggacagcttaaagctctgcggcattgctactcatgttgcagatgcaaagagctgtattcttcatcccgcaagccacacccaccgtcagttgaccgatgaacagcttgttgaggcaggcattgcgcccgaccttatcagactttcggtaggtcttgaaaatgttgatgatcttattgccgacatcagtcaggctcttgataagatttgattttctttaaaagaaattatatataaaattgcaaaataaaattacggagggttgaatatgtcagcttttgtatctgcggttattgttgcggcaggcggttctgtgagaatgggaattgccgacagcaagcagtttattccgcttttgtcacgacctgcaattgaatacaccctgaaagcattccaaaaatgccaccttgtcaaagaaattgtaattgtctgccgtgaacaggataacgacagaatcaataaaattatcgagcttaacggtttcagcaaggtttcaaaacttgtcaagggcggtgacagccgtgccgacagcgtgcgtaacggaatcggtgcgtgcagtgaaaacgccaaatactatgctattcatgacggtgcaagaccgcttattaccgttgaagaaattgagcgtgttgttgaggcggcttttgatacgggtgcggcaactctcggaacttccgtaaaagatacaatcaaggttgttgacggtttcaataatatagaaagcactcctatccgttcacagctccgtgcagttcagactccgcaggtttttgagcgtgatttgtaccgctttgctcttgaaaatgccggcgataatctcatcaactttacagacgattgttcgctgattgaaaacatgggcggcgaggttcttgttgtaaagggcaatgaggaaaatattaaactgacaaccccgattgatattgtgattgccgagagtattctcaagtcaagacaacagggttga

SEQ ID NO: 119 - DNA, 5383 bp, unidentified
  source 1..5383: mol_type = unassigned DNA
atgaaaaaaatccccttaaaaagaatatttgcagcggcagcattagtgtgctgtcttaccgtgacaacagcttatgcagatgtcacgcaggaagatattgacaatgcaaaaaatcagatcaacaatctgaaaaaccagcagaaagatgcacaggatgcggtcgatgatatcaatggaaaaaaaggccagctagagagcgacctgaacaatttaaatggacagatgaccaacattgtttcgtccatgaatgcccttgagtcacagatcaatgataagaaaaaagaactgtcagatcttgaggatgagatcgatcagacgcaggataatctggaagctgcaaagcagcagtcagccagccagtatgaggatatgaagatacgtatccgctatatgtatgaaaatggaaatacaccgatgcttgagatgctgttatcggcatcatccttttctgattttctgaaccggacggagtatatttcggagatcaattcgtatgacagacagaaattagaggagtttatccaggtgcaggaacagattgcggcagaggaagcttctcttgaagaacagaagaaagatctcgagagtgagcagcaggaactgctcgccatgcaggatgacatgaaggtaaaacagaattctgtaaacagccttatcagttcaacgcaggcaaatatcagccagaccaattctgaattgagcagcgcgcagggaaaagtcaatgatatcaacagtcagatcgcacggatggaagaactggaaaaacagttagagatccagaaagcaaaagaagacgctgcgagaatggcggagatcaagcgtcaggaggctgaaaacaacggcgaattttcttatgtcccaagtgacagtgatctttacctgttaggagcgatcatccagtgtgaggcagacggtgaaccatatgagggaaagcttgcagtcggaagtgttgtcatgaaccgtgtgcgaagctcttatttcccgaataccgtatccggtgtgatttatcagagcggacagttttctccggtagccagtggacgatatgcgctccgcctcgagcagggagtcaataatacctgtatgcaggcggcacaggaggtgcttaacgggaacatcacaaacagctgcctctatttcagaactgtgatcgacggattggaaggaacgatcatcggacaccacatattctactaatacggctgtcaattgcgcaaattacataaaaatcatttttgaaaccaaatggaaaaagagacgtttttgtgagaaatatacaaaaaacgtctcttttttgtggaattgagcggttgcgcatgataattttttaacgaaaaacagtatataaaataggtaaaaaccaaatttaaattctgaaaaaaatgtgaaaaaaaaagaaagctattgcatttgaaaataaaatatggtagcatgagaaagtactgaaaagccaataaaaaagccgaatacataaaaacgtagaaaattaggaaaaagaaaatttaaatttaaaagaagagattttagatttattttttttgctaaaagattgttaaaaaaataacgacgtttttcggcagatttattatgaaggaaacaaaatatactgcatattatgagcggtgttttgtaccacaaaaccgaagggagaattcaaaatggcaagaaaagtagttttagcaggcgcatgccgtacagcaattggtaaaatgggtggagcattaagcaatactccagcagcagacttaggtgcaatcgttatcaaagaggcattaagaagagcaggtgttaaaccagagatggttgacgaagttaaaatgggttgtgtaatccaggcagctcagggacagaacgttgcacgtcaggcttctatcaaagcaggactcccaatcgaagttccagcaatcacgatcaacgttgtatgtggttctggtttgaaatgtgtcaatgatgcagctaccatgatcatggcaggagaagctgatatcgttgttgcaggtggtatggaaaatatgtcaatggcaccatatgctatgacaaaagctcgtttcggatatcgtatgaacaatgcaacgatcatcgatacaatggttaacgatgcattgacagatgcattcaatcattatcatatgatgatcacagcagagaacgtatgtgataaatatggaatcacaagagaagaattagacgagttctcagcaaacagccagcagaaatgtgaaaaagcgatcgctgaaggcaaatttgcagatgagatcgttccggttccggttaaagtgaaaaaagagatcgtagatttcgtgacagatgaaggacctcgtgcaggtacaacagcagagtctttagcaaaattaaaatgctgctctggtaaagagggtggacttgttacagcaggtaacgcttccggtattaatgatggtgcagcagcaatcgttgttatgagcgaagagaaagcaaaagaacttggtgttacaccaatggctacatgggtagccggagcacttggcggtgttgaaccagagatcatgggtgttggacctgttgcttccactaagaaagtattagctaagacaggacttacaattgatgatatggatctgatcgaagcaaacgaagctttcgcagctcagtctatcgcagttgcaagagatttacatttcgatatgtccaaagttaacgttaatggtggtgcgatcgcacttggacatccagtaggagcttccggatgccgtatccttgtaacattattgcatgagatgcagaagagagattcccacagaggtcttgctacattatgtatcggtggcggaatgggatgctctacaatcgttgagagataattaatcagacaaaactgtccggaaagcgggtaactgcttttccgggcgtttccattacatattaaaaattcagaatgaattcaggaggtactaacatgaaagttggtgttattggtgcaggaaccatgggacagggtattgcaaaagcatttgctcaggtagaaggatatgaggtagctctctgcgatattaagcaggaatgggctgacggcggaaaagccaaaatccagaaaggttatgcaagacttgtagaaaaaggaaaaatgacacaggaagctgttgatgctatccttgctaaaatcactccaggattaaaagaagacctttgcgcagactgcgatctgatcgtagaagcagcattcgaagatatgggagtaaagaaaacaacattccaggaattagataagatcgcaaaaccagagtgtatctttgcttcaaatacatccagcctttccatcacagagatcggaaatggtcttacacgtccaatggttggtatgcatttcttcaaccctgcagaccgtatgaaattaatcgaagttatcgctggtgtaaatacaccggatgagactgttgaagctattaagaaaatctctgttgagatcggaaaaacacctgtacaggtaaatgaagcagcaggattcgttgtaaaccgtattttaattccaatgatcaacgaagcagcattcatcaaaatggaaggtgtatctgatatcgcaggtatcgatgcagctatgaaacttggcgcaaaccatccaatgggaccattagagttaggagatttcatcggtcttgatatctgccttgctattatggatgttctttacaaagagactggtgacagcaaataccgtgcatgcccattgatccgcaaaatggttcgtggtggtaaccttggtgctaagagcggaaaaggattctatgtatacaatgctgaccgcacaaaaacaccagttgacgctcagtaattaacagatattaaggtttaggaggatttgaaatcatggatttcactttagacaagaaacatgaaatggcgcgttctctgttcagagaattcgctgaaaacgaagtaaaacctcttgcacaggaaactgatgagacagaacagttcccggcagagacagttaagaaaatggcaaaatatggattcatgggaatcccggtaccaaaggagtacggcggacagggatgtgatccattaacatatgttatgtgtgtagaagagttatcaaaagtttgcgctacaacaggtgttgttgtttccgcacatacttctctctgcattgatccaattatgacttacggtacagaagaacagaaacagaaatatgtcagaccacttgctacaggcgagaaacttggtgctttcgcattgacagaaccaggtgctggtacagatgctcagggtgctcagacaaaagctgttttagacggtgacgaatgggtattaaacggatcaaaatgcttcattaccaatggtaaagttgcagatgtttatattgtaatcgctatcacaagcattacagaggacaagagaggaagaaagaaaaagaacttctccgcatttatcgtagaaaaaggtgctccaggattctccttcggaacaaaagagaagaagatgggtatccgtggatcttctacctatgagttaatttttgaagactgcagaattccaaaggatgcgttacttggacctgaaggaaaaggattcccaatcgctatgcatacattagatggtggacgtattggtatcgcttcccaggcacttggtattgcagaaggtgcattagagcgcgcaatcgcttatacaaaagaaagaaaacagtttggtcgttctatcgcacagcagcagaatacacagttcaagttagctgatatggcaacaagaattgaagccgctcagatgttagtttataaagcagcaatggcaaaagcaaaccagaaagtttactctgtagaagctgcaaaagcaaaattattcgcagcagagacagcaatggctgttacaacagaagttgttcagttattcggtggatatggatacatcagagagtacgatgtagagcgtatgatgcgtgatgctaagatcacagagatctatgagggaacaagcgaagtacagcgcatggttatctcaggtgcattgcttaaatagacgtgatctagcggattgaaaatggatggaagaaatatagaatcacgcttgcgagaatgaaatatttctgacagacatttgagagcgcaacgcgcacgagaaacacgaagtgtttcgagtaatccgcgattaatgaaaatataataacataaggagtggaaaatacatgaatatcgtagtatgtattaaacaggttcctgatacaaagggtggagtaaaattcaatccagatggaacacttgatagagcagcaatgcttgctatcatgaacccagatgacaaagcaggtcttgaagcagcattaagaatcaaagatgagacaggagcaaaagttacagttcttaccatgggacttccaaaggctgatgcagttcttcgtgaagca

SEQ ID NO: 120 - DNA, 9667 bp, unidentified
  source 1..9667: mol_type = unassigned DNA
atgtgtggaattattggatttacaggtaaattaaaagcccaggatgtcttattgacaggacttgcaagccttgagtaccgtggatatgacagtgcgggaattgcgtactttaaagataccggaaaaatttcacttcggaaaactgtcggaaaagtaaaagatcttcgtgccatctgcgatgatgataacaattctacgtgtggaatcggccacacccgctgggcaacccatggtggcgttaccaatgccaatgcacaccctcataaggtcggacaggttgcattgatccacaatggtatcatcgagaactatcatgatctcgccaccaaatacgatctgacggatgaactgatttccgagacggataccgaagttgccgccgcattgatcaataaactctacgaaggagatccaaaagaagctctgcgcaaagcagtagccgaaattgaaggttcctttgccttctgcgttctgttcaaggatcatccaggtgaaatttatgcggtaagaaatgtcagccctatggttgcaacatactgtaatgacggtgcttttattgcatccgatctgactgcttttatcgcatacaacaagcgttatttcatcgtgccggaatatcatattttaactatgactgcggacggcattacgttagaagatttagacggtcattccgtagaaccggaatatatggaagtaaactgggatgttaccgcagcccagaaagatggttatccgcatttcatgatcaaagaaattcatgaacagccggctgccatcacaagaaccattaccccacgtatcaaagatatgctcccggatttttcggaagatgccattgcggattccttctttgaaaatgtaagcgacattacaatcgttgcctgtggtactgcaatgtacgcgggaatggtaggaaaaaccatgatccagaaccgcctgcatattccggttaccgtggcaatcgcatcggagttccgctatgaagaaccggtaatcaatgaaaaatccatggtgatcgttgtatcccagtccggagaaaccattgatactttggaagctcttcgccttgcaaataaatatacaaagaaaacactgtctattgtaaatgtaaaaggctccagcattgcacgtgaaagcagctatgtattatatacacatgccggtccggaaatcgctgttgcaagtacaaaagcatacaccgttcaggttgcttctttttacctgcttgcatgcaaacttgccatgaaacagcaaaagatttctgtcgaagaagcacgtacatttattggaacactgcaggaaattccaaattacatcgaggaagttcttgcacaggctcctgatattgaacagctgaccaaacgcatgatcaatgccaacaacgcgttctttatcggccgtggactcgattataccctttgcatggaaggtgctttgaaattaaaggaaatttcttatattcatgccgaagcctatgctgccggtgaattaaaacacggaaccattgctctggtcagtgaaggggttcctgtcattgccgctgctacccagaaacatgtatacagcaaagttatttccaatatccgggaagtaaaagcccgtggtgcttatgtcattcttttgtccaaagacaaagaaatcacagatccttctatctgtgatgtacacatcaatcttccggatgtatccgacgaatttacgatttttgaatctgttgtaattttccagctgattgcatattacacatccgttggaaaaggcttaaatccggatcagccacgtaacctggcaaaatctgtaacggtagaataaaaaaactgtcgcgcgaaaattcgtgcgacagtttttttgacatagagcctttctaaaacttttgaaggcaaaaaaagaaccccagaagctctctaaaagcctctgaggttgcccctgccaaggattctctcacccatgtaccggaatccttgtatcgtcggcgcgacaggatttgaacctgcgacctctgcgtcccgaacgcagcgctctaccaagctgagccacgcgccgtttcaactgcccaattatagtaacacattctccggtgtttgtctagtgaatttttttaatttatggtacaatacaaaaaaagaatggagaagaacaatgaaacatactgctttgattacaggtgcatcccgtggaatcggtgcagccctggcatgtcgatttgccgccgaaggctatcatctggctctttgctgccataactcttatgaaacgctgcaggcacttgccacaaaacttgaaacaacctactccatacaggtgctttgcttccgtggtgatgtaggagactatacttttatctgtgacatggtgcaaaaaacactggataccttcggccagattgatgtgttaatcaacaatgccggcatctcttatatcggtctgctcaccgacatggatattaccgactggaaccggattattgcgacaaacctcacatccgtcttttccacctgcagacaggtcatcccctccatggttcatgccaaatccggacatatcatcaatatttcttctgtatggggaaatgtcggagcttcctgcgaagttgcctattctgcatgcaaaggcgggatcaattcccttacacgcgctttgggcaaagaacttgcccctagcaatatccaggtaaatgccatcgcctgtggggtaatcgatacggatatgaaccgttgtttctccgaggaagaacgctctgcactcatcgaagaaattcctgccggccgtatgggatccccggaagaagttgcttcactggcatattctcttgccacagcaagcagttacctgaatggacagattctcaccttagacggtggatggatttaatttcttatctctttggaaatctttttccatttatttaagaattaaaacgcaatacgcgttttctctgttttttatatcaactttctataaaatcatttgtatgaaaacgaatgataaaaataaatacaaagattttggtgaccgtctgagtctgattatgtataaacaaaatatttccaatatccagctggcaaatgcaatgtttgtttcgccgtccacgatcagcggataccgtaccggtcgtcgttctccgaccgttgcggatcttgcagccatcgtgcagattctgaatgtttctgcagattacctcatcggaaccagtgaaattacaaccagacccgataccaccgaaaaaaagagttgagcacgccctgtttccagagcggtgctcaactcttttttataaatcatgttctgccagtaaaattaccgtagaacgttccggaacacgcacacgtgtctgatctccctgtgtctgggcttcaaaatctgccccatcctggtattcacagaaagtatttactacaagtttccaatgataagactccggcaacgaaggcaggcgcatctccaaaggctcccaatacgcattcattccgtaaaagatcatatcatcatccgtatcatcggcatttcttcccgcatacatgattccaattaaatgtgtattatagtccgtataattccggttcggctctccgttatggatacttacggaaggtaacccgcagactgccggctttgtatcccttcgcagaatcggatgctttgcacggaaatggatcataaaacgggcaaaatcatgaatctcctgaaattcttccagtctgttccagtccagccaggaaataatattatcctggcagtatgcgttgttatttccatactgcgtattacaaaattcatcccctgcaaaaaacatagccggtccacggctgcataacaacgcggcaaatgcattcttcacgagtctgcgtcgcaggctcataaccgccggatcatccgtctcaccttccaccccgcagttccagctcaggccgttgttatccccgtccgtattgttccatccgtttttctcattatgcttttcattatatgaatacagatcatacaacgtgaacccatcatgacaggtcagaaaattgacggatgcactatatccgcggcttgccggatcatacatgtcggaggatccggtgatacgtgtaattgcacgccctgcgacgccactgtcgccctttaaaaagcttctcatatcatcacggtatcttccgttccattcggcccagcggttccatgacggaaaacttccaacctgatacaagccacccgcatcccaggcttctgcgatcagcttcatatcccccagaatagagtcaaatgcaagggcttccagaatcggcggattctccatcggtgcaccattctgatctcttcccagaatcgatgccagatcaaaccggaatccatccacacggtactctactgcccagtgccgcagacaatccgtaataaacctccgaaccaccggatggttgcagtttaagacattgccacagccgctgaaattataataatatccatccggtgtaagcatataataaatattgttatcaatccccttaaagcaaaaacatggaccgtcttcatttccctctgccgtatggttgaataccacatcaagaatgacttcaattccattttctttcagttcgcggatcagacgctttaattcatcaccctcatgattatgctcctgatgaaatgcataacttgtattcggggcaaaaaaggaaaccgtattatagccccagtaattgtacaactgcacgccatccaccacacgggcactttccatttcatcaaattcaaaaatcggcatgagttctaccgcattgattcccagatctttcaaatacggaattttctgtcgcagaccttcaaatgttcccccaccttttacaccggaggacgcatctttggtaaatcccctgacatgcatctcatagatcaccagatcttcaaatttgtaattcagattccgataccgcccccagtcaaaatcactttgcaccacacgggctttatagacaaaatcctttccgccttccggtttttctccccagtttctctgaccggtaacagctttcgcatatggatcaagaagcgtatgttttctgttaaacagtaaccctctcgcctgatcggcaggaccgtccatctgataggcatactcaaaatcctctgcttttaagccaaaaacaaggatagaatacgtatttccaattttataactttccggaatgcggattcttgcatacggttcctgtgccgccggccggaataacagcaggacacagctcgtagctccatgggagcttacggtaaaacttaccccttcctctgtctgatatgcaccattcatctgataaaatcccggacgtacatcaaatccaccgatattatcgagtggatgaatgacttccccgagactttccatttcttcgtctatcggccagcttttctgttttgacggataattccaaaaacttgcattcatgtgctgattcctcttatcattattatttacttgccacataaaattatattatccccctactcttccctgatgattaccctgccatttgcgtcaaatccgattttactgtacttttccgaatactcattcatatgatcaataatcgtctgttttctgtcgccttttgctatggcaggctgaaaattatttctttctgatgtggaagaaatgctgcatggtatcatatcggctgatatatctgtctgcagtaccccatccacaaaggtaaaggtctgttcatagatcgccgtatctttgtcttttggattcctgttccccccaaagcagaaatttccaagactgtagcagatcatttttccgttgtataattccattccctgcaatacatgaggatgtgtaccgaccagcagatctgctccccagtcaatcacctggtgtgccagcttctgctgataatcattcggataatgatccccctctatcccccagtggcaacaggcaattaccagatccgctccttcttcccgaagttctgcaatcccatcccggatataattggcatgtgtttcatcagcggacagctggcttgcggagacaattccgattttgataccatccttcgtggtataggtatccacatgatcattgaatccgaagataatccctgctttatttaacacttctctggtatcatcaagtccctgctgcccataatcaaacgtatgattatttcccagacttgccccctccacagaactgtctgtcataataccaacatactccggttttccttttaagttccacgttttttccacacgctcggtcgcatttgacaacacacattccagattgatcagtgtaaaatcatcctgctcaaaaatacttctgatatttttaaaaaaataatcctgcccgtatttatcatagtattcatgaaaggaacctgcatacccatgcgtctgtgttgccccaagcgtacagtcacctgtcgccgtaatttttaccgtctgtatcaccggttcctgctgcgtttcagttgcagtcccggtttccgtttcttccagcgtacccggttcttccgtcatctgtgtctccgtgattttttccgtagaagagggcaaagccgatgacgttgctgcaggagaagaacatcccgtcagcaaaaatcctgccattaggattggcaatatccattttttcatacgttttcagactcctctttcacaagaatatccaccgtgtgaccgcttgcacccataagatccatccgttcacaggttgccagatgatactgcagaaacgcatcaaactcttcttccgtcagcgcatttaaaaacggacgcatataatttgctgcaccgtctgccgctatgatctgccggcgcctgacctctacctgccggtccaatgcttcaatatcttccagacgaaccatggaatacagaggattggcttttgaagtacagtgataatcctctgtgagcattccctcctgaagcgcctccagaatatgtttttccttaaacgcatacgtgataacggaaaattcattcataatatacgccacgagaatcctgcctccgggtctggtcaccctcaccgcctcccgcagcgcagcaagcttgtccttttcctcatgcaggtgatacatcggcccaaacaacagggttacgtcaaaggaatcatcggaaaattttttcagattcattgcatttccctgatatgcatgcactcctgcacccttctgtttcaggcgtcccagattatgctttaccagttccacggccgtcacatcgaacccttcctgtgccagcggtacgctgtatcgtccggttcccgccccgatatcaaggatatggattttctcttttgcacgttctttcacaatttcatccagacactgatggatataatgcatgcttgtcacaaattccaccctgccgtgtcggctgtccagacgcttctcttcattaaatttattataataggcttctaagtctgtcatattttaatactaacacattttctttaaaatttcactcacaatcgctgatgcgacatccgctttgctcattatttccagttccctgcagtcatctgccgtaatcagcgtcaccacattggtatctgtaccaaatccggctccggctaccttcaggttattcgccacaatcatatctgcattcttttttgcaagttttgcacgggaattctccagcatatgttccgtctccatggaaaatccacacagaaactgtcccggttttttgtgcgcgcccagatacgaaaggatatcttccgtgcgttccatcgtaagagtggcatccccgtcttttttcttgactttttcatcgaccgggtgatccggacgataatccgccacagctgccgctttgataataatatcctgttgctctgctgtctcctttacggctgctgccatatccgcggcagatacaaccggaacgacctttacaaacggcggcggagtgattgccaccggtcccgtgatcagcgtcacttccgcgccacggcgcatacagttttccgcaattgcatagcccatttttccggtagagtgattcgtaatataacgcaccggatcaatcttctcctgtgtcggtcctgctgtgaccatcactttctttccgaccatgtccttttcgcaggcaagatctttcataatataagaaaacagtgtttccggttccggcattttcccggctccggtatccccgcaggcaagataaccactcgccggatcaatgatatgaaacccataatgctccagctttttgatgttatcctgtacgatcggattttcaaacatattggtattcatggcaggggaaacatacttcgggcattttgccgcaagaatcgttgttgtcagcatatcatctgcgattccgtttgccatcttgccgatcacattagcagaagccggtgctaccataaaaatatctgcacgctttgccagtgccacatgctcgacattgaactggaaattccggtcaaacgtatcgaccagacacttgttgcttgtgagcgtctcaaacgtgataggattaataaaattggttgcattttccgtcatgatcacatgcacatccgcatgctgcttgacgagcgcacttgccagataggcgattttataggcagcgatacttccggtcacaccgagtaccacacattttccttttaacattgtctcttactcctttgcagaaaaaatcacatcttctgctattttatcacactttttccctaaaacaatttaatttttgtcatctgttccagtatggaatctttgacagaatcgttcagatatgctggatttaattttctttttgcatatgcaaggtaagaaccatttgtctcttcaatcaaaactgccgtaaaaaaccgctcccagctaaaatatgttttgctttccacatattcccacggcttttccagcacctgatctgcccatttgctttttactacttttgcctttaatatcagccattcaaatgactccggcaaataaagcaccacttgatcttttccacccatcaactgcatcactctgtcaatttcagaaccaaatgccgcaccgtctgcaattacaagtatgcgttcatttttatgcatatttaaataatggaaaacatttgactttccattcattgtctcacatttcaattgctgttgcctacatacagaattaaaaaactgataaccggaattactgtcttccgttattacaacctctggtttaatatccttctttaaagtctgtgctccatatattctgtaaaactcatgataacacggttttaatgttccgtattttcctgaagtacgaattccatagatttcctccacactatacggcaaagaaggcaaggattccctggaaacaatgacataataattatctgttttctgaatagtatctgcgaattctactgtcttgataaattcgtttccttcatcaataaatacaatactatcctgcattgctgataactgttctttccacagtgaaccttcgagcacataacattttttgtcacacgtcagttccacgggcgtaccggatggattatttacgtattcccgaatcatatctaccaatgtggttttgcctgtcgcactgtctccccggatgaccgtcagatttcttcgaatttcaaaatcatattttaagcgctttgttgatacaataattctatgttttcccttcat

SEQ ID NO: 121 - DNA, 7424 bp, unidentified
  source 1..7424: mol_type = unassigned DNA
ttagtacagaattttattagctataaccaaacgttgaatttggtttgtgccttcataaatctgcatgatcttagcatcacgcatcattttttcaaccggatattcacgggaatagccataaccgcccattacctgaacagcatcagtagtcacctgcatagccacatcagcagcataacatttagccatagccgcctctttggaaaattccagcccctggtcacgcatccagcatgctttcagtaccatcaatcttgccgtttcaaccttcatagccatatcagcaatcatggactggatcatttggaaagaagcaatcggctggccgaattgttttctttctttagcatattttacagcacaatctaaagcagcctgagccagaccaacggatactgctccaacaaaaggacgtgcagaatccaaagtattcattgctatacggaagccctcgccttcacggccaacacggttagattctggaatcacgacatcctgtaaaatcaattcacaggtattagaggggcggatgcccattttatcctcttttttaccaacagtaaagccaggtgttcctttaggtacgataaatgcggtcaaaccacggataccaccggatttgcgggtattagcaaatacaagataagtatctgcaattccaccattagtaataaacgctttagtaccattaagagtataagttccggcttccttgttttttacagctgaagtagcgacaccaccggcatctgaacctgcaccaggttcagttaatgcaaacgcagccagtttaccatcattaagtaaatcacaatgcgcttgtttctgttcttcagtgccggcaattaaaataggataagacgccagggagttcgcagccattgaggtagcaacacctgcacagcctttgcccagttcttcataaataacggcaactgtaacgctgtccagtccaggtccgccatattcttctggaacaataacattcaaaagccccatatcagcagctttttcaagcagcccgggcatagattgattatttctgtccatttcggcagcgtaaggggtaatttctttttctacaaaatccctcaccatttcctgtaattcaagttgttcttcattaagtgcaaaatccattttgtcctccttgtgttaaggcttaagccaaattgcttgttaaggcgacttgccgtcagcctttaccatttacggggtatatccttaattgtttccacaacaaacaaagtcgtcagtaccgttgccaacagagtatcattttcatcatatacctcagcttcggccacaagagtcattcgtccgcaatggcaaatcttacagacagcataaagtttttcagctgctgtgtattttacaatgttacaacaaaaatttaatgtttcagcttcgacaccaacgctgacagcgctgatttgcaatacagattcaagaagacgataaataacgctgctacggaccttaccacgatgatcaaggtcagtaccggccgtcagagaaaaacttatccgtatctggccgcagtttaactgttctatactcagcgccggatcatctaaaaagcgcctttccagacaagccgattgcactaagaaaagtattcccgatacattttcagtactcacgaactactcatctcctacttgccataatcttactaaaacataaacatattttggacattataccttgtgtattttaccacaaaaaatttactaactcaatagttttcagacaattttatgcgatttatgtaaaaaaaataccacaactgcctccaacgcccacaaaactgacttgtcagtcatttttgttcaaaaaaatccgccaaagttttctttggcggaaagttattaatgatggaacaaacgtaaaccagtaaatgccattgcgatattatatttatcacatgtttcaataacattatcatctctgatacttccgcctgcctgagcaatatactctacaccgctgcggtgagcgcgttcaatattatcaccaaacgggaaaaaagcatcactgccaagagaaactccgtgcagcttatgaagccatacttttttctcttcacgtgtcagcggagctggtttttcggtaaagaactgttcccaaattccatctgcaagtatatcttcataatcgtcagaaatatacacatcaatagtattgtcccgatcaggacgtcgaatactgtccttaaaaggcagttctaaaacactggggttctggcgcagccaccagttatcagctttatttccggcaagccttgtacaatgaacacgagactgttgcccagcaccaataccaatcgcctgtccatctttaacatagcagacggaattcgattgcgtatatttcaaagtaatcaacgcaatcagaagatcacgtactgcatcctcaggaatttctttattgacagtcggacgatttaccagcagctctgacgtaattttagcctcattacggtcctgttcaaaagttataccaaatacatctttcgtttcctgtatctctggaatataagacggatcaattttgataatattataagtgcccttacgtttagtttttaaaatttccaaagcttcctctgtatagccgggggcaataacgccatctgaaacttctcgagccagcatagctgcagtctccttgtcacagatatctgataaagcgacaaagtctccgtaagatgacatacggtcagcaccccgagccctggcataagcagtagccaacggagtcagagctagatcgtcaacataatatatttttttcagtacatcgctcatcggcaatccaacggcagcaccggctggacttacatgtttaaaagatgctgctgcaggcaggccggtagcttcctttaattcttttactaactgccagctgttaaaggcatccagaaaattaatataaccagggcggccgttcaaaacctcaattggcagctcacctattttactataaatacgcgccttactttgatttggattacagccatacttcaattgcagctctttcacgactattcctcctttaaaatatataaaaaaaccgacacttctggggtaaaacgcccagacggtcggcaacaccggtcatactccacgtggttaatccacttccgtcagttatatgacctacttctgctttagattatactttttaccgctctttttgtcaattatccttttatctcttgtccaactatgctacaatttagaaaatactccaaaggagatgttttaatgacttactgttacgtctgcccacaccgctgcggagttgacagggcagaaacaatgaacagtccaaatggtattttcggttcctgcggctgcggtatgcaaccaatagttgcccgtgcggcactgcatatgtgggaagagccctgcataagcggcaccaaaggttcaggcactgttttttttagtggctgcaatttacattgtgcattctgccaaaactacgaaataagctgtttaaataaaggacaggaaatatccgttgaaagattaaaagaaatttattttgacttaattaaacaaggagcccataatatcaatttagttacagcaacacattttactgaggctattatcgcaagtttacaggaaccattgccagtccctgtaatttataataccagtggttttgaaactgtcgatacaatacacagattgaaaaataaaatacaaatatggcttcccgatctaaaatatagtgacgatttagccgcaataaagtacagtaatgcgcctaattattttaatactgctacaacggccataaaaaccatgtacaaacaagtcgggccctaccaaatcgatgaaaatggtttattaaaaagtggtgtaattatcaggcatctgctgttaccgaatatgttagaaaatacactaagagtaatagactggatcgctgacaattttgaaccggggcaggtcctgtttagtctgatgcatcaatatattccatgcggccgagccgctgaataccctgaaataaaccgtgttgttactgcagaagaatatcaaaaagttgagcagtaccttttcaattccggtattgaagacggctttgttcaggaagataccgctgccagcgctgattttattcccatctttgatgggactggagtttagttgacaaagattttataatcctatattataaaaatataattatgaatattgaaaggacacttgaacgaatgaaaaactgatccaatttcgcaccttatctgaaaaagacacaaaaacagcttaaaccaaaagctttgttaagtgttgtcttttatcagtaagtcagaatggatcattttctgcgatttgaggctaagtctacctttacacctcccattctgtcttgaatcgggaggtttttattgtcttcgaaagttaggagttgaaattatatgtacatcctcgaaaccaattcatttaaatattatttaggcgaaagactattattcaaactgcctgctttaaaactacatacaaaaagccgtataggcctgatcgggctgaacggaagtggaaaaacaactttattagagttattagcaggtataagaccaattcctgcagccgcaaaaatcatttgcaaaacaacaatgactatactaccgcaattaaaagaaagactctccaaaagcggtggcgaaacgactcaagcctacatcctgcaggcgctcaaacaacaatccggtttgctgctggcagacgaaccaactaataatcttgatatggaccatttgttatggcttgaaaaggaacttcggcattactcaggagccttaatattagtttcccacgatcgtgattttttagatgcattatgcaatgaaatctgggctttggacgataaacaacttcaaatatatcaaggtaattacagtaattatcagcagcaaaagataatttctgaaaaaactcatgatcaagcttatcgtaaatatattatgcaaaaaactcatttagaaacagctttttctgccaaacagcagcaagcgcaaaaagctgttaaaaccacgaagatatctttatcagaagccaggattaccggagctaaaccctactttgctaaaaaacagaaaaagttacagcaaacaggtcaatccctactgacgaggttagacaaacttaaacagatagaaaaaagacaatccttaccaataataaaaatgaatttactgtcttcaaaactatggcagggacaaattttagtaagagcacataactggtcttatattattgataaaaaaccgctctggcaaacagcaagtttttcagtaaaatccggcgacaaacttgccatcatcggaccaaacggctgcgggaaaacaactttactcaaacaatttttaaaagcacacaacaaacacttgccaaatgtgcaaatagccggcggagcaaaaataggttacttcagtcaggatattgatattcttgatcctgataaaaacctgctccgtaacctacagtcaacgtcttcacaaagcgaagctttattacgtactgttttaataagacttcgtttcaaacgcgaagatttttttaaaccaatacagcttttaagcggcggtgaaaaagtcaaagctgctttagcaaaaatattagtcagtgactgtaatgtacttatgctagacgaaccaaccaatcacttggatctggatgctgtaactgctttagaagaattattatgcaattatccaggaactttgatttttacaacccatgaccgccgcctgcttaaagccattgctaaaaatttattagtctttgatggaacaaaactgaactttttccctgggccatatgacgactactcaaataaacaaataagcactgagtatattgaagcaacagcagatattttacttatagaaaataaactggctgaaattatcagtcaccttagcctcaatccaactgaaaaattagaagcagagtttcaatcattactggcaaaaaaacgccttttattgtcaaagcaatcatcttaatttacaaaatagtttgcattagtcgaatttagctgttaaaatataacgcacaatgtattttattttgcaatttgtattcaaggagaacgatgataaacaattcacataataaatatatcattttcatattgttgcaaagttttctatacggcttaggtaatccactcactaaaattgcttttgccagtatcacacctttatggtgtctggcctttcgttttggtctggctttttctctattcgcaattttctttgcaacacgcttaaggaaacagctgcaggcactttctgcaagccaatatctgccagcaggattatgtatggcttcagcttatatttcatgtaatctggcattagaaggaactacggcaacgaatgttggctttattatgtccttatcagtaattttcgcaccgcttttgtcaataatagtcttacagcgaccttataaaatttcacatcttcctatacaactattagtcattctcggtatgtatctactctgtagtaatggaggaacgttttcttttaaccagggagatttatgggcattgcttacagcagtcagcgtcgcaggagcactggtctttggagaaaaatctctgaaagcaacagatgctatcactatttctgctattcaaacctttattacggcagttatcagcatcgcaggagctttattattcgacgatatcagcactatcactaaaattcaaccagaagcctgggctgttgttatctatctggctattacatgtacctgcctggcttattttctgcaaaacgctgccttgaaattcttatcttcctccttagtatcaatgctgcaatgtactcaacctattttaactgctgcggcctcatactttttacttaatgaaaaattaacttttacaggtatgagcggagctgtaataattttagcttgtataatttctgaaaatattttagaaaaaaagtaaaaccgcggtaaaccgcggttttacttttacttttgtactttattacgtctttcagcttccatcttcttaaaagcttctctttcctgacaaagttcctcatataaagccaggccattccaacttttattattttccgtaatcatcgcttttaactctattcttcctacccctacacgctgcaaagcaattaaaaatttttgtaacttgctgccgtcaaatccatgcagcaccaacatttcttcctgaaattcttccccctgataaacttctccgtgattttctattccagaaattcccaataaagctcccagcggctgctcatactctgctcttgcaacctctttaaacctcacctgcatcatcatacagaccattttaatcatttttaacttttcttcattgaaattatataataaagcaacagaattgttcat

SEQ ID NO: 122 - DNA, 8390 bp, unidentified
  source 1..8390: mol_type = unassigned DNA
atgaacggcaaaccgaacgtcgagcctgcgtggatgtcattgaaacgtctggtcgagacccgtatgatcgagatactccgcaaggaacaggacaacaaaagatacatccggctatacggaacggaagactattggcatgctttcgaagagtcggcctttcagttggagcggctcttccggaaaggagaaaccaccttgttcagacataaggactatccttttccagtggtgatggtcagcattcccgacagcgagttgcgggcttacatccagcagcatattccggtttgtgacaagcacgattacaagaaactgctggcggcagaattctccgccgcagagtatcgtgcatggcatgaacacgcggtgaaagagtttttgtaattctttacgattcccgatgttcgtatcgttttgcggaaattgaggccaaagtagtcacatgcgaccaagcacacgccttgattgatccctggctcacggaagaatcactcaaaaagagcaaggcacagctgattcgcctcttggccgatttcgaccgtcagtttggccgcggaggagagggggggggcatggattcgagatccgagcaggctgttttcggtcttcgaatttcaaacaaataaaatattcatacatcaaatcatgtatcgtttaattgaaaaactgcgactggatcgttatatcagttcacggttgattcttgcattggacctgttggtttcggtcggggcctctatcatctcgctgttagttgcaagcattcttttgggtgccgaagcccttatctggaaaacaatcggctggtggctcggaggatccgttgtcttttcctggatcgcgttcgtgttgctccaaacccacaaatcaatcatccgtcacgccaccttgcggggtttgggccgtttgagtatcgccgttgttttcaagggaattgggatcgcagttatattggctttgggtgtcgctggcccgacatttccagcgatctggatcactctgttgtttgacatattgttgagcctttcaggactggtgattatgcgcgttgccatggttgtcgtctatgactggctcaaagacagccgtcaaaggcattgcaaatgccagcggattctgatctacggaaccggcgacaagggcgtttcgttggtgacccaactccaaaattctcaagagtatcaggtcgtcggtttcctgacctacggcaaaacactgaagaatcatatgctggccgatctcccggtctactacttcgagaccgaagagaatgtcaagtacctgcacaactgcaaggatattgacgccattctcttcgcccacgtccatgaggctcgcgaagagcaggagcgcctaatccattattgtacggactgcaacctcaaggtgctgatcgctccctcgatcgacgaggtggtcgacggcaaggtgcagcgtcaggcaatccgcgagatcaggatcgaggacctgctgggacgtgaagagatcaagatctcgatggacgagatcatcgccaacttccgtggcaagacgatcctggttacgggcgcggcggggtccatcggttcggagttgtgccgccagctggcgacgttcggagtcaaggaactcgtgctgttcgacaactccgagacgccgatgcacaacatccgcctcgagttggaggatcgctaccccaatctgaagttcattcccgtaatcggcgacgtacgcatgattccgcgtctggatttcgtcttccgcacctatcgtccgcaggtggtcttccacgcagcagcctacaaacacgtgccgctgatggaggagaattcctgcgaagccgttctggccaacgttgccggctcgcgcaacgtggcggacaagtgtatcgaatatgacgtcgagaagatggttatgatctcgacggacaaggccgtcaacccgaccaacatcatgggctgtacaaaacgtctggccgagatctacgtgcagtcgctcggtctggccatcgaggccggcaaggtgaagggcaagacgaagttcgtcactacgcgtttcggcaacgtgctgggttcgaacggctcggtgatcccgcgcttccgcgagcagatagccaagggcggtccggttacggttacgcaccccgacatcacgcgcttcttcatgacgattccggaggcctgtcgtctggtaatggaggctgccacgatgtctacgggcacccagatctttgtcttcgacatgggtaagtcggtgaagatcgcccacctggccaggcgcatgatcgaactggccggtctggaggtcgacaaggacatcaagatcgaatacacgggactgcgcccgggcgaaaaactctatgaggaggtgctgtcgaatacggagaacacgcttccgacgtcacacgaccgtatccgcatcgccaaggtccgcgagtacgactacgccgatgctctcaagggtgcgcaggagttggaggagctttgccgcgccgtcgtcattccggacatggttcgcctgatgaagaaaatcgtccccgagttcaagtccaagaactcccgattcgaagagttcgataaagaaacaaagtaaaatcaaccataatgaacacagatttgaacaaagacttaaagattgccgtagccggaaccggctatgttggtttgtcaatcgccacattattggctcagcatcatcaagtaacagcagttgatgttatttctgaaaaggtggagatgctgaatcggaaacagtctccgattcaagacgagtatattgaaaaatatttggccgagaaaccgttgaatcttacagcgacattggatggtgctgcggcctatcggaatgcagattttgtcgtgattgccgctccgacaaactacgaccctgtcaagaactattttgacacaagtcatgtcgaagaggtgatcgatctggtgcttgaggttaatcctcaagctgtcatggttatcaaatcgacgattcctgtaggttactgccggagtttgtatatcaaatacatgcagaagggggtaaaacggttcaatctacttttctctcctgaattcctgcgtgagagcaaagctctctacgacaacctctatccaagtcgcattattgtgggtattccccaaatcatcgacgatgagcggttcaaggaggagaatgatgccattcgtgcaatcgccgatattcaggcgcttaaaaagtcggcccatacgtttgccgctcttctgcaggaaggggccatcaaagagaatatcgacacactgtttatgggcctgaaagaagctgaggccgtgaagctctttgccaatacctatctggcccttcgagtcagctacttcaatgaactggatacttatgcagaggtaaaaggtctggattctcaagccattatcctcggagtaggtctggatccccgtattgggactcattacaacaatccatcgttcggttatggagggtattgcctgccgaaagacactaaacaaatgctggcaaattatgcggatgtccccgagaatctgatcgaggccatcgtcgaatcgaatcgcacccgcaaggatttcattgcggatcaggttctgaaaaaggctggatattatagctactcttcgacaaatgattacaataagaagcgggagaagccaatcgtgatcggtgtatatcgcctgaccatgaaatccaatagtgacaatttccgacagagttcgattcaaggcatcatgaagcgcatcaaggccaagggcgcaacggttatcatttacgagccgaccctcgaggatggatcgacatttttcggcagcaaggtcgtcaacgatctcgagaaattcaagcaaatgagtgctgctatcatagcaaatcgctatgacgcctgcctgggcgatgtcgagacaaaagtctatacccgagatattttcagaagagattaaacagcctattatatgttaccctacaatataatactgaacggcaaaacagttctggtaactggagttgccggctttatcggatcgaatcttgccaaacggcttttgacggactatgcagaactgcaagtcatcggtatagacagcattaccgactattacgatgtctccctgaaacatgatcgactgaaaggcctggaagaatttggagatcgatttgtgttcattcacgactcgatagcaaatcgggaaatcatcatccgcttgtttgacgaatataaacctgctatcgttgtaaacctggcagcacaggcaggcgtcagatacagcattaccaatcctgatgcctacgtcgaaagtaatctcatcggcttttataacattttggaagcctgtcgacacagttacgataatgggcagacaggagttgaacatctggtttacgcctcctcatccagcgtatacggctcgaataaaaaggtaccctattcgaccgatgataaagttgataatccggtatcgttatacgccgcaaccaaaaagtcgaatgaattgttggcgcacgcgtactccaaactatataacataccttcaaccggattacgattctttacggtatatggccccgcaggacgtcctgatatggcctacttcggatttacggacaagcttgtaaaaggagagaagatacgcatctttaattacggaaactgcaagcgggatttcacctatatcgacgatattgtcgagggagtcgttcgggttatgcaacatgcaccggagcgcataactggagaagacggactgccgttgccgccttacaaagtctacaacataggcaacagccagccagagaatctgttggattttgtcgatatcctgcaacaggaattagtacgagccggagtcctgcccgcaaattatgcttttgaagcacacaaagagctcgttccgatgcagccgggagatgttcctgtaacatacgccgatacaacacctcttgagcacgactttgggttcaagccatcgacattccttaggaacggattgagagtatttgcagaatggtatgcaaagtttcacagcgataaataatcactgcctcatatcaacgacatccattctgcatctgcgcgcaatacaaacactttcaaactaaaaaagcacaatacattattttaagcactatgagtattttcaaagacaaaatcctgctaatcacaggcggtaccggaagtttcggcaatgcagttctgcgtcgttttctcgactctgatatccgggaaattcgcatcttctcccgagacgagaagaaacaggatgacatgcggcacttccttcaggcaaatcgtccggacgtttcaaacaaagtcaaattctatatcggaaatgtacgtaaccgcgaggctgtagacttcgcgatgaacggagtagattatgttttctctgcggctgcgctgaagcaggtgccctcttgcgaattctatccgatggaggctgtacgcacgaatgtagaaggcaccaataatgtacttctctccgccatcgctcacggagttaaaaatgtcgtcgtcctctctacggacaaagcagcctacccgatcaatgccatgggtatctccaaagcgatgatggaaaaggtcgccattgctcaaggacgcgctttgggtccggatgcaaaaaccaccatttgctgcacccgttatggaaatgtaatggctagccgtggttccgttattcctctttgggtagagcagatgatggaaggtaagccgatcaccatcacggatcttaacatgacccggttcatgatgacacttgatgacgctgtcgatcttgtcatgtatgcctttgagcatggcaacaacggtgacctcttcgttcaaaaggcgccggccgcaactctcgacgtacttgcagaagccctcaagcaggtttatgccaaggtggatccccaatacggagagaccgaggtgaaaatcatcggtactcgccacggcgagaaactctatgaaacgcttgtcacgcgcgaagagatgcttcgctcggaagattgcggcaactatttccgcattccttgcgacgcccgcgacctcaactacgacaaattcttcacggaaggcgatgatgccatcaaccgcatggaggactatcacagccataacaccaagaggctggatgtcgaaggcatgaaggctcttctcctcaaactcaatttcatccgcgaagacctcggcctgcagcccaaagcaaagtcccgcgattatagaagtgaataacagatgaagattctggtaaccggagcaaagggtttcgtgggtcggaacctttgctcccaacttaataacatcaaaacaggtaaggccaagtgctatggagaccttcagattgatgaagtctttgagtatgacttgaacagcaccatggagcaactggacgcatggtgctccgaatgtgattttgtattcaacctcgctggcgtaaaccggcctcagaacccggaagagttcatggccggcaatttcggctttgcctcaacgcttcttgacacgctgaagaagcatgggaacaaagcccctgtcatgctctcgagttcggcacaggcatctctttccggccgtttcggcaacagcgaatatgggcgcagcaaaaaggcgggcgaagatctctttcttcggtatggagcggaaaacggcataaaggttcttgtttaccggttccccaatctctacggaaaatggtgtcgtcctaactacaacagcgccatcgccacgttctgcaacaacattgccaacgacctgcccatcacggtcaatgatccgaaagtggagctcgaggtcctttacatcgacgaccttgttgaagagatgatcgccgctctgaaaggccaggagcaccattgcgagttcgaagggctgaccgtattgccttctgcggaaggacgttactgctactgtcccgtcactcataaggctacgctgggtgaaatcgttggccttctgcaccagttccgcgacatgccgaagacgctgatgatccccgagatcccggccgacagctttgccaagaggctttacagcacctatttgagctatcttcccaaggataaggccatttttgacctgaagatgaactgcgatgaccgcggctccttcaccgagttggtccacacgctcaactgcggacaggtaagcatcaatatcagcaaaccgggtatcaccaaaggtcagcactggcaccacaccaaatgggagcaattcatcgttgtttccggccacggcctgattcagcagcggaaagagggtacggacgaggtcatcgagttcgaagtctcgggcgacaagattcagagcgtcatcatgctgcccggatatacgcacaacatcataaacctctccaagactcaggatcttgtaactgtcatgtactgcaacgaggttttcaacccggagcggccggacactttcttcgatcccgtagcaagcgaataaaagccgcaagatggctgaataatcaaaacgatctatggaaaccaaaactccgaaattcgattacagtgacattcactggcaaaataacggcaaaatcaaactctgcatcatcgtcggcacccgcccggagatcatccggcttgctgctgtcatctccaaatgccgcaaatatttcgatgtgattctggcccataccggacagaactacgactataacctcaacggcatcttcttccgcgacctgaaactcgccgaaccggaagtctacatggatgcagtcggagatgatctcggcgcgacctgcggcaacatcatcaactgcagctacaagcttttcgctgcaaccaaaccggatgccgtactcgttcttggcgacaccaacagctgtctgagtgtcatcggggcaaaacggctccacattccgatttttcacatggaggccggcaaccgctgcaaagacgagtgcctgccggaggagacgaaccgccgcatcgtggacatcatctcggacgtcaatctcgcctactccgagcatgcaagaagataccttgctgaatgcggacttccccgtgagcgtacatacgtcaccggttctcccatggccgaggtgctccataagaaccttgccgagatccaggcatccgatgtacacgagagactcggactcaagaaggggcactacatcctgttgagtgctcaccgcgaagagaacatcgacacggagaagaacttcctctgccttttcaatgcgataaacgcaatggccgagaagtatgacatgccgattctctacagttgccatccccggagccgtcaccgccttgaggctacaggtttcaaacttgatccgcgagtacaggtccagcagccactcgggtttcacgactacaattgccttcagatgaacgcattcgctgtcgtttccgattcgggcacccttcccgaggagagttctttcttcaccagcgtaggacatccttttccggca

SEQ ID NO: 123 - DNA, 8429 bp, unidentified
  source 1..8429: mol_type = unassigned DNA
  misc_difference 7185: note = a, c, g, or t
  misc_difference 7186: note = a, c, g, or t
  misc_difference 7187: note = a, c, g, or t
  misc_difference 7188: note = a, c, g, or t
  misc_difference 7189: note = a, c, g, or t
  misc_difference 7190: note = a, c, g, or t
  misc_difference 7191: note = a, c, g, or t
  misc_difference 7192: note = a, c, g, or t
  misc_difference 7193: note = a, c, g, or t
  misc_difference 7194: note = a, c, g, or t
  misc_difference 7195: note = a, c, g, or t
  misc_difference 7196: note = a, c, g, or t
  misc_difference 7197: note = a, c, g, or t
  misc_difference 7198: note = a, c, g, or t
  misc_difference 7199: note = a, c, g, or t
  misc_difference 7200: note = a, c, g, or t
  misc_difference 7201: note = a, c, g, or t
  misc_difference 7202: note = a, c, g, or t
  misc_difference 7203: note = a, c, g, or t
  misc_difference 7204: note = a, c, g, or t
  misc_difference 7205: note = a, c, g, or t
  misc_difference 7206: note = a, c, g, or t
  misc_difference 7207: note = a, c, g, or t
  misc_difference 7208: note = a, c, g, or t
  misc_difference 7209: note = a, c, g, or t
  misc_difference 7210: note = a, c, g, or t
  misc_difference 7211: note = a, c, g, or t
  misc_difference 7212: note = a, c, g, or t
  misc_difference 7213: note = a, c, g, or t
  misc_difference 7214: note = a, c, g, or t
  misc_difference 7215: note = a, c, g, or t
  misc_difference 7216: note = a, c, g, or t
  misc_difference 7217: note = a, c, g, or t
  misc_difference 7218: note = a, c, g, or t
  misc_difference 7219: note = a, c, g, or t
  misc_difference 7220: note = a, c, g, or t
  misc_difference 7221: note = a, c, g, or t
  misc_difference 7222: note = a, c, g, or t
  misc_difference 7223: note = a, c, g, or t
  misc_difference 7224: note = a, c, g, or t
  misc_difference 7225: note = a, c, g, or t
  misc_difference 7226: note = a, c, g, or t
  misc_difference 7227: note = a, c, g, or t
  misc_difference 7228: note = a, c, g, or t
  misc_difference 7229: note = a, c, g, or t
  misc_difference 7230: note = a, c, g, or t
  misc_difference 7231: note = a, c, g, or t
  misc_difference 7232: note = a, c, g, or t
  misc_difference 7233: note = a, c, g, or t
  misc_difference 7234: note = a, c, g, or t
  misc_difference 7235: note = a, c, g, or t
  misc_difference 7236: note = a, c, g, or t
  misc_difference 7237: note = a, c, g, or t
  misc_difference 7238: note = a, c, g, or t
  misc_difference 7239: note = a, c, g, or t
  misc_difference 7240: note = a, c, g, or t
  misc_difference 7241: note = a, c, g, or t
  misc_difference 7242: note = a, c, g, or t
  misc_difference 7243: note = a, c, g, or t
  misc_difference 7244: note = a, c, g, or t
  misc_difference 7245: note = a, c, g, or t
  misc_difference 7246: note = a, c, g, or t
  misc_difference 7247: note = a, c, g, or t
  misc_difference 7248: note = a, c, g, or t
  misc_difference 7249: note = a, c, g, or t
  misc_difference 7250: note = a, c, g, or t
  misc_difference 7251: note = a, c, g, or t
  misc_difference 7252: note = a, c, g, or t
  misc_difference 7253: note = a, c, g, or t
  misc_difference 7254: note = a, c, g, or t
  misc_difference 7255: note = a, c, g, or t
  misc_difference 7256: note = a, c, g, or t
  misc_difference 7257: note = a, c, g, or t
  misc_difference 7258: note = a, c, g, or t
  misc_difference 7259: note = a, c, g, or t
  misc_difference 7260: note = a, c, g, or t
  misc_difference 7261: note = a, c, g, or t
  misc_difference 7262: note = a, c, g, or t
  misc_difference 7263: note = a, c, g, or t
  misc_difference 7264: note = a, c, g, or t
  misc_difference 7265: note = a, c, g, or t
  misc_difference 7266: note = a, c, g, or t
  misc_difference 7267: note = a, c, g, or t
  misc_difference 7268: note = a, c, g, or t
  misc_difference 7269: note = a, c, g, or t
  misc_difference 7270: note = a, c, g, or t
  misc_difference 7271: note = a, c, g, or t
  misc_difference 7272: note = a, c, g, or t
  misc_difference 7273: note = a, c, g, or t
  misc_difference 7274: note = a, c, g, or t
  misc_difference 7275: note = a, c, g, or t
  misc_difference 7276: note = a, c, g, or t
  misc_difference 7277: note = a, c, g, or t
  misc_difference 7278: note = a, c, g, or t
  misc_difference 7279: note = a, c, g, or t
  misc_difference 7280: note = a, c, g, or t
  misc_difference 7281: note = a, c, g, or t
  misc_difference 7282: note = a, c, g, or t
  misc_difference 7283: note = a, c, g, or t
  misc_difference 7284: note = a, c, g, or t
tcatttccacttgaaaatcacaatacccacaatcgccacggccatgccgatggctttccgccactcccagggctgcttctccacaccgaaccatccgaacagttcgataatatatgctacagcaagctgagcgaccacaataagcattaccgctttggccggtcccagggcatccatactgcggatcacagtgtaggtgataaaggctccgatggcccctcccaaaagcatatatctgggctccacctgcgctatcttcaagaatgaagtccgctccgtacacagccatgcccccagacataccagcaatgctgtaaactgcacaaatgcactggcggtccagatgccggtggatttcgtcacctgggtgttgaacactccctggatgctcatcagcgcaccggaaactaaagcaatcaaaaaaccgatcataggattctaccaccttttctttttagtagtagtctatcctgtgaccggttcgttcattcatattttattgtaacggttttatttctctgtaccacctacctgtccggctatggtctcgtccagctgctgtaccagagtagtcacgtcgtcaccgttccataccttggaaaacagtacttccagctgcatccagaaatttcccgtctctagcatcttcggcaatgacacactgtccgcatattcatcggcaaagatcataagcgcaccgttgtctgcattctctgccgcctgaagacttgccggcattttgccggagcgttcatacaggccgtccgcatatccttctgccagatacgctgcgaagcagtccgccagttccttgtgttccgaatagccgttgatgactgccgctcccgtaacagacaaagatctgctctgcagttcggcgctgacatccggcatacgggcaattccgtaattaaatgcaaggctgccgtccgcttttgcctcttccagccgtttgaccacatccgtggttccgatggtgaacatggtcttgccatcgataaagtcctggatcacagaatcataagtcaccgtatcggattcaataaagaagaactggttcagtgccttgtacacttccagacactgaatggtctccggattattgatatcaatatcatttctgtcatccccgggatcaccgcctacgatcatgtagttgcctacgatccagtagttgtagaaaatattgttcacgtcccatttcatgacaccttccacaccttccggtgcatcaaaggtatctgcaatattcagcagatcatccactgtggagggaagtgcttccgcgaaatactgctctgccagcgcatttaccgctgcctcatccgctgtcacctgttccgtggtctggtcttccggaagagaatcttcctcgatgatctcttctccttcccctatgggttcatcattctcactgcttcccgccagttccttctccgcctgctgggttgcccaggttcgaagataatcttcattatataccaacgcactggtatcaaaataaaccgggtaaccgatcagcttctgatcataggttaccgcagacagagccgcctgggaaaaatggtctgtattgcagattcccacagtgtcaggcactttcgatgccagtcctgccagataagccttttccagagagtcactgctcaacaggtagatatccggtatctgatcggaatgcagggtctcctgattgatagcttccagatattcactgtcagaagtaagtacgggaatcacacggactccattgttctgttctccgaaggatactgctgccgcattgatataaccggacaatgcctcatcggaataccagcaatagattgtctcctttcctcgaaacagctgcagtccgcttccgctctcctgtgtctgactcatctcctgcgtacttccgtaaacagctgcagcagccatggctatcacagctgctgtagcgataattctttttttcaaaaacataaattcacctaaacctcttattcgatacaggtgtccaaaatagcaatcatttcgtccacattttcccgggtaatcacgagaggcggtacgaagcggataatgtccgcaccggcattgatcagaattaatcccttctccaatgctctgttaataatgtctcctaccggatggtcaaataccagtccctgcatcagtcccacaccacggcgttctttgatacagtcatacttgtctgccagttcgttcagacgctgttccagatagggagccacctctctcacatgttctattatatggtcctcttcgaataaatcaagcactttttccactgctgcgcaggctaaggggttaccgccgtaggtggttccgtgatctcccgctgtcagagaatgctgtgctactttctccgtcatcataaatgcacctaccggtacaccgcagcccagtgccttggcagaagtcatgatgtccggcttcacgccgaaacgctgccatgcatacatgtaaccggtacgtcccatgccgcactggatctcatccagaatcagcaggatatcccgctcatcgcacagatcacgaacctgttttaagaattcttcattagcgggacgcagtccgccctcgccctgtacagtctccataatgatggcacaggtcttgtctgtcacctgatccagcacactctggaaatcattcagttctgcaaatttgatatgtccgatcatgggctggaacgcctcacgatacttggggttgcccgttactgacaaagctcccatggttctgccgtggaaggagtgattcatggcaatgatctcatggtcggtacagccatccttcagatacgcatattttctggcagccttaatggcaccttccactgcttccgcaccggaattggtgaaaaagacacgatccatgccggatacttttttgatcttacgagccgcctcgatggcaggcacgttgtaataataattggaggtgtggatcaccttgtcgatctgtgctttcagcgcatcgttgtatgccttgttctgatagcccagggcaaatacagcgattcccgctacgaaatccagatattttttcccatcggtgtcatacagatgtacgccttcgcccttatccagaacgatctgataccggttataggtatgcagcaggtctttttccgcctctgcaatatattctttcatagtgtcgctcattttatttttcctcctcatcggatacgatcgcagttccgataccctgattggtgaagatctccaacaacaggcagtgtgccagacgtccatccagaatatgcacacggtttacaccgttgcggatcgcagaagtacagttgttcagcttcggcagcataccaccgccgatgtaaccgtcgtggatcagtccctctgcctcggaagctgtcaatctggaaataaatgtggacttgtcattgatgtccttgtacaatccctcgatatccgtcagaaatgccagtttctccgcatgtactgcttttgcgatagcgcaggccgcatcatccgcattgatattgtaggtgtgataatccttgtccagtccaatgggagcgatgatgggcaggtaatccttctccagcatgtcaaagagaatatccggattcacgccggtgatctcacccacatacccgatgtcctgaccgtcggaatattttttctctacctgaagcaggccgccgtctttaccgctgacacctactgctttcacgcccagctcttccaccatggtcacaaggctcttatttaccttgttcagtaccatttccgcgatctccatggtctcctcatcggtgacacgcagaccgttgacgaactttgcctcttttccgaccttgccgacccagcggctgatctccttaccgccgccgtgaacgatgatgggcttgaaacctaccagtttcaacagcgttacgtccttgatgacgtttttctgcagttcctcattgctcatggcgctgccgccgtattttaccacgatgatcttacggttgaatttctgtatgtaaggaagcgcctcgatcagcacctctgcttttttcattacctgttccatatctttttccatttttatcctcatttccgcagataccgtgatccgcctgtcatttatctttccggtcgttcttttttaggaacgatagtccgcattgatcttcacataatcatagcttaaatcacagccccatgcggtagcttctgcctcacccatatgcatatccaccagtgcggtgacttccggatcggagaggatcttcgtggcctcttcctcgctgtaatcacatgccacaccattaccgaagatatgaatcttgccgctcttgctctcaaaatacagatccacattttccgggtcgaatttggctccggaataacccagtgcacagaggatacgtccccagttggcatcatgtccgaagatagctgccttggtcagagaagaacagatcacggattttgccagagttctggcatcttccttgctgactgcgtttattactttggtctcgaacagtgctgtggcgccttcgccatctcctgccattttctttgccaggaatgtggtgatctcatgcagtgccttgcagaagttgtcgtaatcctcgccctctgcggtaatctcctcgttgccagccatgccgttggccagcaccagcagtgtatcattggtggaagtatctccatccacggagatcatgttgaaggaatccactacgtctgcgctgacgcacttctgcagcatctccttggaaattttcacatctgtggttacaaaacctaacatcgtacacatattcggatggatcataccggaacccttgcacataccgcccagagtcacagtcttgccaccgatctgtgtctcgatggcgatctctttggaaatggtatcggtggtcataatggcatgggctgcatcggagccagcctccagagtatctgccttggctgccaccagtttctcgatgccagcggtgatcttgtctacgggaatctgcataccgatgacaccggtggatgcaaccagtacggcatcggtgggcacgcccaacagttctccggcacattttgcttctgcttcacagcagtccagtccctgtttgccggtgcaggcattggcgattcccgaattgactaccactgcctgtgcaaatgcagaatgttccacgatctgcttatcccacagtacaggagccgcctttaccacattggaggtaaaagtaccagctacggtacaaggtgccttacttacgatcagtgccatatccttacgattctgatatttaatggcagcctccacacctgctgcctcaaagccttttgctgcggtcacaccgccctggatctgtttcatgttggaataatctcctttcgcttccgttttatttatgatgtcggggtcaaaagcccccgactttgatgcctacggattgcttcgtgctacgcgcttccacaatcctggcatctatttattaaacgccgtaatgttctcttcattcaaagtaaagtcgtagtagttcaagtcttcccgctttgtccatccaatgcatttccagaaagcgtttccgatgtcattctgggtaaaagcgatcaggctgaccttgttgatatgttccgctttcagagcattcatgcagtggacgaccatggctttgccaatgccaagtcttcggtaatcttctctgacacatacatggtacagacagcctcgtcgtccgtcatggccgcagaggatgccacccactacggctccatcctccccgatggctaccacactggtgccgggattccggttgataaaacgttccacaccttctctggaatcatcgatgctccggataccgaaaccgtgaatggtcatccagagggcatgcagaccgtcataatcttctatggtcatgggtttgatcgtaaactgtttgttcatgtatgtattttatcctttctaatcctttccgtatctgctttaagggaagcatggaaccagctccaggccttcgctctcaggaagcccgaacagcaggttcatgttctgtaccgcctgtcctgcggcaccctttacgaggttatccagtgcacccatcataatgatacggccggtacgctcatcaatgacaaaattgatgtccacgtagttgctgccttccacccacttggtctcggggcagctgcccttatccaacacacggacgaatttctcgtttgcataatatttatcatagacagcttttacttcctcataggtaggaagtgtaccgtccggttttctcttcagtgttgcatactcggttgccagaattcctctgttcatgggtacgaggtgcggggtaaaattaatggtcacctggcagttgcccgcatagcctaactgctcctcgatctcgggggtatgtctgtggcttgccacgccgtaggctttcatgttctcgttcacttcgcagaacaggttgggcaccttggcgcctcttcctgcaccggaggtaccggacttggcatccacgatcagggtgttcacatcaatcatgccttccttgaccatgggataggccgtcaggatcgaacaggtggtgtagcagccggggttggctaccaatctggtcttctccgtgatcttgtcacgattgatctcgcagagtccgtatactgcttcctcaatgaactgaggagatttgtgctcgatgccgtaccatttttcataggtggccacatccttgatccggtaatcagcagacagatccacgatcttcacctgagagagaatctcctctgtcaaaaggcccgccagaaatccctgaggggttgcggtaaagatcacatctacctgcttcgccagttcttccagattgtcatccttgcagatatcctccaccagctggaacatgttctggtatacctgataatacttcttatctatatagcttcgggaaccgtaccatacgattttggcatccttgtggtttaacaggatccttaccagttctcctccggcataaccggttgctccgatgattcctactctgatcatttttctacctctcttgtttatgtcatcgttttttatttctgtcgccgccatacttgtgtcaacgaattgcttctgtcgccgccatacttgtgtcaacgattgcttctgtcgccgccatacttgtgtcaacgaattgcttcgcagcaagctgctcacgcaattctnnnnnnnnnnnnnnnnnnnnnnnnnnnnnnnnnnnnnnnnnnnnnnnnnnnnnnnnnnnnnnnnnnnnnnnnnnnnnnnnnnnnnnnnnnnnnnnnnnnncgccgccatacttgtgtcaacgaattgcttcgcagcaagctgctcacgcaattctatttttgaactattcagaaccccattcgcaaaatcgctgctacgcagctggatttttgctcatgtggttacttcgtcatataaatatcatcacatattcttacgaatgcaagcattcgacgaatatgtaccgatatttatctgactctgaatagttccatgataccactttttgtctaaatgtctactacttttttcatttttatgcacgtttctcggattgttgtgtatatttatgcatatattcatactatttttatggttttatgcattatggtggaataatattcattctgttttccgcgtacttttctttcctataaaaatctgttacaataactatgctgtgctttcgtttgcagcatatctattttgtggctctttatggtctgtttttcccggatccaaagagcagaaatgaggaaattatggcttttgacggcgttaccattgcctgtgtaatatcagaattaaaaaaagaactcatcggcggccgattatataaaatcgcccagccggaaaatgacgaactgctgttgaccatcaagcagcccacagggcagaaacgattgcttctgtccgccagcgcttccctgcccctgatctatctgacggagagcaacaaacccagtcccatgacggcccccaacttctgtatgctgctgcgcaagcacttacagaacggccgtatcgtgaacatttcccagccggggctggagcgtatcgtgcatatcgatattgagcatctggatgaaatgggggatctgcgccacaagacgctggtcatggagctgatgggcaaacacagtaacctgatcttctgtaacgatgacaataccatcatcgacagtatcaagcgggtatctgccgcagtcagcagtgtccgggaagttctgcccggcaagccctatttcattgcccatacccaggataaactggatgccctgacctgcgacgagactactttccgggagacccttgacgccaagcctcagccggtcttcaaggcaatctacggaagcttcaccggtatctctccggtactggcacaggaactgtgtcacgaggcaggcatcgacggggaacgccct

SEQ ID NO: 124 - DNA, 9823 bp, unidentified
  source 1..9823: mol_type = unassigned DNA
atgggattttttaattcgttattcaacgctctttttgccccaccatcctcttcttccatccgagatgttccatcaccaattcatacgtattcttcctcttttgaagataaagatggttactataacgaatatccacaattattttcctctgcaacagacaataatctcaactatactgattatactttttccggaaaattcactaaaaccggaaaaatgcgcaccaaacgacatatccaaattttcaaaaatgaagatgttctttcatctattcaggcccttggatacgaagaccctattcagtatactcgagaaactcctccaccccctagttcagctcaaatggattatcttcgagatcttgcagcagaacatggtgagagtgttcctgctaaactatccgcctcagatgcttcagctttaatttccagatatgtagaccatgaccgcattcctaatccagagctcttcgagtatgcagatgaaatgcatattggcgtatcttactattgtggaaaacgaatgttatacgatattattttttcgcatctgaacaagcttgaccgttccgccttttttattttctgcgtgtaccgggatatcgagcattcaatctcaggaaatctaaaccaagtttcttgtaagaattttttctatacttttgccgaatctgtagaaaatgatgcaaaattccaaaagtcgttagatgacaactattatggttccgatttgcgcttttttggttctaaatattccaaggcccttggttactccctctctggaggaagcaaacgaacatccgcctataaatccgccaaagcatttttaatttctcatggtcttatttatccatcttaatgttttatttatctatcacaacaaaagcggcgcccagctctggttttccagaatgggacgccgcttttgttgtgctttacttttgttctttttcctgctcttcgcgcagcttcttgatccgctttttctcgctttccacgcggggccagggccaggagaagccctcgttggccttacaccagcgggtaagcggatagaacgcaaacgccagcccaaaaacgtacagcagcaggtacagcagtgcgctcagggtgaacagtgcgtccagcgccccgatcagggccatgaggaagcccgccttgaggaaaaacagaccgttctggcgacagtattccgggaagttttcggccttgacggcctgacggccctggtcgccccagacacggggatttttcatgaccgagtagccgtaaaagaccagcatcaggccgcaggtgagctgaaaaccaaagaacatgttgtacctcgctgttttgtgtgattttagtcctcaaacagagacttcatggcgggcaggaaatccagcgttgcaaagtagtcacgcggggtctcggcgcggcggatgaggcggtgagaaccgtcctcgcagagcaggacctcggcactgcgcagcttgccgttgtaattatagcccatggcagagccgtgtgcgccggtatcgtggatgtagatgatatctccgatgtcgatcttgggcagcatccggtcaatagcgaatttatcgttgttctcgcacaggccgcccaccacatcgtacttgtggtcgcagggagcgtcttccttgcccagcacggtgatgtgatggtatgcgccatacatggcgggacgcatcagattggccgcgcaggcgtccagaccgatgtattccttatagatgtgcttctcgtggatggccgttgccaccagggcaccgtaggggccggtggtaaagcggcccatctcggtaaagatggccacatcgcccatacctgcggggacgaggatctcttcaaacttcttccggacgccctcgccgatggccatgatgtcattctcggtctggtcggggcggtacgggatgcccacgccgccggacaggttgatataggcaatgtgcacgccggtggctttctgcacccggaccgccagctggaacaggatggcggccagctcaggatagtattcatccgaaatggtgttggaggcgaggaatgcatggatgccgaagttcttggcacccttggcggccagcttcttatagctgtcgatcatctgctcctcggtcatgccatacttggcgtcgccgggcttgtccatgacctggaagccctcttcgctctcgcccagactgaaagttccgcccgggttgtagcggcagaagatgttctcgggcacacctgccacccgctccaggaactccaccatggtggcgtcgtccaggttgatgtaggcacccagctcgtaggccttcttcatatcctccacgggagtctggttggaggagaacatgatgtcgctgccggtaaaaccgcaagcttcgctgagcatcagctcggtcagggaggagcagtccacaccgcagccctcttcctttaaaatctgcagaatgaccgggttgggcagagccttgacggcgaaatactcccggaaacccttgttccagctgaacgccttgttgatgcggcgggcattctcacggatgcctttttcatcgtagacatggaacggcgtgggcacgtcctggatgatctcctgggccatggcctcggtcagaaacggtctcttttccataatatacatccctctcattttatgggtaacagcgggcccagtgcccgtgtttcagcatttttacagcttgaggttttcccgcgtcggggtaaaggtggggatcatcttggccagctgtttcaccacgccctcgtcgttgtgctcggccgcggcttccagctcctgcagctggccgtagaactgggccaggtcgatgctgcggggcgaggccacaaaaattttgttgtgctgggtgcgacgcattttgtcctgctcctcatccatcatcagctcttcgtagagcttttcgcccgggcggaggccaacgatcttgatgtccatgttcacgcccggttcatagccatagaaccggatcagctgcttggcaaggtccatgatcttgacgggttcgcccatgtccagcacatagatgctgccgctctcggccagtgcccccgcctgcagcaccagctgggctgcctcggggatggtcataaagtagcgctcgatgttggggtctgtcagggtgacggggccgccctttttgatctgtgcctcaaacagcgggatgacgctgccatggctgcccagcacattgccaaagcggacggccacacacttcatgtcggtgttgcccgcaaaggtctggatgagcatttcgcagatgcgcttggtgcagcccatgacgctggtggggttgaccgctttgtcggtggagagctgcaccaagcgctccacgccgtgctcgctggcactcaccagcaggttcttggtgcccagcacgttgttcttgacggcttccgccgggctgacctccatcagcggcacatgcttgtgggctgccgcgtggaagaccaccgtagggtggtaggtctcaaacacctcgtccagccgctttttgtcccggatggagcccaccagcacggtcacgggaatgtcccggccatacttctgctggagctccatctggagctcgtaggcgcagttctcatagatatcaaagatgagcagcttgcccgggtggaatttcatcacctggcggcagagctcactgccgatggacccgccgccgcccgtgaccagcacggtcttgcccgtgaggtagccggaaattttggcggtgtccagcgtgacctcctcgcgggagaggaagtccgccgtgttcagctcacggaatgccccctgccccggcgcgttggctcccaccagctgcgggtcgctcaggatctgcacggcgcagtgggtggaaacgcagaggtcgatgacatggttcaggcggctgcctttcagggtggggatggcaatgatgatgccctggatgttgtacttctcgcacagggcggggatctcttccagcgtgcccttgaccggcacgccgtggatggtctggttgagcttggcagggtcatcgtccaccgccaccaccgggtgaccgtagaggtcgttggtcttgcagacgttgatggcccagttgccggcctcgcccgcgcccacgatcatcaccgggcggttggggtccttgttggtgttgccccgcagccgctcccccagcgggtggttcaggaagagccgccatgccaggcggctgccgcccaccagcaaaaagatgaagacggcggccataacattggccgaattgaagagcacgccatggatgagggtgcggttgaccagatagacgatgacggtgggcacgccgatcatcccggccagccggatgagatcgcgctcccctgcatacttccacaggatggagtagagcccccctgccaagaaacagacgaggtacacggccacgatccagggcaggttgtggtagagcaaggctcggttatggggccaccaggtggcttccacggcaccatccgcccgcaggagcagggcaaagtaaaagctgaacgtcacgatgacagcatccactaagaacaggaacgcgcgccgggcaaacactttcggcggctgtttttttctttctttcacagataaatcctcttttgcatcagtgcagagcctgtccgcaccgtttttcttccgggaacttccacaaaaggcactgggcctccatggtatccattgtattatactcgtttcccgccccggtgtccagaaaatttccatttccgctctgtttttccggcactcagtgcttttttgccagcgcggcccgcacctcttctcccaggcccagcggccaggctgccacgagatagacggcactcatcccgcctgcacagagagccagcgctcccagccgcggcaaaagcgctccggcaaaccacccggccagcccctgccgcagggccacacccacggctgcagcccctgcagaagccagcatcggggcccccagccagcgccagagccggagctttgtctcactgctggcaagcagccgcccggtgttggcaaggcaggtgtagcagctggacaccagaatcacaaacaggaaacccggcatcccataccggggcagcagaagcaccacgcccacgatccgcaagatcgagtcccacacgctgtagcggaacgccgctttctgctcccccatccctttcatggcaccgtctaccatgctctcaaaatagagcagcggcatggccgggccaagtacctccaaatagaagcccgcctccgggctgtggtagagcgtccgggccagcggacagcccagcacccagaacaccgccccggccagggcggagaaatacccggtcagccgcagcatccggtcaatgagggcctgcaggcgggccgtctcgccccggatgtgggcctgcgtgatctccggcatcagcaggacggagaggctgcccagcaggccaaacggaaacgtcagcaggggcagcgccatccctttcaggctgccatactgggccacggcggcgtcgcgtccgccctcagcccccagtgcaagggcaaggcaggcgggcaccagcatgttctccgccgtgtgcagggcgctggcaaggcaccgccctccctccaccggccacaggatgtcccagagccgtcgggccgggtcacgggggcgccgggccttttccccggcaaagcagcgccgggcctcccggtggtagaacaggagcatcatacaggccgagactgcctcgctcagggccgtggccgccagcaccgcggtgcactttcggccgtgatcccagccccgtaagatcccctgctccaacaccacatagacgaccccgatgcggacggtctgttccgccagctggctgagcacgttgggctccacccgccgccgggcgatgaagaacccccgcagcaccgccgagacggccatccagggcatcccgaatgctgccgcccgcagagcgcccgcggcccgggcatctcccagccaccaggcagccgccaatcctgccagcccgaactgcgccaccatggcaaaggcccccagcccaaggcccgctgccagcagccgcaccagcattccccgagcttcggccctgccgtggctcaactcctcggccatgaggcgggtagccgccaccgagacgcccgccgtggccagcgtaacgaacagggcgtacaccgccagcaccagctggtacaggcccattccctcaccgcccagggcattggccagataaatgcgcagccccatgcctgccagccggagcaggacatccgccccggtcatcagggccgcattcttcaggtagctctgccgcatggcgcgcctcctttccccgccaatgcacaaacggggaggttttgtttactgtatgcggcaaaacagcccgtttatgcgctttgcaaaagatgagcggcgtcgtgggttgtttctctcccacttttatggtatgatatgtgttggtcacacaagggcggtttgcgccctttgatacaaaatgcaaggaggaagcgcattcccctacggcaacgccgccggagtgcgcaacgagagaatgagcgaagaatgcacccatgactgctccagctgcggagcagcatgttcttcccgcaatgccgcgcctcagcacgacgcacccaaccccaacagcagcgtcaaaaaggtcatcggcgttgtatccggcaagggcggcgttggcaagagcatgaccagtgccctgctggcctgcgccatggcccgccgcggctaccactgcggcgttctggacgccgacatcaccggcccgtccatccccaagctgttcggcatccatggccgtgccatggccgacgcgcagggctgctggcccatccagagccggatgggcattgacgtcatgagcatcaacctgctggtggagaacgaggaagaccccgtggtctggcgcggccccgtcattgcaggcgcggtgaagcagttctggaccgatgtggtctggaaagacgtcgatttcctgtttgtggacatgcctccgggaaccggcgacgtgcccctgacggtcttccagagcctgcccgtggatggcatcgtggtggtggcaagcccgcaggagctggtgagcatgatcgttgccaaggccgtgaacatggccgagatgatgaaagtgcccatgctgggcctggtggaaaacatgagctacgttgtctgcccggactgcggcaagcacatcaatgtgtttggcgacagccatgtggacgaggtggccgccaagcacggcctgcccgtgctggccaagtgccccatcgaccccgagctggcgcgcctctctgacgccggcctcattgagacctacggcggccagtacctggagggtgccgcggacgcctgcgagaagctgctcaagaagtaaaatttcatattcccgctgttctgccccgtgcaggatggcgggattttgttatttttcggacggatttgtcctatcgcgtcccgggggattctggtatactggttttatcacgatacgctttgatgaaaggatgtgcgctgcccgtgctggattccattatttttgacatggatggtctgctgatcgacaccgagatcatctcctaccagttgtattctgctcttttggctccttatggctttaccgtgagcctgcacgattacgccgagacttacagcggcaagaccgaggagaaaaacgtgaccacccttttggagcattaccccctgcccctgagccgggaggagtgttttgcccgcatttcggccatggaaaaagagtttctggccaagggtgttgctctcaagcccggcgcaaaagagctgctcacctatttaaaagagcatggctataaaattgcactggcctcttccagcatcgcagaccgggcctacggcatcctggaccagcacggcatccgcggttgttttgactcctttgtgttcggcccggacctgcccaagggccgcggcaagcccgcgccggatatcttcctcattgcctgccagaagctgggcaccaccccggcgcgggcactggtgctggaagacagtgaggcaggcatccaggccgctcactccgcccacatcccggtcctctgcgtgcccgacctgcaccacccggccccggcttacgagtccatgaccgctgccatcctctcctccctgcacgaggtgccgggctggctggaagcccagaacgcgcaataaaagccgcacaaaagtctttcttttgcagcctccgctaactttagaaaagaagattttttgcctgtttccgcacagtttccattttttgtgaagcgtgttcatcttttatcctgtttttttgaaagattttcgcaaaatattcgcacagcttctattgtaaattgccccgcaaagctttataataacaaagtgctctgcggcagatgtgtgccgcagaggggaaaaagcctgcacagggcgaatgtgcgtttggccctgtactgttgcaatatagaggaaaaggagtattctgttatgttgacgaatgaatacctgaagcgcgtttacgatggccttgcacagcgcaatgccaatgagcctgagtttctgcaggcagtccgcgaggttctggagagcatccagcccgtggtggagaagcaccccgagtacgagaaagccggcctgatcgagcgtctggtcgagcccgagcgcgtcatcagcttccgtgtgccctgggtcgatgatcagggcaaggtgcaggtcaaccgcggctaccgcatccagttcaacagcgccatcggcccttacaagggcggtctgcgcttccatccctctgtcaaccagggcatcctgaagttcctgggctttgagcagactttcaagaacagcctgaccaccctgcccatgggcggcggcaagggcggctctgactttgacccccacggcaagagcgacatggaagtgatgcgcttctgccagagctttatgaccgagctgtaccgccacatcggccagttcgtggactgccccgccggtgatatcggtgtcggcggccgcgaggtcggctacatgtttggccagtacaagcgcctgaccaacagcttccagggcggtatgctcaccggcaagggcctgacctttggtggttctctggcccgcaccgaggctaccggctacggcctgtgctacttcaccgctgaggcgctgaagtgcatgcgcaacgacagcttcaagggtaagaccgtggtcatctccggttccggcaacgttgccatctacgcctgcgagaaggctaccgagctgggcggcaaggtcgtgaccatgtccgactccaacggctatgtctatgaccccaacggcattgatctggcttacgtcaaggacctgaaagaagtccgccgcggccgcatcaaggagtatgccgagacccacaaagacgcaacttacgttgcagactgcaccaaggtctggactgtcccctgcgacatcgccctgccctgcgcaacccagaacgagatcaacaaggagtccgctgaggctctggtcaagaacggctgcaccgtggtctgcgagggcgcaaacatgcccagcactccggacgccatcgaggtctatctggcaaacggtgtcctgtacggacccgcaaaggctgccaacgccggcggcgtggctacctccggcctggagatgagccagaactccgagcgcctgagctggacctttgaagaagtcgatgcaaagctcaagggcattatggagggtatcttccatgccagctatgacgcttctgttgccgctggttccgagggcaacctgatggtgggcgcaaactgcgctggcttcctgaaagttgctaccgccatgatggctcagggcatcacctactaa

SEQ ID NO: 125 - DNA, 9695 bp, unidentified
  source 1..9695: mol_type = unassigned DNA
ttggcagaggactttgtgatcgagatgctccatattaccaaggaattccctggcattaaggcaaacgatgatatcaccctgcagctgcgtaaaggtgaggtacacgccctgcttggcgagaacggtgcaggcaagagcacgctgatgagcgtgttgttcggcctgtatcagccggaacaaggcaagatcctcaaaaatggcaaggaggtcgccatccggaaccccaacgacgcgaacgcgctgggcatcggcatggtgcaccagcacttcaagctggtggagtgcttcagcgtgctggacaacatcatcctgggcgtggagcccgacaagatgggctttttgcagaaagccgaggcccgcaaaaaggtcatggccctgagcgagaagtatggcctgcgggtggacccggacgccctcatcagcgacatttccgttgggatgcagcagcgcgtggagatcttgaaaatgctctaccgcgacaatgagatcctgatcttcgacgagcccacggctgttttgacgccgcaggagatcgacgagctcatggagatcatgcgcgggttcaagaaagagggcaaatccatcctcttcatcacccacaagctcaacgagatcatggcggtggcagaccgctgcaccgtcctgcgcaagggcaagtatatgggcactgtggagatcaaggacaccaccaaggaagagctttcccgcatgatggtgggccgtgatgtccagcttcaggtcgagaaaaagcctgccaaccccggcaaggcggtgctggacgtgaagaacgtgaccatgcacaacagccagagcaagaaagactccgtcaagaacgtttcgttccaggtgcacggcggcgagatcgtctgcctggcgggcattgagggcaacggccaaaccgagttcatctacggcctgaccggcctggaaaaactgtccagcggcaccattacgctggacggcaaggacattacccgtgaatccatccgccagcgctccaaggacggcatgagccatatccccgaagaccgccacaagcacggtctggtgctggattacagcctggagaacaacatggtgctccagcgttactggcagccggagttccagaaaggcggctttatccaaaaagagaaagtgcgggagtactccgataaactgatcgcccaatacgacgtccgcagcggccagggcagctccaccatcgtgcgcagcatgtccggcggcaaccagcagaaagccatcatcgcccgcgagatcgacaaagaccccaagctgctggtggcggtgcagcccacccgcggcctggatgtcggtgccattgaatacatccaccggcagatcgtggccgagcgcgataagggcaaggccgtgttgctggtcagcctggagctggacgaagtgatgaacctctccgaccgcatccttgtcatgtacgagggtgagatcgtaggcgaatttgatcccaagaccaccactgtccaggagctgggcctgtatatggctggtgcccgcaagcaggggaaaggggagtaaacaggaatgaacaagaaaaaactttcccacagcgggctgcagagctctgtcacgagcgtcatggcggctctgctgtgcatcgtcattggtatggcagtcggtttcctcgtgctgctggccatcaatccggcccacgcgtggggcgacggctttgtccgcatcatcaagggcggcttccatgatgccccctatggcgtcggcaaggagctggccaacgcggcgcctctggtcatgaccggcctttccgtcggcttcgcctttaagacgggcctgttcaacatcggcgcttccggccagtacacgctgggtgcctttggtgccctgtactgcgccatcatgctcaagctgccctggttcgtctgcctgctggtggctaccatcctgggcggcatctggggtgcgatcccgggcttcttcaaggcctacttcaacatcaacgaggtcatcacctccatcatgttcaactggatcggcctttacctcgtcaatgagctcatctaccagaacggcaccggccccatgtacgatgtgcgcaacacccgtaccctgaacctgggcaagagcgcggagctgtccaaggcattgatcccggactttggcctgaacaagatgttccagaccaacagcaccaccattgccatcttcctggcggcagccgtggcggtcctgatctgggtcatcctgaacaagaccacctttggctatgagctcaaggcggtcggcctgaacaagagcgcggcccgctacgccggtatcaacgagaagaagaacatcatcctctccatggccattgcaggtgcgctggccggtttcggcgcaggcctgtattacctctccaacgtgtcccagtggaacccgctgaactccaccagcctcccggccatgggcttcaacggcatttccgttgccctgctggcaagttccaaccccatcggtaccattttctctgccctgttcatctcccacatctcggtcggcggctcgttcctttccaccaagtattaccccaccgagatctcggacctcatcagcggcatcatcatctatctgtgcgcattctccatgctgttccgcggcaagatccacgccctgctgttcaagaatgcggataagaccaacgtgaacgcagagcctgcccctgcagaaaacaaaaaggagggcaagtgatatgctgcttctgatcaaatataccctgctgtatggcatcgtgctgatgctggtcgctctgggcggcatgttcagtgagcactccggcatcatcaacatcgcgctggaaggcatcatggtcatcggcggtgtggcgggtgtcctcaccctgaccatgctcccggcgagcctgcccttctggcttatcgtggtcatcgccgtggtggtggccgcgctggcaggcgtgatctacagcctgctgctggcctttgcttccatcaacctgaaagcggaccagaccatcggcggcacggccctgaacctgctggctaccgccgtggccgtcgtcattgccaaaaacttcagcgacagcggcagcgccaagctgaactactccaacaagccgttcctgttcagcatcggcaagctggaactgagcatctttgtgccgctgggcatcatcctgctcatcatcagctatatcgtgctgtataagacccgcttcggcctgcgtctgcgtgcctgcggcgagcatcctcaggcagcggattccgtgggcatcaacgtgtacaagatgcgctatgcaggtgtcatgatctccggtgcactgggtgccatcggcggcctggcctatatcgtgcccccggtgcagacctggaactttgaggtcggtgtggcgggtgcaggcttcctggccatggccgttatgatcttcggccagtggaagccgttcaacatctgtggggctgccatgttctttgccgtgttcaagagtctggcaaacattgcggactccacgttcctggcacagttccactggtccagcaacatctacaacatgatgccgttcatcgcctcgatgatcattctggcatttacctccaagaacagcatggcccccaaggccgagggcatcccttacgacaagggttcccgctgagaggagcgtgacctacgatgcgtatttatgatctgatcgcaaagaagcgggatggcggtacccacacccgggaagagctggaagccatcgtcaacggctttgtcagcggcgaggtagccgattaccagatggcggcctggatgatggccgtttacctgcgtggcatgaccgatgaagaaacggctgagctgaccgatgtgatggcccacagcggcgtcatggtcgatctttcgcccatccccggcatcaaggtggacaagcactccaccggcggcgtgggcgataagaccaccttggtcattgcgcccatcgtggcggcctgcggcgtcaagattgccaaaatgagcggccgtggtctgggccacaccggcggcaccattgataagatggagagcgtgcccggcacccggacagccctgacccaggaggaattctttgcgcaggtgaacaagatcggcctctcggtcatcggtcagagcgagggcatcgccgtggcggataaaaagatgtacgccctgcgggacgtgaccgccactgtcagctgcatccccctcatcgcctccagcatcatgtccaaaaagctggcctccggctcggacgccatcctgctggatgtcaccaccggcacgggcgcgttcatgaagaccgtggaccagagcattgaactggccaagctgatggtctccattggcacccaccatggccgccatgtggccgccatgatcaccgatatggacaccccgctgggccataacatcggcaacagcctggaagtgatggagagcatggacgtgctcaagggcaagggcccggccgacctgaccgaggtctgcctccagctagccaccaatatgctggtgctggctgataagggcaccccggcggaatgccgcgccatggctgaggctgtcatcgcggacggctccgcctttgaaaagtgcaagcagatgttcgcggcccagggcggcgacacccgcgtgctggacgattacagcctgtttgcaaagcccgccgccagctatgagctgctggccgagcaggacggctatatcatccagaacgatgccgagaagatcggttctgccagcgtgctgctgggcgcgggccgccagaagaaaggcgacccgctggactttgccgccggcatcgtcctgcacaaaaagcgcggcgctaccgtccacaagggcgagagcctggccacgttctatggcgcgccggacaagtttgccgccgccgcggaagaataccgcagcggcctggtctacggcgacacccaacccgaggaagccccgctggtctacgccctcgtcaccaaggacggcgtggagcggtacgaccagtaagcggtttcgttcaagatgcgagcaggagcctgagatgtttcgggctcctgctttttgcgtgctgggtgcggaaattttaaatctgcctaagattcccctccaaaacccctgcatttgttggagaatgcccgcatttggtggaactttctgcccggatgtgctatacttagatttgatatccccgggcaagggcagagcacccgcctgtgaggaaagaaaggattttggtatgaagatcgttttggtaggcggcggcaaggtcggtgcggcattggcacgccagctgagtgaggaaggccataacgtgacggtggtggacaccaataaggcccgtgtggagcacattggcgagagctacgacgtcatgagcattctgggcaatggttcttccatcaccaccctgtcggaagcgggcgtggaggacgcggacgtctttattgcggtcacgggctcggacgagctgaacctgctgtgctgtatgttcgccaaaaaggcgggccactgccacgccattgcccgtgtgcgcaacccgtcttacagccatgagctggactttatcaaaaagcagatcggcatttcggccatcatcaacccggaaatggcagcggccaaggaaatttcccacctgctccgcttcccgggggccagcaagatcgatacctttgcgggcggccgtgtccgcctcattaaatttgcgctgaccgaacagcaggggctggacggcgtagccatccatgagatccccacccggctcaagagcgacattctggtctgcgccgtggagcggaacggcggggtcatcatccccaacggtaactttgtgctccagaacggcgaccaggtcacgttccttgccacgcaggaaaaggcccacgagttcttccagcgcatccacctgccggtgcgcccggtgcgcaacgccctcatcgtgggcggcggcgccatcgcgtactacctgagccaggagctgctggaaaatcatgtccgtgtccggatcgtggagcgggacccggcccgctgcaatgagctggcagagtccctgcccggggctcagatcctgaacgaggatggttctaatcgcgagttcctcctctccgaggggctggaatccaccgaggcgttcgtggcgctgaccaacatcgacgaggaaaacgttttgctgaccctgtttgccaaaaagcattcccagggcaagctggtcaccaagatcaaccggctggagtttgacgacattctggccgggctggatctgggcagcatcgtctaccccaagtacatgacctgcgattacatcgtgcagtatgtccgtgccctgcagaacgaggcgggcaacaacatcaagaccctctaccgcattctggacgaccgcgtggaagcactggaatttaccgtccatgaggagagcaaggccacgggcgtgcccctgagccagctccacctcaagaaaaacctgctgctctgctgcattacccgcggcaatgagatccgcatcccccgcggcggcgaccagatccaggtgggcgacaatgtcatcgttgtcacgctggagcacggcctgcacgacctgcgagacattgtggaagactgacggaggacatgacgtatgaattatgcgatcgtgttccggctgctgagctatattctgttttgtgaggcggcgctgctgctgctgcccgccatcgccagcctgtgctatggggagtggagcgtgctgggcgtctttgtgcttacggcggcactctgcctggtgctggggttgctgctgcggcggatcaagccttccagcaaggtgttctacatgcgggaaggttttgccaccacggccctgagctgggtcgtcatcagtatcatgggggccatcccctttgtgctcacgggctgcatccccaacccggtggatgccatgtttgaaacggtgtccggttttaccaccacgggtgccagcatcctgcccgccgtggaggggctgcccaagggagttctgttctggcgcagcttcacccactggatcggcggcatgggtgttctggtcttcctgctctcgctgctgcccctgaccggcggctcccatgtcaacctgatgaaagccgagagccccggcccccaggtggataagctggtgccaaaagtacagtccacggccaaaattctgtacggaatctattttgcactgaccgtgctggaatttctcttcctgctggtggggcggatgccggtgtttgacgccatgctgacggcgttcggcacggcgggcaccggcggcttcggattcaagaacgacagtttcggcagtctttcgccctatattcagtgggtcgtgaccatcttcatgatcctgtttggcgtcaacttcaacacctatttcctgctgctgctgcgccggttccggcgggcagccgccagcgaagaagtgcgcggctacttcctcatcattctggtggcaatcggcatcatcaccctcaatatccatgggatgtacgacagcctgggtgtggcgctccgccatgcggcgttccaggtgggctccatcatcaccaccaccggcttttccagctgtgattttgacctctggcccaccctctccaaggaagtgctggtcatgctgatgttcgtgggtgcctgcgcgggcagcacgggcggcggcatcaaggtgagccgcatcctcatcctgggcaaaacgctgggcaaagagctcaagcaggcccttcatccccaggtggtggccccggcccggatggacggcaagctcatcaaccatgagaccatccgcgccaccaatgttttccttgcggcttacatctttatttttgccgcgtcgctgttcttgatcagtctggatggctttgatatggtgaccaactttaccgccattgccgccaccctgaacaacatcggccccggcctcaatcaggtaggccccatgatgaactttggcggcttctccaaccctgccaagctcgtcatgatctttgacatgctggccggccgcctggaaatcttccccatgctggtgctcttcctgccggacacctggcggaaattctgaaaatcttaccgcaaacaaaaaaggcttcccgttttatcagcggggagccttttctgatgttggaaatcggttatagctctactttttcctgcgcgcgatattgcagcgcttccagcagggaatcctcgtccagcagctgcttgcctgccaggtcggccacggtgcgggctacccggaggatgcggtcatgggcgcgggcggagaggcccagcgtctcatacgaggcgcggaggagccgctcggcagcgggggtcatccggcagacgcggcgtacttgcccggcggtgagccgggcgttgcagtgcacgccctcaaagccgggggcagcgtaccgctttgcctgaacctgtcgggcaaacagtacctgcctgcgcaggtcggcgctgctctcagcggaggcggtgccgtgcagctcgtcaaaggcaacgggatccatctccacgcagaggtcgatgcgatccagcagcggaccggacacccggctgcggtattgccgcaccgcgctcagggagcaggtgcatggccgggtggggtggccgtagtaaccgcacttgcaggggttcatagcggcgaccagctgaaaatggctggggtatgtggcactgcccgcggcccggctgacggtaatctgaccgtcttccagcggctgacggagcacttcgaggctttcgcgggagaactccggcagctcatccaggaacagcacgccgcagttggccagactgcactcgccgggacggaactgtgctccgccgccggccagcgagacagcgctggccgagtgatgcgggctgcggaacggcctggccgtgacaaggccccggcccttgggcatctgcccggcgatggaatagattttggtcgtctccacggcttcctcccgggtgagcggaggaaggatcccgggcaggcgcttggccagcatggatttgccggtgcccggagccccgatgaggagcacattgtgtccgccggcagctgccagcaccatggcccggcgggccagcggctgacccatcacgtccgcaaaatccggggcggcgttccaggcgtcggtggggtcaaagggagcgcagcggatgggggagatgggccggatgccccgcagggcgtccaccacttccagcgccgtgtgggcagggtagaccagcatggtgtctccgcaggcctcggctgcttcggccgcgttctccgcagggacatacagggcctgcaccccgctggcggcagctgtcagggccatgggcagcacgccggacaccgggcggaggctgccatccagtgccagctcccccagaaaggcggcctcctccggcgggggctcgatctgcccggccgaggagaggacggccagcagcaggggcaggtcgtacacggggccggtcttgcggacatcggccggggccaggttgaccgtgatgcggcggtccggccacttgaaccccaggttgcgggcggcggcgtggacacggtcgccgctttcccgcacggcggaatcgggcaggccgacaatggagagggcgggcatcccacccgagacgtcggcttccactgcgacagcaaagccgttgagaccgttgagaccaaagcttctgataacggaatacatggcgctccttttgcccggagggcggtcaagagagagaatggttaagaaatggtaaagaatggtattggacgtcaa

SEQ ID NO: 126 - DNA, 11781 bp, unidentified
  source 1..11781: mol_type = unassigned DNA
ttatttttccgccgctttgcggagcaggtccacggtgtgttcaaaagccacaccgcggacatcaatgatccgggagttttccgcgattgctccggtgatttcctcccggaattttccggactgttcttccgtgagcaggtttttggaactcagggagcgcgtgatgagctggaggacgtaccctgtttccacgaaagactggcgtcccacggcttttttcatggcttccatgaattccggggcgtgttcgggcggcaggccggccacggccttttcataagcgcggatgaaggaatccaccggggctttggaaacttccgtcttagtgaggtcaaagctggattgataagcgagagctccttcttccgccagttgaagggcgttttttccgaatttgttgacggcagtcatatccgctcctttttccagtagcagggccgccacctggaaattaccgcgcatggctgccagcatgaggggcgtaaagccgttgccctcccggttgttgatgtctgctttcctttcaatcagcatgtcggacaggcggtccagcccgctccaggaagcccagtgcagcgcggtccacccgtccttgtcctttcggtcgatttccacgcgggggtcttccagaagccggtccagatagggggcccgagtggcttccagcttcagcgtggtctcaatgttgttgtagttggcgtagcatacccacatgacaggagttctgccatggggatccgtcatgttgacaaaagcctttccttctgccgcagccagttcttccccttccttcagggtttgttcgaattccttcatccccttgactcgggcttccttctcctcctgttcggaggaagcgttgacttctttggcctccgctttcttcattacggtgataaggtccagggccgggttgggatctccagagaaagatttggagaccaacaggctgagaccgccgaggagggagctgaaagctaccaggatgagggaatccacaatgatgttgcgcgtgtgctggttcatggtctcgtaagttcaggagttggcttccgtaaattcttccgccgtcagggcgggatccgtttccgcttcaatggcgctgatgggtggcgatgccgcgtcttcctcgggatggtccgaggtgatggtcctgcgggtcatgataatggcgatggggctgattacggccatggccaggtaaatggtccacatgaattccggggagtcccagaagccgatgtgcccggtatccatcttggcgcagatgccgtcatagcagaggtaggcgacgagcaggccgccgatgatgccattgatgggtttggcgatgaacatgggaagcgccgccagagacatgtaggaggccactttgtctttcggagctacccgcgccacatattcggagaagcggggggagaagagcagttccccgaatgcgaataccaggatctgcgccacaatggctaccagatacgcctgagagcgcgtttcaatgccgggcaccaggtagtaccattcaatgggaatggccatgaaaacgagagagaaagcggagatggacatgcccgcaatcatgagaccaacggtagagaagcggcccagcaccggaatgagcaggatgaggccggagacgatgatggccgggttgacggcattgatggagcctatggcaaagtcgtcatatagcgtacgcacgtagtatttgggcatcaccaggaattgcagcgtgaaaacgatgcgcacgcccatggtcagcacaaggaagaggataagtttgcggaaggcggattccttccacacctccatgaagagctggagaggtctgcggaggggggcattgatgttcgcctcccgttcgctgggttccgcgtagttgtcttcattaataaaacgggtggtgatgcagcccagcagcaccatcagcgttccgaagttgataatccagtatccgccgtccacggcgccgaagtgcttgcggaaaaattcaatcaggaacacgttcgcgatgacggcggaaatgttcatcagcaggtagtagatattgaagcccgtggaacgcgctttcagcggagtgaagcgccggatggaagtttggatgacgggggacatgaacgccgtgccgaaggacataatcagaatgcccgccatgacggccagccttccggagtccacggttgggctgaggtccggaccgaagcccatgataaggcgcccggcaatgaggatgatgaagccgatcaggtaagtgcgccgtatgccgatgatgtcgcagatggaacccaccgcgaagacgaaggcggagatgaaaagggtgtacaggcctacccagagggcggcgtccgcatcgttgaagctgcaatagtctgtcaggtagaggacgaataccgtaatcatggaaaaataggccattccgtcgaagaactggacgacgttggtaagccagaaatccttggatacggttttcaggatcttgaattccgaaaaatatttgaggatggggtttgcggactcattcatggagagatggaaacggtaaggaaaagttgacgacgatgaaagagtgggttacacgcatccccgtttcaagatttttttctcccaaaggccggtttgaccggaaaaatgcgcttcatcgccggggaaaccgctatctgggcagaatgcgtcggaagcctgccacgtggcaccatgacaacgctttcaggcattgttccacagccatggcgtccgaaggcagcacgggccacagcccggcttcctttagccctgatttggctatttccgccgctttccattcgcggaactgggagggaagggcggagaaagtgaaaaaggcccagcaggccagcccgatggccagcgcgatctggaatttcaacagtccggccgtcagcattcccagcaggataagagctgtgaaaaaaggaatcatcgtggcgcgcgcagaggcggttttgcgggcttttgccgcctccgggtcttcccggaccaggctgctcatggcccaggtatgggctacgcaggccagccggcctgcggtcaccttgccttcccatgccggaggaaggctgatgaatccgttttcatccactccgggaaaccgggctttctccagtttccgctggcgtttttccgcaccgtccaggcggtggattaatcccgccgggccggggaagccgggcagttcccgggattcgtaggtgcgcaggggaatgatgcctttggtgaaacgcagcgcggcaatgacaccgagcacgaccacggaaaggaaaatcactactgcgaatagcatagacggttttttctcatatgcccgtgtgtccgtcaatctctccggctggcatgaagccgtccttcccggccagcagccgggtacgggtgcggacatcgttttttccttcttttcccgcccggaacgcttggaaaacggagggatggagcttatgtcggaatgatctgcagttccgggtgttcctctgggcgggcacaacattccggcatggattttcttcatgccggaggcgctggatttgggttgattttccggcgtttttcatgtaatggctgaccgcaatggtccatattcgggaatgcatgaggaggtggctgccgtttgtcataatggcggcctccctgggtgtgtctctcgcccaggatgtagcgagccccgatgccgcggatctggatttggacctggtcaaactgaaaagtggccccaagggcagacagagggaagccatgaggaaggtcctcctgcttgtgcatctgaagcaaaaggaaacgtggctggcggaatccacgggggatgaggccgtgcatctggcggcggagatttccttccgccggtatttggcttcagtggatatgggcggatgcccaggggaattcaagtgcgctttcctgcggtatgcaaagctcctgaattcctttgaagaaaaagatttgaatagtgtcgcggattttcctgcggtccctctgcaggctgccggaagagagctgttccgggtgctgcttacttaccgtctggagccggagcatctgctggaggaaatgaaagcgctggtggatgaggaaattgagggtaaggaggagctgtctgcaggacagatgatggatattgtccggggaatgcgggaagccctgcaatccggaagccgcccctttccggcggaaaggcctccggaagacagggtttccgggatgtagcggcttttcatggatggcatgccggtaccgtgaggaatcttgtggaggcatgtcggaaagtccgctccggctattccggaaggaaaatggattaagacggctgtacgtcacggtttccaggcggcggccatcagagtctggaaatggggcgggtccggctccctgtccacaatatccgtgtggatgttccggaatcccgcttccttcagcatgctttccagggcggcgggcgtgaagcccagccagcggtccgcgtaaagttcacgggcttcctcctgtccatgctggagcagatccagcaccaccaggcaaccgccggatttcaggatatcccacgcagcttccagcgctctggacggcttttgcgcatggtgcagggcctggctgagcagggccagatccaccgtgccgggtttaatgggcggcgcttcgatatcgcccaggcggtattccagattgtccagcccgtgtttgcgcgccagctcctgccccagctccaccatgctgggggagttgtctacggcgatcacctgtttggcgctgggggagatgagctgggaaacgaaaccttccccggctcccaggtccgccactacgtcatagttcagaatgcggagcagagcaccggccagcgctttccaggaacggccgggcgcgtagttcttgcccagacggcacactacttcgtcaaaataggcctgggtgcggtttttgcgcttgtccaggataacctgaagggcttttttgtccgtttccgcctccggcaattcctcgcaggctttcagggctacattgtgcagatcacctgccagggaaagagtgtaaaagacgtttttgccggaacgggcgtcctccaccaccccttcctgccggagctgggccagctgggtggaaatgcggctttgccccatgccgagaatttcctgaagttccgcgacgctcagggattcttcattcagaacgttgatgatgcgcaggcgggtgggatctgccaggagtttgagcgtttttagggttgacttcatagcggaataatatatcaacacatcgagatttatcgatatgagtagaaacacccctcacatctttacgtcggaatccgttggagaaggccatccggacaaggtggccgactacatttccgactctattttagacgcctgcctggctcaagacaaaactagccgcgttgcatgtgaaacgttggtgaagagcaatatggtcatcattgccggagagctgacgaccaaagcggtgatcgatccggaaaaaatcgcccgccaggccattcgggagatcgggtactgcaacaggcaggacgacgacgttttccatgcggataccgtctttttcacgaatttgctcacggaacagtccccggatattgcccagggagtggacgcccgggaggcggagggcaagggccatgcggagcagggcgccggagaccagggcattatgttcggcttcgcaacgaatgagacgccggagctgcttccggcccccatcgtgtttgcgcataaactgctcattgagctggccaggaggcgcaagcgcgggcatgtggactggctgcgcccggactgcaagtcccaggtggctgtggcctatgacgaagacgggcgtcccgcgcatattgaaaacgtagttatttccacccagcacacggaagacgtggaccatgacacgatttactcatattgcgtcaaactcattaaaaatgtgcttcctgcggagcttctggatgagaggacggaatatttcatcaaccccaccgggaaattcgtcgtgggcggtccccacggggattccggcctgacgggccgcaaaattattgtggacacatacggcggcatggggcgccacggcggcggagccttttccgggaaagacccgtccaaggtggaccgttccgccgcgtatatgtgccgctgggttgccaagcacattgtggctgccggactggcggacaaatgtgaattgcaggtggcttacgccattggctaccccgctccggtttccatccgggtggatacgttcggtaccgggaaagtggaggaaatatccattgaaaatgcgctggaaaacatcttttccttcaagcccgcggatatggtgaaacagctgaatctgcttcagcctatttaccggaagacgacgcactacgggcatttcactaatccggaactgccctgggaacagctggacgaaacgcgcctggccttcctgaaacaacttcttcattaatcctacgacaacgcttacagacatgttttcagaaacggaacaatacaaggtgcgcgatatcggcctggcggatttcggacgcaaggaactggatattgcggagcatgagatgcccggcctgatggccgtgcgcgaaaagtacgctgccgccagacccctggagggcgtgcgcatcatgggctccctgcacatgacggtgcagacggccgtgctgatagaaacgctgacggctctgggcgcttccgtccgctgggcgagctgcaacattttctccacccaggaccacgccgccgccgccatcgccaaatccggcacccccgttttcgcctggaagggggaaacgctgcgggaatactgggactgtacgtggaaggccatgaactttccggacgggctggggccgcagctgattgtggacgacggcggagacgccaccctgcttatccaccgcgggtatgaaatggaagaaggctccgactgggtggataccccgtcggaatcggaagaagaggaagtcatcaaggctctgttgaaaaaaattgccgaggcgactccgggtatttttcatcgctggcttcccgagctgaaaggcgtttccgaggaaacgaccaccggcgtgcaccgcctgtaccagatgcaggcagccggccgtctgctgattccggccatcaacgtaaacgattccgtaaccaagtccaagtttgacaacctgtacggctgccgtgagtcccttgtggacggcatcaagcgcgccacggacgtgatggttgccggcaaagtggccgtcgtctgcggctacggggacgtgggcaagggctgcgcccagtccctgcgcggcatgggagcccaggtggtcgtgacggaaatagaccccatctgcgcccttcaggcagccatggaaggctaccgcgtgctgacggtggaagacacgctgggctgggcggatatttacgtgaccaccacgggaaactgcaacatcatccgcatcgaacacatggaaaagatgaaggaccaggctattgtctgcaacatcggccatttcgacaatgaaatccaggtacacaagctccagacgtatcccggcatcaggcatcttaacatcaaaccccaggtggaccgctacacgttcccgtccggcaacagcctgtacctgctggcggaaggcaggctggtcaacctgggctgcgctacgggccatcccagcttcgtgatgtccaacagcttcgccaaccaggtgctagcccagctggaattgtggaatacccgtaaagaccgttccgtgggcgtggaagtgctgcccaaggtgctggatgaggaagtggcgcggctgcacctcgccaagatagggtgcaagctgactgtcctgcgtccggagcaggcggactacatcggcgttccggtggaaggtccttacaagccggacttttacaggtattaaccttgtcaaggttttcttttcccggccgttccgcgcaggcctgtccggcggaacggcttttttgttttcccgatgatggaagggagggaggcagggtatcagtacgtttatttttcttcctgttttttatgcaggatccctgctgttagtgaaaaaaaggaagactttttatccggtctttaatgttcaaatacctttgcagcaggcaaaacgggagcaatcttggaatgctgaccagccaaagccccggcctgcattgcaggatgttccaaaaccatttgagtttggtaagaaggctgttatcgaatgaagcataggggaagagcaggagccttctctgttccgcctgaatcagcctcatcaggcggtcggcggcctggtatgttatttccccggacttatgctttccgtatacctctttcatgatcattatccaggttgttatctggaattccgatctcttgatcagggttgtcctggggttcccgctcttaaaattgcagatattgctgttgtgtctccgatagtacgaacaccgtttgccggatgcgaccatgcctgattttttcaaataggcgcgcatggacagcatcatatcgtccgaaatgccgggacctgaaggcaaatactcgaagtcgctgaacaaagacctgtggtacatggcatttccgccaaaacagctgtaaacatgggaaatgtcaaaaatacattccctgtaaggtttgacgacgacggaatctgagtctggcagcatgcgtccataggcgggttgtccatcttcatcgatttcattataagaatggcagtaaaccagatgaccgggatattgttccgccagagacgccaacgaggaaatcctgtcttcccgggcgatgtcatcgccgtcaaacttgataatccattccccccgggacaaatgaacggcacattgcaaattccctgcaattccccggttgctttcgttacggtggagaataatacgccgtccttctccctctttttccaccatttcttccaggcattcaaaagaaccgtcctgagaaaaatcgtccgaaataattatttcccattctcctggataatcctgttttaaaatagcccggaactgttccttgataaaacgtttctgattgtaacaaagaagaatggctgaaatcatgaaatcgaataaacagtttaagtttttttaaactgtctaaaaataacgaattccaaattcgattggggaattccaaatccgctgtaattaaaaagagattgcgtgcggttgtttctgcatgacaggagagcctcttcgcagaaaggaaataaaactgatgatcaataattttctttgaaatacggactttccggcaggtatggatgtttctgccggaatgggaattgatggggttacccggatggaatcatgaagacggaagatcccggtcattggggaagcttattttcagaagttcctttctttcaaaatttaaccttgactccggatttggaatccgtgtaatatgccccgcactctttttactgtgcgtgcactcagagagcaaatccctttttttcaataatttatgttgaagggtacggtttgtttctcaacatcaaacggccatggatacttcttcccggaaaacgtctcttgttgtgttgttcaaccatcagtatgaacgtaacattccggtaatcagagagctttattcaagacgcttttccgggttgcttcaattaatgccctactacaagggagatgcccctgacgtatgttccgtcttcgggaattctttccagttctataattatattttgcagtccagggaaagaatcaggcggttggatggcgattattttcttattatcggagacgatcttcttttaaatcccaggtttgacgaattttcaacgccgtccctgctgggaatccatggggaggatacgtgttaccttgacggttttgtggatgtttctcttccggtgtgttaccggggaacggcggaagcccaccatttttccataacccctcccggtattgatgcggaaagcgtcaacaggaacgttccgtcctatgaggaggccaggcggattttaaaatccaggaacctcatgcggcatgatgaattgtcgcgcgtacgcatgtttctgcccaaatggagctccggggggattcatgcgaattggaaagtgttgaagggcagggtatggcatctgctgaattactggaagcaccggattaaaaaataccggtattcctatcctgtcgttttcggatattcggacattgtctgcattccgaaagggaaattggacgatttctgccgtatccttgaagtgttctccgcatggaacatgtttgtggagctggccattcccacggcgttgcagcttcttcccggaacaaagctggctacgctggaggacactcagtacaagtcgggaaacgtctggtttccccaggatccggaacactttgaagccatgaatgccgtcattgacgggctcgtgtcctcttccggaggagacctcggcaagctgcttgcctcctttccggaggaatacctgtatctccatcccgtgaaattgtcccgcttcgccagatagtggcgtcaataaattggtctttttatcccatgatgaaatatgctgtgatcggagccggggtttccggattgtccatggccggaatgttgctgaagaaagggcatgaggtggtcgtttatgagaggggttcccggcccggcggcctgattaaatgcacggaagtacaggggaacctgtatcatcgtgtgggcggccatgtgttcaattcccggcggcaggaagtgctggactggttttggtcccggtttgacagggagcgcgattttgtttccgcccggcgacgggctgtcatttccctggagggcggggatgtggtggattatcccattgagaaccacctcgaccagtttcccgaggccgtccgttcctccatcgtccatgagctgctggaactttacaggaatcctcccgcggagccccgctccctgggtgagttttttctgaaccgtttcggaaaaaccctgaacaacctttatttcacgccgtacaataacaaagtgtggaggcaggatatcagccaaattgccatggattggctggaagacaagcttcccatgccgagcgtggcggaaatcctgttgaacaatattgggcacatcaatgaaagcgccatggtgcacagttctttcttttatgcgaaaaacggcggttcccagtttctggcggatacgctggctcgcggccttaaggtcaggtaccggcaggaagctgtaaatatcctcccgaaggacgggaaatggctcgtgcagggagaattgtttgacagagtcgtctttacggggaatgtcaggcagcttggggattgtttcccctgcgtggatgaattgcgcccgtttttcccccggatttcagaattgcgctctcacggaaccacttccgtgctttgccggatttcccccaatgattacagctggatttacatgccctctccgtcccaccgttcccaccggatcatttgcacggggaatttttccagaaataataataacggggacatcaccaccgcgactattgaattttccgagcaaatgacggaaggggaaatcaggcgccagctggagcttattcccttttcccctgtgtatctggcccatcactgggaagaatatacctatcccgttcaggatgcttccagccgaaccctcatacgggaactaaaggagcgcttggaaccgaaaggcatttatttattaggccgttttgcggagtgggaatactacaatatggatgcggccattggcgcggctcttgatttggataaaaggctggcagcggagcagatgccacggggataa

SEQ ID NO: 127 - DNA, 13744 bp, unidentified
  source 1..13744: mol_type = unassigned DNA
tcaattctttatcggcaaccgttcccacagccaacgtggaatcattcgccagaagaataccaataggcgatagcgtccgtcaattactgtcactcgttttttgtgtttcaacgcccggactatatattccgccactttatcggcatgcatcagcatcggatacttgccgtttcgcagtaaatccgttgctacgaaccccggacggatgtcggtgaagcggatattaagatgctgcatccgtgcgagttgtgccaaagcatcgatgtatgtattctgaaaccgtttggtggcggagtaggcgggtgcgactcccaatcccttggtacctgctatggagctgattacagcgatatgtcctttttttgtctttttgaaataatcgaaagctgcggttaccattcggataaagccttcgacattggtacgtgcggtattcagttctatttcaggttccaggttcctgttctgataacctacgccggaactgaggaagaataaatccatgccgcctaagcggtctatcagttctgtaaggtgtaagacggcattttcctttgtcacatcaagatgctgtatctctatctgttggggattggcttgctgcatgcttcgcaggacttcttcccgtctgccggcaatgcctatgcgccagccttgttgcacgagtattccggctacttcctgtccgatgcctgaggtggctcctatgatgatagcttttttcatgggaagagattatccgataatggttgctacgatttttcttcctccgccacggttgcggaattcacaaagataaataccctgccagatgcccatattcatccgtccattggtgatggggatggtcagttctgctcctacaatggtagatttggcatgcgccggcatatcgtcgtcaccctcgcaggtatgttcgtagtaaggctcacgctccttgacaaggttgttgaagatagctttcatatctgtctgtacatccggatcggcgttctcgttgatggttagtgcggcacttgtgtgtttgataaacaagtgcaatagtccggtcggaggcaactgtggcaagttacgtactatttcttccgtaatcagatggaacccgcgtcgatggggggtaagggtaaattctttctgtataatcatattttctattctttattccattggccgtacttggcaaggaaacactactgtgaacgtgctacctttatttacggtggaggttacttcgattgttccgttcatatgttccatgatagacctgcagataggcaagcccaatccggctccctgaatgaaagcatcagctttttcgaaccgttcaaatattatgccgagcttttcctcagggattccgcgccctgtgtcggaaacgcttattcttgtttcggacggtgtcgtctcgtacgaaatttcgacatagccctgtacggtatttttcagtgcgttcgatatgaggttgctcaaaacctgcttgatgcgcatcggatcttgctttatcaggttaggagttgccgggtagcgtttcttgagcgttacgccttcaggtacgttgggctggcattcggtgcaactttcatctatcaggtcggagaggttgcaccagaccggggacaactctatgtgtccggcttctatcttcgataaatccagtacatcgttgatgatgttcagcagcaattcgttgttgtggtttatcagggagatgtaatggttgcgttcctcagcatcttctatatggggcaggaggctggaaaagccgataatagcattcagcggtgtacgtatttcgtgactcatgttggcaagaaaggccgatttcaggcggtctgactcttcggctttttctttggcatctatcagcatggcttccgtggctttgagccgggtaatgtcgtagttgatacagattagttcgatactgttccgttcgggagcgtaggttttcactatcaggttgacatgtgtccaagtgtagctgccgtcttctctgagaacacgtacttctttattgaacttgtcttccataccttttgctgcattgttcaggaaaccgagcatggcgcgccggtcttcgggatggatatgtctgtacactccgatgattcgggacagaggagttccttcttgttcgccgatattgatgtaccagctgtgttgggcatctccttgccgggtgagtaagtcgtagtgtgcgtatcctactttggcatagttacctatcagttcgaagaaactttcgaattcctgtatcttgttgtaggctacggtggtttcggtcttatcggcattaatcaacaggtagttggcgggggtgtggttctcgtcgtacagcgtggttactttagttacgaggtctattgtaccggtcctggtttgtggattgtagtaagaacctactttcgagaagtcgtagcggaatgtgaaatcggcgtcttcatattttttcagtttctctttcatctctttcgggaagatagggttatcaaatatattgatacccagcaagtcttcttttcgttgcagatgaaacatttccaattccttatcgttgaggtctgtcaatactccgtctgtattgtagacttcaatgcctaccggaagatgcttatagatgttgtgcaagagttgttcgcgttgtcgcaacatctgtgtggcggacgacatataaggaccgtcctgtatttcggctatgccgtaaatcttggtctttccgttttcatcggttttttgcatacagattttgctgcggacccatgtcggtcctttgacggtatcaagcagatagacggtttcattcgtctgttgtatgttgtcgaaggaacggacggtagtatgcggctgttcctctctcagtatgcgcttgttgaaattttcaaaactgatacaaccgccttcttccaatcctaacaggctggcgatgggaccgtagtatatataattggcatcttgtatatcggctttccaccagcctatattggcgttgtgcattatttctgacagcaggttgtaatccttttcagcgtccatacatggatgtttagggttgtttatattatatgcgcatacaaaaatagatataattcgcagaaatggaaagaaatagggagcggatgttttattaaaagcggtacaataatgattttgttgaacttatctttgtcttggcctgtgaaaccgtgatgccagttattgataagagagcgtgaatttgcatgctattttgaagaatgatacgggtaataatgggagtaattaccgtaacaacaaccggaaaaatatggctttttaatgattcgcttgtaatttattcggagataagcggtatctttgttaccgtttacaacgcatttacccaacaaaacaaaaaatatatggaaaaagttattatcaattcgtacgaggattttgaaaagctggtaggtcagcaaatcggtgtttcggagtatgtggaacttacgcaggaacgcatcaatctctttgccgacgcaacgctggaccatcagtggattcacattgacacagaacgcgccaagaccgaaagtccttttaagagtaccattgcacacggttatctcaccctctccatgttgcctcatctgtggaatcagattatcgaggtaaataacctgaagatgatgattaactacggaatggataagatgaagttcggtcaggctgtactttccggacagagcatccgtctggtggcttctctgcattcgttggcaaacctgcgcggtgtggcaaaggcggaaataaagtttgccattgagattcagggcgagaagaagaaagcgcttgaaggtattgctgtatttttatattatttcaactgattatgcgcaaaatggtgtgcccccaatgcaaggtgggggcattttatgtcttgaacgggcagggagagcgtttgcccgtatatgtgtcggacaaaggtgaggtcgtaccgaaagatccggcagcttctttggaagggtatgacctggaagaggtttactgcttatgctgttcctggcacgggactccgaaacgtctggtgaaatattgatatatacgctctttccataaatgcctgcacgctgcggccggatgatagagcagcatgcgcggtccggcatatcgcatgacttcctgcatccgcttcttcatctccggcttgtagcaatgtaccgggcatagtctgcaagttgttttattctctccgaacgggcagcgcgacaggcgcatgcgtgcgtactccagcaattcgagacattgcgggcagagttccttgttgccctctttcctgcggcaatagaggcggatcatctgttctacggtgcgttgttcttgggcaatgcgtgattggcaggtcttattcatccatattgcgtttcaggtaaaccatatctttcagttgtttgcccgcttcataaatgggatggtcgtagttatccgtaaagaagtccgggatgcggtgggaataggtaaatccgcagttctcgtaaaatggaatcgccaatgggctgtctccggttcctacgagcattgtccggcatctgcctgcataatgcccgaaaagatactgtatcagtttcttcccgtatccccgacgttggaattgcggataaacggcaatgttctttatctcaaaaatatcttctgcttcgcgggtgacgacacaggatgctctgatactgccgttctcggacaacacgaacatttcaccgcgttccagataacggtctatcatggattcttgttcatcggccaaaagcagcaggtcgaggtattgtttcttattatggagcacaggctgtatacttatcatttcattgctgtttgaacgggtttgtatggcaaagataatccttatgggcatagaaccaaacaaaacaccaggaaatattgttgatttccaacatggaatagattaatggttatggataaaatgaagtctttgttcttttttttgacgctttggacatttttgccactttttgcaggctatgctcctgataatgtgcaaactgccctgacgaaaatgtatccttccgccaaaggggtagcctggtcgcaggacgaggagtattacgttgcggattttatgatgaacggatttgataccaaggtctggttcaatacggatgcagagtgggtaatgaagcaaacggattgggaaaccctggatgaggtgcctgccgccgtattcaacgcttttgcagccagtcagttttcggacggagtggtacagaatgttgtttgggtgcaatttcccaaatggcaacctattgtagccatacaggtgggcaggccgaacgtgcagataaaatatcagatattgtttactccgaacggtgaagttctccgccagcagaatatcacttacgcttacaatacgcttggggcaagtactttcctgtaatcagacgtgagacgccccgctgtcgggtaggcatctcatttctgtcgcttggtataaaaaacaaggctgtgtattttttatactctctgtttacgctatctttgccgcaaagaaagactttatcttatgaatcggactacttttctgcaagatgtttacagtgttgttgccgctattcctgaaggatgcgttgtaacctacgggcagattgccagtttggtaggcagacctcagtgctcgcgtatggtggggcaggctatgcacaacgtaccggaggaattgcatttgccttgtcatagggttgtaaacagctggggcagattagtgccgggttggacggagcaaagagtattgttggagaatgaaggtgtccggtttaagacaaacggctttgtagatatgaaaaagtctcaatgggaatttatgaaagaacaataaactaacgaataataatcgaaatatgaaatttataggtgcacatgtatctgccggcggcggtgtggagctggctcccgtcaatgcccatggaataggagcgaatgcttttgccctgtttaccaagaatcagcgtcagtgggtggcgaagcccctgacgcaggaaagtattgccttgtttaaggagaattgcaggaaatatgctttggaggcacgttatattcttccacatgacagttatctgataaatctgggacatcccgaagaagaaggactggagaagagccgtgcggcttttctggatgagatgcgacgttgtgaggaactggggctggaactgctgaatttccatccgggcagccatttaaataagatttcggttgaggcttgcctggacagggttgccgaatcgattaatattaccttaggcaagacgcaaggcgtaacggcagtcattgaaaatacggcaggacagggcagcaatgtaggcaatgagttttggcaactgaaacatatcatcgaccgtgtggaagacaagtcgcgcgtaggtgtctgccttgatacgtgccatacgtatacggcgggttatgatatcgtaaatgaatacgacaaggttttcgacgaattcgataagaccgttggcttcggttttctgcgcgccatacacttgaacgattcgaaaaaagcgttgggtagccgtgtagaccgtcacgacagtatcggcaaggggcttatcggcttggatttcttcaaacgttttatgaaagacgagcgttttaacgatatgccggtgatactcgaaactccggatgaaacgctttgggcggaagaaatcagcatgctgcgtagttttgaataattgtccggaaataaatgacgcggactttcgtggatgttattaattgtatccacgaaagtccgcgttatttgtgcccgaattatacgataatgaagtttattcgtttctcgtgatgcgtttgctgcctgctacctgcattattggttgaccttaacgtccttccactcaaaattagagataatctctttatcgcattgggcattctttgccttgatattcaaattctcgaaagtgaaatccttcaattcgtattggtcggactttctgacgttgaagaatatgtcgcagctcaggctgatattgcgcagcgtcacgttgttggcacgtgagagggggatgtccttgcggcctttgaggtcgaagaactgtgtccacggtttgatgagcagcatgcttttggcatcgcctgtgatgtcttccaccaggatgtattcgtagtgttgcggcgtatcgggacgcatcttcagccacaacaggcgcgtggcattgctgattttgcagcggcggagaatgatgttgcggttgtgtatcgactcgctgccgcatgtcagaccgctgtggcaaaagccgtatgtgcagtcttctatgataatgttggtgttgctgccgttattagggtccttatccgcccacgggcctttgccgcctttcagtgccacggcatcgtcgttgacggacatatagcagtttttcaccagtacattgctgcagacgtcaatatcgatcgcatcgctgctcggtgctttcaccggggcggcaggagcgaaaatatggagattcagcagctttatgttattgcaacggtagatatgcgtagtccagaacggagagttcatgaggcgtactccggagatttgcacatcgttactgttggagatgtaaaccaggcgggggcgcaactcgtccatattggtacatttcgggataacctgccggcgcagccagaaagatttccagtacctgtgcccgttgccgttgattgtgcctttgccggaaatggtaaatccgtttaccttgtcggcattcaccagtgcggcgaagtatttcaggctttgtccttctatgcgggtgttgacaatggtgaagttgctgatgtcgtcacttcctttcagcactgcaccttcttccatgtatagatgcgttttcggcttgaagaagatggagccgctgaggaatgttcctttagggatgatgataacgccgccgccattctcggctgcccggtcgatgacggcctgtattttctccgtttgcaggattgtactgtcgtttgccacaccgtaatcggtaatggtatacttcttgcccagagtgtcgatgtttacgatttcgttctgtctgaaccagtcgggaataggcgtgccgtcggggaatttctcttgctcggacatttgcaggctgataaatgccgtaaataggaatgcaatgattttcatggtttccgataaatttaaaatctacttatgaattatgttgcaaacataggaaacttagtgcaatgccggacgaaagacgttgatttaaattctgtgtaaaatgacttttcagcctgcttagaacacgcattccacacggttgccgtcggggtcgagcactacgctttcaaaatatccgtctcccgatgtacggggttctccgctgatggtatatccggcacttcgcagcttttccgtcagttcgagaacctcttctttgctgtcgagtgcaaaggcgaagtgggtcaaaccgagcctgttttccccgatgggagtattctgtacatcggtacggctcatcagctccaggtcggctccgcagtcgaagcggataaagtaggattcaaaccctttttgagggttgacgtatttctcattgcttgtacctttgaagtaacggatatagaattctttcatttcttccagacggaaagtccagatggcgatgtgatgtattctcataagtcaatctgtttttgttttatacgatgcgtattcatctacggcttccattgcaggtgtaaaatgggaaaaggattccccgaagggtcggtttcatctcttccgatgagttggaagcccatgtgcagatagaaccggtgagctttttcgttttgctcattgacgtccactttatagatatgtttttcgtggagtgcgtattgcatcaactgcttgccatatccttttccctgttcatcgggatgtacaaagagcatttcaatgagttcgtcgctcagccccataaaggcagcgatttttccttcccggttacggatgatgtaaagctctacggcctggaaatattggttccgtaccaatggcttgtagaattgtatgttctcttctgtcaggaaatggtgggtactgcgaacggaggcttcccatacggtgagcagttcgtcataatcttgcggggtgggtcgaaggattttcatcggatacttgttttggggttattaatagtgattactgttggtataaacgtcagttgccggttataatcggttacttcataggttagaagtctgctttttgagtgatgcttattctctttccggtcaccggatgtgtaaactccagcatttcggcgtgcagatacaggcgttcggctttccgtccatagagctcgtcgcctatgatggggcagtgcagtccgagcgggtgggcggcatgcacccgaagctggtgggtacgtccggtgcggggataaaaggcgatacgggtacggttgtccttgcgttccagtacttcaaagtctgttacagcgggcttgccatatccggtatgcaccatttgccgggggcggtcgagtgggttcgggcataatggcagttcaaccgttcccgcatcttgagaaacgctgccttgaagcaacgcaatatagcgtttgcctacactgcggtttttaaactgcgcttgcaggttttggtggacttgcttggtttttgcaaccaccagcagtcccgatgtagccatatccaggcggtgtacaatcaacggaccgtccgcatcgggataccgctcgcgcatcatgctgtaaacggaaaccacatcttccttgccgggtacggacaacatccctgccggtttattaaccaccgccagccattcgtcttcgtagataatgtccaatgttttcttgccggactgcaactctttcagaattgggttctcgtctacttcaagaccttgcagcatatgtcccaatataggctcgcacttgcctttgcaggcgggatagtaatgtccgtgatgccgtatttccgttttgggggattctccccaccagaattctgccattgcaacaggcttccacccgtgcagataggcttgttgcaacagcttgggtgcggcgcactcaccggctcccgcaggcggggttttgtgtacggtctgtccgaagatgtcgcaaagcgtcttgacttctccccgataattcagcatcttgaattgttcgaacagtttttgctgcaaggcggcagaacgttgcttacgttcgcttttcaatacctgtatgccggcctcataatcggaaaccgtttgctgtaagggagcaatccgctctttccaggcacgttccatgcgtttgtattcggctttttggaactgactttcgcgtatcagggcgctctcttcctcaggcgtcattggagcaccgttgggtaaagccgcttcgcgtcttcgctcttcccgtttctctttggcgcgtttcatctgccgtttggcttcttccagcgtttcttgggcagtttgccgcagggcagccagttgttgtacctgtcgtttgtattcttcgtcctcttccaacaggccgatgcgcgtgttgatttgcgaaatctgttcttcctctatcttgaagaacccttgcggctgcaacaggtcgtagaccggcggtacgaaaaacggatgcacattactgcccgccagtatgccggagaatgctgccaggtatcctgtttcaccctcttgagtccttacaaccagaacaccgaacattttgccctgcgccaactcttctttccacgcttcctgcaaaccgagataggcttgcacctctttcgctgctgccacgcaaagcggatgaggtgtatagcaaaaagggaaagtaaatctttccggcaatggtatgtctgctacgggggtatggaaatggtgcaacatggcgagggaagttaatcgtcaatcaaattatcattgtccgtattgataatgtagggaatgttgtcattctcctcttccggaacggacaggacatcttccgcatccttctgttgcggcaagggatgcggatacgctgatttctttttcttctttccgtatttgcgttccctctcccaggcagctttgcgcgcctgatactgttcgtattggttttccagatagttgtcggccataatctgtcgtttataaagtattcaacttttgctttccaaatacagagaatcagggtatgctctgtattattttcttcatgctgttaaattttttacgtctctgtgttcagtctgtatagactccgaaaatctgtttatcgctcggtgggaagtgagaactcctgccagtcgtattgttgcccgtttccgtcggctacggccacccgtatggtgacatttcccgtctttatccgctcgcctgcgctgatggtggcggtgtatttcacgccgttgtgaggggcgatttgctccaccattacaggtggtgaaatgtaaatgcgcttcatacctgtggtttcggtaaccatcggtaccacattatatatagtctgtttaccttcgttcatgatttcgaaaattactttgcttttctcgcccgaactgattacgtggtcacggctgtcgtctatgaaacggatgttgcgtatccttaggttatcgaagacgcttggagtgggatacgtttcgtgctgcggcttgtagggctccgttctttctatccggtaaccgtatgcctcttgtttgggagcagacacagcatttccaatggctgctccggcaatggttccgataattgtaccgatggccgaaccccggtaaccgccccgccagccgccattattgtcgcctatcagaccgccgatggcaccgccgacatttccgccgatggctgcacctgcaaatattgcaccgggatcgcccgataccgtttggcttgtgccgcaacccgacaggatgagcaacgaagcggttaacactccaatctgtctcttcatatcgttaagctttggttagttgtacaaagatagtgaaatatatggtaaatagcctgttctcttttactcttttgtttcttcttaatacataaaaccctcaggtatcataaggctatattctaaatgttgtgccacttagctggcacaaatgtgcctattaataggcacaaccttgcctattaaaaggcaaaggttggcatgtcataatgtattgctccaataataatcttcaaagtaagaatcgaattcaatggagaaagttactccgcactctttgagtatgtttatgatattttgttgctcggcaggagataatgcccgttcgccattgcggacacgatagtaggtacggcggctggaattactgatgacccggttgatgaagaagtgtgtttgtttggcggtgaggttttccagaatcccgagaaagcctctggcatacctcacctgcttattggagcaaaagtaagggcactcattcttgaacttggctaaatgcttgggattgatggcactgcaagatataagctcttccggcgaaagcctttctgccaattgcctgaggcaagtttctgctttattgcattgccggttgatacaccataggaaattattgggaacatctgaaaatgcaagttctttttctttcattatgaattgcggtttatgtgaggactctgataactatctgcaaatgtagccattcttattcttattaggcgtgagatgtttataaaaaaatctattattgctcttttatcaaaatgttatgtttatattcgcaaaaaaacagaaactgattattaaggaaggatattatgcttgcatatacatacatcgaacatggaagattcggtctgttggacaagccaaagcccgaattgaaggactctcgcgacgctattgtccgcgtgacacttggtagcatctgtaccagtgatttgcatatcaaacatggcagtgtgccgcgtgctgttccgggaataacggtagggcatgaaatggtgggcgttgttgaacaggttgggagtcgtgttacttcggtcaaaccaggcgacagggttaccgtcaatgttgagactttttgcggtgagtgttttttctgccaacacggatatgtgaataactgtacggatgtgaatggtggttgggcattaggatgccgtattgacggcggccaggcggagtatgtcagggttccttatgccgaccggggattgaaccgcattcccgattcggtgagtgatgaacaggcgctttttgtaggcgatgtgctggctacgggattttgggcggcacgcatttcggagatttccggggatgatacggttcttgtcataggagccggtcctacggggatatgtactttgctttgcgtgatgctgaagaaaccgaagcgtatcattgtttgtgaaaagtcctctgaaagaattcggtttatccgtgaacattatcctgatgtattggtgacggagccggaagagtgtaaggagtttgtacttcgtaacagcgatcacggaggcgctgatgtcgtgctggaagtggcaggagccggagacactttccgcctggcgtgggaatgtgcccgtcccaatgcggtggttacggttgtggcgctttatgacaatcctcaaatacttcctttgcccgatatgtatggtaagaatctgactttcaagaccggtggagtggatggatgcgattgtgccgagattctctgtttgatagaggcgggaaagattgataccacgccgcttatcacgcaccgttttcccctgacaaaaatcgaagaagcataccgcgtattcgaaaacaggctggacggggtgattaaagtggcgatagcgggaaaataa

SEQ ID NO: 128 - DNA, 9739 bp, unidentified
  source 1..9739: mol_type = unassigned DNA
atgaaaaatattctgatgaacgaaaacaatatcgggatcataaaattatatgagaaaaaggagatttcaattatgtgtggaattattggatttacaggtaaattaaaagcccaggatgtcttattgacaggacttgcaagccttgagtaccgtggatatgacagtgcgggaattgcatactttaaagataccggaaaaatttcacttcggaaaactgtcggaaaagtaaaagatcttcgtgccatctgcgatgatgataacaattctacgtgtggaatcggccacacccgctgggcaacccatggtggcgttaccaatgccaatgcacaccctcataaggtcggacaggttgcattgatccacaatggtatcatcgagaactatcatgatctcgccaccaaatatgatctgacggatgaactgatttccgagacggataccgaagttgccgccgcattgatcaataaactctacgaaggagatccaaaagaagctctgcgcaaagcagtagccgaaattgaaggttcctttgccttctgcgttctgttcaaggatcatccgggtgaaatttatgcggtaagaaatgtcagccctatggttgcaacatactgtgatgacggtgcttttattgcatctgacctgactgcttttatcgcatacaacaagcgttatttcatcgtgccggaatatcatattttaactatgactgcggacggcattacgttagaagatttagacggtcattccgtagaaccggaatatatggaagtaaactgggatgttaccgcagcccagaaagatggttatccgcatttcatgatcaaagaaattcatgaacagccggctgccatcacaagaaccattaccccacgtatcaaagatatgcttccggatttttcggaagatgccattgcggattccttctttgaaaatgtaagcgacattacgatcgttgcctgtggtactgcaatgtacgcgggaatggtaggaaaaaccatgatccagaaccgcctgcatattccggttaccgtggcaatcgcatcggagttccgctatgaagaaccggtaatcaatgaaaaatccatggtgatcgttgtatcccagtccggagaaaccattgatactttggaagctcttcgccttgcaaataaatatacaaagaaaacactgtctattgtaaatgtaaaaggctccagcattgcacgtgaaagcagctatgtattatatacacatgccggtccggaaatcgctgttgcaagtacaaaagcatacaccgttcaggttgcttctttttacctgcttgcatgcaaacttgccatgacacagcaaaagatttctgtcgaagaggcacgtacatttgttggaacactgcaggaaattccaaattacatcgaggaagttctagcacaggctcctgatattgaacagctgaccaaacgcatgatcaatgccaacaacgcgttctttatcggtcgtggactcgattataccctttgtatggaaggtgctttgaaattaaaggaaatttcttatattcatgccgaagcctatgctgccggtgaattaaaacacggaaccattgccctggtcagtgaaggggttcctgtcattgccgctgctacccagaaacatgtatacagtaaagttatttccaatatccgagaagtaaaagcccgtggtgcttatgtcattcttttgtccaaagacaaagaaatcacagatccttctatctgtgatgtacacatcaatcttccggatgtatccgacgaatttacgatttttgaatctgttgtaattttccagctgattgcatattacacatccgttggaaaaggcttaaatccggatcagccacgtaacctggcaaaatctgtaacggtagaataaaaaaactgtcgcgcgaaaattcgtgcgacagtttttttgacatagagcctttctaaaacttttgaaggcaaaaaaagaaccccagaagctctctaaaagcctctgcggttgcccctgccaaggattctctcacccatgtaccggaatccttgtatcgtcggcgcgacaggatttgaacctgcgacctctgcgtcccgaacgcagcgctctaccaagctgagccacgcgccgtttcaactgcccaattatagtaacacattctccggtgtttgtctagtgaatttttttaatttatggtacaatacaaaaaaagaatggagaagaacaatgaaacatactgctttgattacaggtgcatcccgtggaatcggtgcagccctggcatgtcgatttgccgccgaaggctatcatctggctctttgctgccataactcttatgaaacgctgcaggcacttgccacaaaacttgaaacaacctgctccatacaggtgctttgcttccgtggtgatgtaggagactatacttttatctgtgacatggtgcaaaaaacactggataccttcggccagattgatgtgttaatcaacaatgccggcatctcttatatcggtctgctcaccgacatggatattaccgactggaatcagatagttgcgacaaacctcacatccgtcttttccacctgcagacaggtcatcccttccatggttcatgccaaatccggacatatcatcaatatttcttctgtatggggaaatgtcggagcttcctgcgaagttgcctattctgcatgcaaaggcgggatcaattcccttacacgcgctttgggcaaagaacttgcccccagcaatatccaggtaaatgccatcgcctgtggggtaatcgatacggatatgaaccgttgtttctccgaggaagaacgctctgcactcatcgaagaaattcctgccggccggatgggatccccggaagaagttgcttcactggcatattctcttgccacagcaagcagttacctgaatggacagattctcaccttagacggcggatggatttaatttcttatctttttggaaatctttttccatttatttaagaattaaaacgcgatacgcgttttctctgttttttatatcaactttctataaaatcatttgtatgaaaacgaatgataaaaataaatacaaagattttggtgaccatctgagtctgattatgtataaacaaaatatttccaatatccagctggcaaatgcaatgtttgtttcgccgtccacgatcagcggataccgtaccggccgtcgttctccgaccgttgcggatcttgcagccatcgtgcagattctgaatgtttctgcagattacctcatcggaaccagtgaaattacaaaaagacccgataccaccgaaaaaaagagttgagcacgccctgtttccagagcggtgctcaactcttttttataaatcatgttctgccagtaaaattaccgtagaacgttccggaacacgcacacgtgtctgatctccctgtgtctgggcttcaaaatctgccccatcctggtattcacagaaagtatttactacaagtttccaatgataagactccggcaacgaaggcaggcgcatctccaaaggctcccaatacgcattcattccgtaaaagatcatatcatcatccgtatcatcggcatttcttcccgcatacatgattccaattaaatgtgtattatagtccgtataattccggttcggctctccattatggatacttacggaaggtaacccgcagactgccggctttgtatcccttcgcagaatcggatgctttgcacggaaatggatcataaaacgggcaaaatcatgaatctcctgaaattcttccagtctgttccagtccagccaggaaataatattatcctggcagtatgcgttgttatttccatactgcgtattacaaaattcatcccctgcaaaaaacatagccggtccacggctgcataacaacgcggcaaatgcattttttacaagcctgcgccgcaggcccataaccgccggatcatccgtctcaccctctgccccacagttccagctcatgccgttgttatccccgtccgtattgttccatccgtttttctcattatgcttttcattatatgaatacagatcatacaacgtgaacccatcatgacaggtcagaaaattgacggatgcactatatccgcggcttgccggatcatacatgtcggaggatccggtgatacgtgtaattgcacgccctgctacgccactgtcgccctttaaaaagcttctcatatcatcacggtatcttccgttccattcggcccagcggttccaggacgggaaacttccaacctgatacaagccacccgcatcccaggcttctgcgatcaacttcatatcccccagaatagagtcaaatgcaagggcttccagaatcggcggattctccatcggtgcaccattctgatctcttcccagaatcgatgccagatcaaaccggaatccatccacccggtactctactgcccagtgccgcagacagtccgtaataaacctccgtaccaccggatggttgcaatttaagacattgccacagccgctgaaattgtaataatatccatccggtgtaagcatataataaatattgttatcaatccccttaaagcaaaaacatggaccgttttcatttccctctgccgtatggttgaataccacatcaagaatgacttcaattccattttctttcagttcgcggatcagacgctttaattcatcaccctcatgattatgctcctgatgaaatgcataacttgtattcggggcaaaaaaggaaaccgtattatagccccagtaattgtacaactgcacgccatccaccacacgggcactttccatttcatcaaattcaaaaatcggcatgagttctaccgcattgattcccagatctttcaaatacggaattttctgtcgcagaccttcaaatgttcccccaccttttacaccggaggacgcatctttggtaaatcccctgacatgcatctcatagatcaccagatcttcaaatttgtaattcagattccgataccgcccccagtcaaaatcactttgcaccacacgggctttatagacaaaatcctttccgccttccggtttttctccccagtttctctgaccggtaacagctttcgcatatggatcaagaagcgtatgttttctgttaaacagtaaccctctcgcctgatcggcaggaccgtccatctgataggcatactcaaaatcctctgcttttaagccaaaaacaaggatagaatacgtatttccaattttataactttccggaatgcggattcttgcatacggttcctgtgccgccggccggaataacagcaggacacagctcgtagctccatgggagcttacggtaaaacttaccccttcctctgtctgatatgcaccattcatctgataaaatcccggacgtacatcaaatccaccgatattatcgagtggatgaatgacttccccgagactttccatttcttcgtctatcggccagcttttctgttttgacggataattccaaaaacttgcattcatgtgctgattcctcttatcattattatttacttgccacataaaattatattatccccctactcttccctgatgattaccctgccatttgcgtcaaatccgattttactgtacttttccgaatactcattcatatgatcaataatcgtctgttttctgccgccttttgctatggcaggctgaaaattatttctttctgatgtggaagaaatgctgcatggtatcatatcggctgatatatctgtctgcagtaccccatccacaaaggtaaaggtctgttcatagatcgccgtatctttgtcttttggattcctgttccccccaaagcagaaatttccaagactgtagcagatcatttttccgttgtataattccattccctgcaatacatgaggatgtgtaccgaccagcagatctgctccccagtcaatcacctggtgtgccagcttctgctgataatcattcggataatgatccccctctatcccccagtggcaacaggcaattaccagatccgctccttcttcccgaagttctgcaatcccatcccggatataaccagcatgtgtttcatcagcggacagctggcttgcggagacaattccgattttgataccatccttcgtggtataggtatccacatgatcattgaatccgaagataatccctgctttatttaacacttctctggtatcatcaagtccctgctgcccataatcaaacgtatgattatttcccagacttgccccctccacagaactgtctgtcataataccaacatactccggttttccttttaagttccacgttttttccacacgctcggtcgcatttgacaacacacattccagattgatcagtgtaaaatcatcctgctcaaaaatacttctgatatttttaaaaaaataatcctgcccgtatttatcatagtattcatgaaaggaacctgcatacccatgcgtctgtgttgccccaagcgtacagtcacctgtcgccgtaatttttaccgtctgtatcaccggttcctgctgcgtttcagttgcagtcccggtttccgtttcttccagcgtacccggttcttccgtcatctgtgtctccgtgattttttccgtagaagagggcaaagccgatgacgttgctgcaggagaagaacatcccgtcagcaaaaatcctgccattaggattggcaatatccattttttcatacgttttcagactcctctttcacaagaatatccaccgtgtgaccgcttgcacccataagatccatccgttcacaggttgccagatgatactgcagaaacgcatcaaactcttcttccgtcagcgcatttaaaaacggacgcatataatttgctgcaccgtctgccgctatgatctgccggcgcctgacctctacctgccggtccaatgcttcaatatcttccagacgaaccatggaatacagaggattggcttttgaagtacagtgataatcctctgtgagcattccctcctgaagcgcctccagaatatgtttttccttaaacgcatacgtgataacggaaaattcattcataatatacgccacgagaatcctgcctccgggtctggtcaccctcaccgcctcccgcagcgcagcaagcttgtccttttcctcatgcaggtgatacatcggcccaaacaacagggttacgtcaaaggaatcatcggaaaattttttcagattcattgcatttccctgatatgcatgcactcctgcacccttctgtttcaggcgtcccagattatgctttaccagttccacggccgtcacatcgaacccttcctgtgccagcggtacgctgtatcgtccggttcccgccccgatatcaaggatatgaatttcctcttttgcacgttctttcacaatttcatccagacactgatggatataatgcatacttgtcacaaattccaccctgccgtgtcggctgtccagacgtttctcttcattaaatttattataataggcttctaagtctgtcatattttaatactaacacattttctttaaaatttcactcacaatcgctgatgcgacatccgctttgctcattatttccagttccctgcagtcatctgccgtaatcagcgtcaccacattggtatctgtaccaaatccggctccggctaccttcaggttattcgccacaatcatatctgcattcttttttgcaagttttgcacgggaattctccagcatatgttccgtctccatggaaaatccacacagaaactgtcccggttttttgtgcgcgcccagatacgaaaggatatcttccgtgcgttccatcgtaagggtggcatccccgtcttttttcttgactttctcatcgaccgggtgatccggacgataatccgccacagctgccgctttgataataatatcctgttgctctgctgtctcctttacggctgctgccatatccgcggcagatacaaccggaacgacctttacaaacggcggcggagtgattgccaccggtcccgtgatcagcgtcacttccgcgccacggcgcatacagttttccgcaattgcatagcccattttcccagtagagtgattcgtaatataacgcaccggatcaatcttctcctgtgtcggtcctgctgtgaccattactttttttccgaccatatccttttcacaggcaagatctttcataatataagaaaacagtgtttccggttccggcattttcccggctccggtatccccgcaggcaagataaccactcgccggatcaatgatatgaaacccataatgctccagctttttgatgttatcctgtacgatcggattttcaaacatattggtattcatggcaggggaaacatacttcggacattttgccgcaagaatcgttgttgtcagcatatcatctgcgattccgtttgccatcttgccgatcacattggcagaagccggtgctaccataaaaatatccgcccgttttgccagtgccacatgctcgacattgaactggaaattccggtcaaacgtatcgaccagacacttgttgcttgtgagcgtctcaaacgtgataggattaataaaattggttgcattttccgtcatgatcacatgcacatccgcatgctgcttgacgagcgcacttgccagataggcaattttataggcagcgatacttccggtcacaccgagtaccacacattttccttttaacattgtctcttactcctttgcagaaaaaatcacatcttctgctattttatcacactttttccctaaaacaattgaatttttgtcatctgttccagtatggaatctttgacagaatcgttcagatatgctggatttaattttctttttgcatatgcaaggtaagaaccatttgtctcttcaatcaaaactgccgtaaaaaaccgctcccagctaaaatatgttttgctttccacatattcccacggcttttccagcacctgatctgcccatttgctttttactacttttgcctttaatatcagccattcaaatgactccggcaaataaagcaccacttgatcttttccaccaatcaactgcatcactctgtcaatttcagaaccaaatgccgcgccgtctgcaattacaagtatgcgttcatttttatgcatatttaaataatggaaaacatttgactttccattcattgtctcacatttcaattgctgttgcctacatacagaattaaaaaactgataaccggaattactgtcttccgttattacaacctctggtttaatatccttctttaaagtctgtgctccatatattctgtaaaactcatgataacacggttttaatgttccgtattttcctgaagtacgaattccatagatttcctccacactatacggcaaagaaggcaaggattccctggaaacaatgacataataattatctgttttctgaatagtatctgcgaattctactgtcttgataaattcgtttccttcatcaataaatacaatactatcctgcattgctgataactgttctttccacagtgaaccttcgagcacataacattttttgtcacacgtcagttccacgggcgtaccggatggattatttacgtattcccgaatcatatctaccaatgtggttttgcctgtcgcactgtctccccggatgaccgtcagatttcttcgaatttcaaaatcatattttaagcgctttgttgatacaataattctatgttttcccttcat

SEQ ID NO: 129 - DNA, 7375 bp, unidentified
  source 1..7375: mol_type = unassigned DNA
atggattcgaaacagattgatgtgatggtggccgacgcctcacatgaagtttacgtggataagattttggataccatccgagaagctgccaaggtgcgcggaacgggcatcgcagaacgcacacacgaatatgtggcgactaaaatgaaagaaggaaaagctatcatagctttatgtggagacgaatttgcaggtttcacctacatagagagctggggaaacaagcagtatgtggcaacatcgggcctcatcgtacatcccgattaccgcggcttgggactggccaaacgtatcaagacggcttctttccgcctggcacgcctgcggtggcccaaagccaaaatattcagtctgaccagcggagcggccgttatgaaaatgaataccgaactgggctacgtaccggttactttcaatgaactgacagacgacgaggctttctggaaaggctgcgagggctgtatcaaccatgacatactggtagccaaaaaccggaagttctgcatttgcacggcaatgctttacgacccgaagttacacgaggaagataaaatataattaattatagattttgaattatgaatgggaacacacggactcgtttacaagcctgattcccaatttataattcaacattcaaaattcataagtattatggaaaagaagaaaaaagtagtagttgcattcagcggtggtctggacacctcattcacagttatgtatctggccaaagagaaaggatacgaggtatatgcggcttgtgccaataccggcggtttcagccccgaacagctgaagacaaacgaagagaacgcctacaaactgggtgctgtaaaatatattactttggacgtaacgcaggaatattacgaaaagagcttgaaatacatggtattcggcaacgtattgcgtaacggtacttatcctatttccgtaagctccgaacgtatattccaggcgctggccattgcacgctacgccaacgaaatcggcgcagacgccattgcacatggttcgaccggtgcgggtaacgaccagattcgtttcgacatgactttccttgtcatggctccgggcgtggaaattatcacgctgacacgcgacatggctttgagccgccaggaagagatagattatctgaacaagcacggctttgcagccgacttcgccaaactgaaatattcctataacgtaggtctgtggggtacttccatttgcggcggtgagattctggactccgcacagggacttcccgaaagcgcctatctgaaacattgcaccaaagaaggcagcgaacagttgcgcctgaccttcgagaagggtgaacttaaagcggtcaacgatgaaaaattcgacgaccccatcaaggctatccagaaggtagaggaaatcggtgcggcttacggcatcggccgtgatatgcacgtaggcgatacgattatcggcatcaagggccgcgtaggtttcgaggcagccgctcccatgctgattatcggcgcacacaagttccttgagaaatacacattaagcaaatggcagcaatactggaaagaccaggtagccaactggtacggtatgttcctgcacgaaagccagtacctggaaccggtaatgcgcgacatcgaagccatgctggagtcctcgcaacgcaatgtaaacggtactgcgattctcgaacttcatccgctctgtttctctaccgtaggcgtggaaagcgacgacgaccttgtaaagaacaaattcggcgaatacggtgaaatgcagaaaggctggactgcggaagacgccaaaggtttcattaaggtgacttctaccgcactgcgtgcctattactcaaaccacaaagacgaagaaatctaaatgatgaaccggaagcaaaaattaacgcgcccccgaaacggaagaatgctttccggcgtatgtgcaggactggcaaactttttcggactcgacgtgtcactggtacgcatcatctacgtttttgctacgatcttcactgcgtttgcaggtacacttatatatatcatactattagttataataccagaagaacccaatagatattatcaacatgattaaagtaggaatcatcggcggagccggatacacggcaggcgaactgatacgcctgttactgaaccatcccgaagcggaaatcgtattcgtaaacagttcgagcaatgccggcaacaaaataaccgacgtacacgaagggctgtacggagagacggatctaacgtttaccgacgaacttccgttggacgaaatcgatgtgcttttcttctgcacggcgcatggcgacaccagaaaattcatggaaagccacaacgtaccggaagacctgaagataatcgacctctccatggactatcgcatcaagagcgacgaccatgacttcatctacggccttcccgagctgaaccgccgtgccacctgcacggcaaagcatgttgccaaccccggctgcttcgccacctgcatccagttgggcctgcttccgcttgccaagcatctgatgctgaacggcgatattatggtgaatgccatcaccggcagcactggtgcaggcgtcaagccgggagctacgagccacttcagctggcgcaacaacaacctgagtgtgtacaaggctttcgagcaccagcacgtgcccgaaatcaagcaatcgctcaaacagctccagaacagtttcgattcggacattgatttcatcccttatcgcggtgattttccccgcggcatctttaccactatcgtgataaagaccaaagtggcgttggaagagattgtccgcatgtatgaagagtattatgccaaagactccttcacgcatatcgtcgacaagaacatcgatttgaagcaggttgtcaacaccaacaaatgccttatccatttggaaaagcacggcgacaagctccttatcatctcctgcatagacaacctgctgaaaggagccagcggacaagccgtacataacatgaacctgatgttcaatctggaagagactgtcggtttgagactgaaacccagtgctttctaaagtatctttaatttgtaatcagttactgaaagaatgaaactattcgatgtatatcccctttttgacatcaatattgtcaaaggaaaaggctgccatgtatgggacgataaaggtacggagtacctcgacctctatggcggtcatgcagtaatctctatcggacatgcacatccgcactatgtagagatgctcggcaagcaagtagccacgcttggattctattccaactccgttatcaacgaactgcaacagcaactggcagaacggttgggaaaggtctgcggatacgatgattattcccttttccttatcaacagcggagccgaagccaacgaaaacgcgttgaagctcgcttcgttccataacggacggacccgcgtggtatccttctcgaaagctttccacggacgtacttcattggcggtagaagcaactgacaatcccaaaatcattgctcccatcaacaactgcggacacgttacctatctcccgctgaatgatacagaggcaatgaaagccgagctggcgaaaggcgatgtatgcgctgtaatcatcgaaggcattcagggagtgggcggcatacagttgcccaccgatgagtttatgcaagccttgcgcaaggcctgtacagagcacaatacggtactgattctggacgaaatccaaagcggttacggacgtagcggcaagttcttcgcccatcagtacaacggtatcaaagccgacatcatcaccgtagccaaaggcataggcaacggatttccgatggcgggcgtacttatcagtccgatgtttactcccgtttacggccagctcggaaccactttcggcggaaatcatctggcttgcagcgctgcgcttgccgtactggatgtcatagagcaggaagctcttgtagacaatgccgcccaagtaggcgcatacctgatggaagagctgaagaaattcccgcaaatcaaggaagtgcgcggacgcggactgatgattggcctcgaatttgaagagcctgtcaaagaactgcgtttgaggttactgaaagaacagcatgtctttaccggtgtcagcggcacgaacgtactccgcctgttgccgcccctgtgtctcggcatggacgaagcgaacctcttcctggaacgttttaagaaagcactttgacaatttacggataatcagccggcaaaagatacgaccgaaagaagaataccttcctgtttcggtcgttttttcattaaaatctttacctttgcccgaagacaactttttaaatgacaagatgatatgaaaacagcaattatcggtgcaggaaatatgggcggctccatcgcccgcggtctggcaaaaggaaccatcatccccgccagcgacatcattgtttctaatcccacgcaaggcaaactggatgcgttaaaggctgagttccccgctttgcaaaccacacgcgacaatcaggaagccgttaccggcgccgagctcatcatactcgccgtcaaaccgtggctgataaaaccggtggtaagcgaactcaagctgaaaagcaagcagatacttatctccgtagctgccggcatccctttcgaagaactggcacactacgtggcagacaaggagatgaccatgttccgcctcatccccaacaccgccatcagcgagatggaaagcatgacgctcattgcaagccgtaacgccagcaaggaacaggaacagcttttgctcgacatcttcaaccagatgggacttgccatgctgattcccgaagataagatagcggcaaccaccgccatggcttcctgcggcatcgcttatgtactgaagtatatccaggcagccatgcaggccggaatagaactgggcgtttaccccaaggacggcatgcgcatgatagcccagtcggtaaaaggcgccgccgaactgattctgaacaacgacacgcatcccgccatagagattgacaaggtatgcactcccggcggaattacaatcaagggtatcaacgaactggaacatcaaggattctcttccgccattatcaatgccatcaaagcaagtaaataaccgtactaatccacttaataaaaaccacatggacgaacagattaaacaaatagccgaacgcctgcgcggactgcgcgacgtattggaattgaatgccgaagacatcgcccgcgattgcgacatcccggcagaagagtaccgtcttgccgaaacgggagaattcgacatctccgtaagcatgctgcaaaagatagcccgccgttacggcatcgcactggatgccctgatgttcggtgaagagccgaagatgagcagctacttccttacccgtgccggcaagggaaccagcatcgagcgtacaaaagcctataaataccagtcactggctgccggcttcatgaaccgcaacgccgacccgttcatcgtcaccgtcgaacccaagccggataacgagccgatacactacaacagtcactccggacaggaattcaaccttgtactgaaaggccgcatgatgctgagcatcgacggcaaagacttgattttaaacgaaggagacagtttgtatttcaactccaaactgcctcacggcatgaaagcgctggacggaaagaaagtacgtttccttgctgtaatcatgtaacaacacataaatgaagaacggtgaatgaagaaattccaaaagttatggtagaaagatttttatcgcaaacgtcctttacatctcaagaggacttcatcaagaatttaaagattaacgtaccggagaatttcaatttcggttatgacgtagtggatgcctgggcggccgaacatcccgacaagcccgcattgctctggaccaatgacaagggcgagcacatccagttctcatttgccgacatgaaacgctatacggacatgacggcttcctatttccagagcctcggcatcggccacggcgatatggtaatgctcattctgaaacgccgctatgagttctggttcagcatcatcgcactgcataagctgggagccgtcgttatccccgccacacacctgcttaccaagaaagatattgtataccgctgcaatgccgcagacatcaagatgattgtctgtgccggcgaaagcgttattaccgaccacatcacggctgccatgcccgactctccgagtgtgaagaagctggtcagcgtaggcccggagatagccgaaggttttgaggacttccacaaaggcattgccgatgccgccccttttgcacggccggagcatcccaacagtaacgacgatatttccttgatgtacttcaccagcggcactaccggcgaacccaaaatggtggcgcacgacttcacgtatccattggggcacatcgttaccggaagtttctggcacaacctgcacgaaaacagcctgcacctcaccattgccgatacgggctggggtaaagccgtatggggcaagctgtacggacaatggatagccggagccaacatctttgtatacgaccacgagaaattcactcctgccgatattctgacaaagatacaggactatcacgtcacctcgctttgcgcaccgcctaccatcttccggttcctgattcacgaagacctgacgaagtacgacctctcttcattgcagtattgcaccattgccggagaagcgttgaaccccgccgtattcgatacattcaagaaactgacaggcatcagcctcatggaaggtttcggacagaccgaaaccacccttaccgtagccaccatgccgtggatgcagcccaaaccgggcagcatgggattgcccaatccccaatacgacgtagacctgatagaccatgacggccgttcggtagaggccggtgaacaaggacagattgtaatccgtaccgacaaaggcaagccgctcggtctgttcaaggaatattaccgcgatgccaaccgcacccgcgaagcatggcacgacaacatctattacaccggcgacgttgcctggaaggacgaggacggctacctctggtttgtaggccgcgccgacgacgttatcaagagcagcggttaccgcatcggcccgttcgaagtggaaagcgccctgatgacgcatcccgcagttatagaatgtgccatcaccggagttcccgatgaaatacggggacaagtggtgaaagccaccatcgtactgcccaaagactataagaaccgtgccggcgaggagctggtcaaggagttgcagaaccacgtaaagaaagtgaccgctccttacaaatacccccgtgtcatagagttcgttgacgaacttcccaagaccatcagcggtaagatacgccgtgtggaaatccggaagaacgacgagaaataa

SEQ ID NO: 130 - DNA, 14176 bp, unidentified
  source 1..14176: mol_type = unassigned DNA
atgatttatccgctgcctgccgtattggtgagctgcggaagcactccggaggaatataacattctgactatcgcatggacggggacgatttgtacgaacccgcccatgtgctacatctccgtacgccccgaacgccactcctacgacatcatcaagcggaatatggaattcgtcatcaacctcaccacgaaagatatggcacgggccacggactggtgtggcgtacgctccggaaaggactacaacaaattcgaggaaatgcatctgacaccggggaaaagcaccgtagtcagcgcgcctctcatcgaggaatcaccgctttgcatagaatgccgggtaaaggagattatggctctcggttcgcacgacatgtttatagcggatgtggtaaatgtacgtgccgatacccgtaatctgaaccctgaaaccggcaaactggaactggcggaaacgaatccgctggtctatgtgcacggtggatattatgagctgggagaaaagataggcaaattcggatggtcagtagagaaaaagaagtaataatgcgataaaggttttaagagatggagttgcgacgaatcttgatgggcttatatctgttggccttccccgccatgatgtggggacagactccggttgtgcccggtactgccgacgaagagcattccggacaccgcaaggaaactccggtcaatttcggtttcaaaggcggtttcacctcttccttgttccttgtatcccagttcagcgtcaacggagtgcccatcgacgaagtgcagaacaattacaagataggatatttcggctcccttttcatgcggataaacttcgatcgccacttcctgcaaccggaaatatcctacaacatcaaccggtgcaacatcaccttcgagaaacctctgcccgaagacgccgcatcaggagcccggctggaggaagcctccattacatcgtccatccacagtatagacatccccgtcatctacggatacaacttcatcaaggaggggccgtacagccttgccgtctttggaggacccaaagtgcgctatatatgggacaggaaaagtgacatcgacttcgagaatttcgaccaggtgaatatccgtgaaaggctgcgtccgctcaatctcagtttcaccgtcggcgtatccgtcaccatctcacgcgtctttttcgacttccgttacgacatggggctgcataacatctccaaaagcgtgacatacgatattccggccgacaacaacgctgcagacgaaaacacgaaaaacgaaatccgttttcaccgcagggacaatgtgctgagtttttctttcggagtgttcttttgacagtaaatttcttccttttctttcaatttattcatttatttcccgtaaatttgtgcgcttaataagagaacacagatttatcaaacttatctaataagcagaatgaaaagagatgatttaattttcgaacttatcgaaaaagaacaccaacgtcagctcaaaggcattgaactgattgcatcagagaactttgtaagtgaccaggttatgcaggcaatgggctcctgcctcaccaacaagtatgctgaaggataccccggcaagcgttactatggtggttgtgaggtagtggaccagagtgagcagattgccatcgaccgcttgaaacagatcttcggcgcagaatgggccaacgtacagccgcactccggtgcacaagccaatgcagccgtattcctcgccgtgctcaatccgggcgacaaattcatgggactgaaccttgcacacggcggtcacctctcccatggttcactggtcaacacttccggtattatctatactccctgcgaatacaatctgaaccaggaaaccggacgtgtggactatgaccagatggaagaagttgccctgcgcgagaaacccaaaatgattatcggcggcggttctgcttattcccgcgaatgggactacaagcgcatgcgcgaaatcgcggacaagataggtgccatcctaatgattgacatggctcatcctgccggactgattgcagccggtgaactggataaccccgtgaaatatgcccacatcgtgacctccactacccacaagactctgcgtggtcctcgcggtggcgttatcatgatgggtaaggacttccccaacccctggggcaagaaaactccgaagggagaaatcaagatgatgtcccagttgctggattcagccgtattccccggtatccaaggtggtccgctagaacatgtcatcgcagccaaagccgttgccttcggcgaaatcctgcaaccggaatggaaagaatatgccaagcaggtgaagaaaaacgccgctgtcctggcacaagccttgatagaccgtggcttcaccatcgtttccggcggtacggacaaccactccatgctggtagacctgcgcagcaaatatcccgatttgaccggtaaggttgccgagaaggcgttggtatctgccgacatcaccgtaaacaagaacatggttccgtttgacagccgctcggctttccagacttccggtatccgtctgggtactcctgccatcacaacccgtggtgccaaggaagacctgatgctcgaaattgccgagatgattgaaaccgttctgtccaacgtagacaacgaacaagtcatcgcagaggtacgtgcacgcgtcaatgcgaagatgaaagaatacccgctgtttgcttattaataagcaaacagaattaaaaattaagaattaaaaattaaaggctgcgcaatgttcgctttgaactgcgcagcctttaatttttaattctaaacgcgctccgcgcgtttagctcagcccttctatatttccgtccacaatatcaatgtgttcggcttgtggtttcttgggtaatcccggcatacggagaatttcaccggcgatggctacaatcatttccgcaccgttattgaccacaatatccttgatgtggaactcaaagttgttgactgcaccgtatatcttcgggtcggcagagaaggagtactgcgtcttggcgatacagacggggtaatggctgatacccatctgctctatcagtttgataaccttgcgggagtggagactgtaagtcactacgcttgccccgtagaggttgcaggctaccttttctattttacgttccacgcaatcgctctcttcgtaggtgaaggtcagcggttcggatggtttgttctcgatagtatctactaccagattggcaaggtcaacggctccctctcctcctttggcaaaggcgttgttcacggcaaaacctacctcaagcttttcttcgcaatggcggcggatagcttccacctcctcgtccgtatcactggcaaaacggttgaatgccacgatgacctgctggccgaatgaacgcaaattgcgtacatgtttgtccagattgccgaagccctctttcagtccttccatattgggttccttgatgcggtccagactgacaccgccatgcatcttcagtccttgtgcggtagcaacgattatcgtcagcttgggctgtaggccgctcttgcggcacttgatgttgtagaacttctccgcacccaggtcagctccgaaaccggcttccgtcactacataatcgccgaatgtcatggccatttttgtggcaagaatggagttgcaaccatgggcaatatttgcgaacggtcctccatgaacaaaagcagcagagccttcggtagtctgtaccaagttggggttgatagcatctttcaacagtacggtaatggcaccggctactcctaactccttcactgtgaaaggagtaccatcgaaacggaatcccagaataatattttcaatacggcgacggaggtcgtcgaggtctgttgccagacagagaatagccataatttcggaagccggggtaatatcgaagcccgactcctcagtaatgccgttggtgctcggtcccaatccggtgacaatgctccgcaaggaacggtcattcacatcaagtacgcgccgccagatgatttctttcagtccgaagccgtctgcctgatgctggtacaagtaattgtcgagcaaagcggaaatcatgttgtgtgcggaggtaatggcgtgaaagtcgcccgtaaagtgcaggtttatcttctccatgggaagcacctgggcatatcctccaccggcagcaccgcctttcatgccgaagcaaggacccagcgagggttcgcgtaaagccacaatcgctttcttgccaatcttgttcagccccaatgccagcccgatggacacggttgttttaccgatacccgctttcgtagccgtgatagccgtcaccagtatcagattgctcttcttcactttctcttcatcaatcagatgcgtaggaatcttggctatgtaacggccatagttctctacttcgtcacgcgggatatccacactttcagccacctgctttatcttcttcagctctatgctgcgggctatttcaatgtccgatttcatacagagtcttttctttaaataacaactttaatgttttgaaagttgcaaaagtacgaaagatgtggcaaagtacaaaagaataccgtattttcacctgaccacctgcatcttctatctatttgaaccgcgacgtatccactgcctcccgttgcttctccttatatccaccgaatttataggtgaacgatacgccgaattcgcggaagcatgagtaatgattcgtcacattctgcgtcttgaaacggatgcggggagaaatctgtcccgtctcaaaaatatcgttgcaatagaggttgagaatggctttgttcttggcgaagccgtagcgcagggcaatattcacattgcccgacgtaggcaggtcgtagatgccctgaatggctttactatgcacaaatccggtcaccgtcagcttcaagtcgggtttggtggagagagtaaaagtattgttcatctgggcaatgccatagcattgctttctgtcgaaaggaatatcccagaaatcaccatccttttcgcgatgccacaagccgatgagggtaaggcgagaattcaaccaatccttcaccttaaacgggatagaggcttgtattcctgcttgttgctgataatcaaaattgagtgtcttgtagatttcaaccagacgttcggaggattggtagagtgtctgtacggagtagtccttggtatggttgaaccaagcgctgaagatgtatttgcttttcaaaatataggtcattttcagctcatactcttgtgccggtttcagcaacggattaccatgcagctcagagtatccgccgccgatgtaagagacggcatcctgtaccgcccagtagtcgggatagtccttgtcgctgctcagagagagctgaaggatatgtcccggtgccggcatatagttcaagttgacgatgggataccagtcccactggttccagacgggagtcttgtaatgctccacagccaaagaagcgtccaaagcaagtttgtcgccgaaacttttgctgaaacctgcatagatattccaggtctgctcgcggcggcgggacttcatattgctcaaggcatccgatgaggtcagttgtccaccggtttcggggtcataataatattggtagctgttgtcgatgctggtagtatagatggctccgtaattcaagtcccaaccttttcccagactgtgctcctgggccagaaagaatttccatcggttgatgcgttggcaatcttcggtgtagaagtcaagttcctcatcctgcatgcggctatgcagcaactggtcggacggggaacggtagtaggtcagttcggcaccggctttgaggccgaaaggggtacgatagtccagacggccgttgtgcagccagtcggtgctattgccatgagttgtggacacctgcgtgcccgtcacgcccgtccagttgtgggaggtggaatagccaccgttatagacgaaactcagctgatggtccttggcgatgttatagtccgcccctaccctgaaattatgggtatggctgcggccacggcccacctcatatgttgtcatggggtgaaccgagccgtctgccagggtgtgcacagcctctttgtcggtagtagagtagccccggccatggctgtgcgagtaaagaaaatctgctgagaatttatttttgctgaagagcaggctggcgcgttcctcaaagccttcgttatgcttctggcgatacttggcatagagttcgccttgccaggagtctgggccgcctgccgattgtttcaaggtgatattgatcagtgcgccacgcacctggtagcgtgcaggggcgttgtacatcacttccgccttctctatgcggctggcagggatgctgcgcagcaaggaatagagctgctcggtgctgagggtggttactttgccgtccaggataacggtgactccctggcctgccaactgcagcccgccattcatctcgatgacgccgggaagctctttcacggcatcgtaggcattgtctacggggaggttccggataaggcggggcaggtcgtacaccagcttgccttgcgctgcctttacgatggggcgttcgccggtaatcatcacttccggcaaggtctgataaagactgtccagacgggcatcggtcgtgataaggctgtcggcgctgaggatgcggttgtcgtctgcaccggaggtggttgcagtgccgttgttctcttgtgccgaaagactgatgctcaaagcacagcatacaatagggagtaaatagaatcgtttcatgttcttctttttatttatgtttatattcttcttctgcaaatcttcgtctgcaaagtacggcagaatcagcagaaacttgtgttatcagcggcttaccaagtgttatccagtgttatcgggagtgttatttagtcttatcggatgatagggttcacaatattaatcttacctttgtatgtataaaagtaaccggaaacaaacatgaaactgccattcaaatatattgccatacttgtcatcgtctccctggccggcatcttcgcctaccaagcctactggctgacggggctctaccataccatgcacagtgaaatggaaagggacatcaccgaagccatgcgcatgagcgactataacgaaatgatgatacgcgtggataaaatgaagcaggacgacataaaccacggtgaagtcagcgtatcagccggatacagcgatgacggaaaatcatttgtccgtagcagtaccaccatctcccgtgaagattctttggacaacaccaccctgcacgaaaccttcatgcccaaaggagacagtgtttacgtgacccacccgaacgattcaacccgcgtggaagtcagtgtcaggaagaacgttcctttgctcaccaaagaggacagtgtgcttttcatcgaccagcatagagaaacggataaagtccgttggatgtctgccgattctgcccgagagcgtctggaagaagcagtcaaggactcagacagctctccccaatccgcattgagtgccaaagggggactggatgtgattttgcgcgaccaaaacagtatgctggaactcgccacctacctccagcgcggactgcattcgggactggacatcatttccgaccccgacgtagtgctttatgacagcctgctgacttcattcctgcatgaccgtaacatcaatcttccccataggctgctacatcttcacaaaggcagcaaatgggactctaccattctctatatagatacattggtaaacatcggtacccccggctatgtgcctacctcaaaagccgtggaatataattattctttcgacatcaatacaaatcaaagctaccgtctcatcatggaaccggccggcatgttggtcttgcgacagatgtcgggcattctcaccacatcattcgttattctgatcgtactcgctttctccttctggttcctgatacgcaccatcctgaaacagaagacactggaagagatgaagagcgatttcaccaacaacatcacccacgaactgaaaacccccatcgccgtagcatatgccgccaacgacgctctgctcaacttcaaccaagcggaggaaaaggccaaacgcgacaaatacctgcgtatctgccaggaacagcttcagcgcctcagtggactggttgaacagatactttccatgagtatggaacgccgcaggactttccgcctgcacccggaggagtttgcaatacgtgatattctggaaacgctcatcgaacaacacaagctgaaagcggaaagctccgtccacatatcggtggacatcgaaccggaagatttgagcgtacttgccgaccgtacgcatttcagcaacatcatcagcaacctgatagacaacgccatcaaatattcgcacggagaagccgaagtggccatccattgccgcaaggtaaccgtcgaagggcagaatgaacagaccgaaatctccgtcagcgaccacggtatcggtattgctcccgagaagcagaagcacatcttcgacaaattctaccgcgtacccacgggtaatctgcacgatgtgaaaggctatgggctgggattgttctatgtgaagaccatgatagagaagcatggtggcagcgtatcggtaaagagtgagttgggaaaaggaagtacctttacgataaggatatgataacattatttgttagggtactttacattacttgttaaggagctttacattacttgtaacaaaagcgacaattatggaaaagataactgtacttctggttgaggacgaacagaccctcgccatgattatcaaggacacattggaaggacagaacttcatcatccacaccgcagcagacggtgaagagggattgcgcaagttcttcgacctccgtcccgacgtgctggtggcagacgtgatgatgccccgcatggacggctttgaaatggtgcgccgcatccggcagaccgacaaacagaccccggtactgttccttaccgcccgctccaccatcaacgatgtggtggaagggtttgagctgggtgccaacgactacctgaaaaagcctttcggaatgcaggaactcattatccgcataaaggccctggtaggcaaagctttctcctttacagaggaaaagcccaaagaaactaccgtttttgaaatcggtgactaccgtttcaattccgtcactcaacgacttgcttttgcaggcagcaccccgacttcacctaacgcggatacggaagtggaactctcccaccgcgagtccgagatactgaaacgtctttgcgagaaccgtaaccaggtggtcaacacccagaatgtattgctcgacctctggggagacgacagcttcttcaactcccgcagcctgcatgtgttcatcaccaaactgcggcataaactggccggagacgagcgcatccgtatcgtcaatgtgcggggaataggatataaactaatagtgaactaaactaaaactaaactactatttatgagaaagttattattcattacttttatctgttcctcactctgcgcctatgcacagagcgagattccggaagacacaataaagaaccggcctcccgtaaagaaagagcagattcccttttctccaaaagagaacaagcgtacgggccttgatgaaagccagccccaacaaagtctgcagggcgaacagcaggaagagataaatctccatctccctccctccgactatgtggagcccctgccctggacggacatgaagaagatacactttcagaaaaacatctttgaatgggacttccagcgtttcgccgatttcctgctctcgccggaagtcgtactgacgatgtacggcagccataacacctatcctgcaatgggctccatcatgcaggctggcgcaggagttacttattacagtcccgacggacattgggaattgagcggaggggtatatgccgcccattattccatctcccaaccttcatccattaccggtgcccagtatgccaaaagggatgccccccgaggtactcaatgggacataggctacaatgcctccgtatcctaccgcatcaatccctacatgcgtctacatgccttcggccagtattcgggctacgggagaagtaactcctttcatggatatatgaacccgatgtatccgcaaagcggttatggcatggtactggaactgaaagtgacggactggctcgacctcaacggaggcctggaacggagctacgaccccaccaaaatgaaatgggtgacttcgcccgtcttcgcccctaccattcgtataaagaaatagaaataatacaaagatatttccggaaatagagggaaacgagtatctttgttcagtctgcccctatgcggcagacagcaactgaaattgtgaacaaagaactatgaaacgaatcttcttctgcatcatcattttacttgcaggcatatcgtccgtcagcgcacagagtgggatgcctgccgatacggtacgtaccgctgtacgtggcgaagcgtctcccgaaggcatgtctccgtctgaaaaggagcttctgccggacgtgaagaattacgacggcttcctgctggatatggggctgatgaatctgtccacccccactcttcccaaattcactttggagataccggatgccagcaaagactatagccgcatcttccagttgaacccgaacgtgacttattcacaaggtctttcgaacatattctcactcagcaactcccggtatttcagttcgaatcccttcggactgacgggcttctggggctctactgacaacctgcaaatgggaagtttcactttgaagaacggcatgcgcatccatacgtacggcgaatatgacaaggacggctggaaagtgcccaacccttccgcactgccttgggaaaagaacaatttcaaaggggcgttcgagctgaaatcagccaacggatcctttggcatacgcatcgaggtacagcagggcagacacgtgccctattgatgcccatcacttaacaacagaatcaatgacaagaaagaaaatactggtgataggcgccaacggttttaccggcagacgcatcctggatgatttgtcccacaacgtgttttatcagacaacgggctgttccctgcacgacgacatctgtccccattcgggcaactatcgctttatccgcacggatatatgcaaccgccaggcggtggaaaaacttttccaggaagtacagccggatgttgtaatcaatacctccgccctctccgtccccgattattgcgaaacgcaccatgcagaagcggatgccgtcaacattactgccgtggagcatctggcagaatgctgtgaggcgggaggcagccgttttatccatctttccaccgacttcgttttcggtggtgatacggaccgaccctatacggaggaggatattcccgctcccgttaattattacggctacaccaaactggaaggtgagaaacgtatcgctgccgtttgcagggattatgccatcgtgcgcgtagtggtggtgtacggtgccgccctgcccggacagcatggaaatgtgctccaactggtggcaaacagattaaggaacaatgaggaagtgttcgtcgtatccgaccaatggcgtacgcccaccttcgtgggagacgtgtcgcaaggagtggagaagctgataaatcacccacaaaacggcatctaccacctctgtggcagcgagtgcctgaccattgcagacatcgcttatcgggtagcggacgtattggggctgaatcgctcgctcatccgtcccgtcaccacgaaggagatgaacgaaaagacaccacgtccccgtttcagcgggctgagtatagaaaaggcacaccgggaactggggtatcagccgcgcacgctggaggaaggaataaagcagatgttcggatggtaaatgatgcagtcggatggtaaatgatgcaggttgaggatggcagcagattcgactacagcaactccggctctgccagtcctttctctttgcgatacacacgtaccatctccagaatcacatctccatatttctccgcccctttctttccgaaatacggaatgcgtacaagcatagccttatccgaagggagcagattgctgatacccagaattgccttctgctgaatgacggtgtatacgggcaaccccaacgcggaagcttctgcattgcgccatgccaccaagcggttgtaaagttccggatgcaacacatccgtgggtacttcaacagccgcagcatcgcgtttccgctcacgcggacgtttctctttatcagcctgcttactgcttccctgcccttctttggcagcggcacttctccctttgcctttacccttctgcaaagccgaatcatcaatggaaagcagtgctttctgcttcaagtattctgccacatggaaaccattctccagcacataatccagcaaatcagtcttcaagtcaaacatttcctccagctcctccatggcatcccggagcttcttcttcaactctttattatcagaagttaccgcactcgccatcaccgcatccagcggttgcaactgctcttgaaaataagtggcggcagcgtgtatgcgcccctgcaaagtcgggtcggctgcatagtcctgcgcagtatcaatcaggcgggtatactggataccgaacttctgggccactttcgtcactttgtcgtgaaaacgttccacttcctccttgcaggctgcgagttgcttgggaaagagcttgtacaagtgttcgtctatcagccgcacataccgccgcaaagcctgctccatgggctggaaatcgaacaggcccgacagcagttccaggaaataggtctgctgcaaggaacggaagcgtttctcgtccggctcgtttctccgtgcctccatcgtgaaggtttccaccgcattgtcattgattatggctcttgcagaaagcggagcactgagcaccactccctccagcgtcttgcagcggctcagggccacatacgtctgcccatgcgcaaaggaggcgctggcatcaatcacggcacgttcaaacgtcagtccctggcttttgtggatggtaatcgcccaagccagtttcaacggatactgccggaatgttccttcaatatcttctgtaatctccttggtttcctcatcaagcacatacttggcattcgtccactcttcctcctgaagtaagaaggtagcgtcacttcccttactgcgcacttcaattccatctgccgacacggctgtcacctctccaatcatgccattgtagtaacggtgttcgccggaggtgtcgttcttcacgaacattacctgggcaccgcgtttcagttccagcacctcatccgtgggataggaatattcgggaaactttccgtcaatcttggcacgaaaggcatacgagcgtcccggaagttgttccagctcatggtcattaatccgttgggcctgatagttgtgggtcaccaggcggatgtatccttcttctttatctggtacgaaattgggaatataccggcggttcaaggcttccagcacttgcccgtcacaacggttttcgcgaatgcggttcagtaattcaagaaaagtcccatcgttctgccgatagactttctttagttctatggtgcaatattccgtctgcttcaaggcctggctggagaagaaataaggcgtgtcatagtatttgcacagcatctgccactcatcgtctttcactacgggagacagctgctgtaagtcgccaatcatcagcagttgcacgccgccaaagggtttgttccggtcgcggaaccgcctcaagacggcatccaccgaatcgagcaagtcggcacggaccatactgatttcatcgatgaccaataaatctatgctgcgtataatgttgattttctctttcccgtaacgaaaacggtaggttgccttgccatctgcgctgaatgagctttcgggcacataaggagcgaaaggtacttggaaaaaggagtggatggtgacaccgcctgcattgatagcggcaattcccgtcggtgcaagtacaatcatccgtttcggactctctgccctcagttttcgcaggaaagttgtcttaccggtacctgccttgccggtcaaaaaaagatgagtgcctgtgttttcaatgaattgccatgcaagcgctatttcgggattattctccat

SEQ ID NO: 131 - DNA, 8904 bp, unidentified
  source 1..8904: mol_type = unassigned DNA
  misc_difference 1214: note = a, c, g, or t
  misc_difference 1215: note = a, c, g, or t
  misc_difference 1216: note = a, c, g, or t
  misc_difference 1217: note = a, c, g, or t
  misc_difference 1218: note = a, c, g, or t
  misc_difference 1219: note = a, c, g, or t
  misc_difference 1220: note = a, c, g, or t
  misc_difference 1221: note = a, c, g, or t
  misc_difference 1222: note = a, c, g, or t
  misc_difference 1223: note = a, c, g, or t
tcaaatactcgtatcctcgtatttatacatttcccactcccctccacgtctccggaaatagaaaacattggaatacccgttgccaatgccgttcactttaaggatcttcgtcctcgaagtatcctcattcttctgcccataattaatattggacaacctgtctgttggcaatgaagggcgaaaagcgtaccactgatttacatcaagggtcgtttccaatattgaaaattcatcgtcaggatcaatggtgacaaactgcagcggagtggtgatatgtttgctctgatatacgctgtccgtcacgaaacgggtatagaaatccacaaagttctcaccttctccttcctctatatggcgcagattaatggcttcaagcatccacatgccttccttacgttcaaagtagtacttcttcaccatacgcgttttcagataaatccactccacttgtacggatttcagtgttgtgtctcccaccatatccatgtcgttctcattatcaaaaagcagcgtatagtaattttgtttggtgaacaggtagtcatgtttccagaaacgctcttctatttttataggagtatccctattgtaataaggcaaaggaaataccgtcctcttccgttgcaaagcatcgtccgaagcatagttgaagataaaatcatcaaacagttcgtccgcttccaacggttggggctcttcctgcacttccacctgttgcagcgtatcggccttatggcttgccgaatccaccatttcggtaatggtagtaaagggatccattttcggcttcttgtttccacatgaaaccaaaaagaccagtacaataaatcccgctaataaatgtttcattccttaccgaccctctacggtcacttatttaattttgctcttaatttttcaagcatatctactgtcatggagtccagatcgaactgtggcatccaatcccactcctcgcgggcacaggagtcatccagcgaatcgggccaactatctgcaatagcctgctttaaaggatctatctgataggtcatttcaaagtcgggcacatgcttcttgatagcagcatagatcatttccggatcaaagctcatcgaagcaatattgaaagcattccggtgtttcagacgtgccggagcagcctccattagcgaaatagcagcattaatggcatcgggcatgtacatcatatccataaatgtaccggcttttannnnnnnnnnttttacagggcaaacgaatttctcgcctttcaccgctgaataaaaaatatctactgcatagtctgttgtaccaccccccggaggtgtcacattggaaataattccggggaaacgtactgcgcgggtatccactccatatttcgtataatagtaatcactcagcagttctgtcgtcaccttagttacgccatacatggtacgcggacgctgaatggtgtcttgcggcgtcttcacatgaggagtattttctccgaaagaaccgatagaactaggtgtaaaaacggcacaaccatactcacgcgcaacttccagcacgttccacaatccgtctatacctatcttccatgccatagccggacggctttcggcaactaccgacagcaaggctgccaaattataaattgtatcaatcttgaattgtcgagccaccacttcgatagattgacgatccgtcacatcggcgatagccgagggccctgaagcttttaattcaccctgcggcatagcactcggaatgtatccggctacaacatgatcatcaccatagcgcttgcgcaattccaatgttaactctgagccaatctgtcctgtggctccaattaccaaaatatttttcatacaacttatttataaggtattctttcgttaccgaagtgcaaatatacacacttttttttcatttttctatcaaaaagatattgtttattccaagaaaaatgatgtcctttgtagagcttcagccagcaatgtatcacctaattaaaataaaaagttatgtatggtaaaatgaaagagcatctcagcaaaactctcgctgaaataaaagaagcaggactctacaaagaggaacgcctgattgaaagtgcacaacaagctgctatcacagtgaaaggcaaggaagtactgaacttctgcgccaacaattacttgggtttatccaatcacccccgcctgatagccgctgcccaaaagataatggaacgccgcggttacggcatgtcgtctgtccgtttcatctgcggcacacaagatattcacaaagaactggaggcagctatctccgattacttcaagacggaagacaccattctctacgctgcctgttttgatgctaacggtggtgtattcgaacctcttttcaccgaagaagatgccattatctccgactcactgaaccacgcttccatcatcgacggcgtacgtctttgcaaagccaaacgctaccgctatgccaatgccgatatgaccgaacttgaaaaatgcttgcaggaagcgcaagcacagcgtttccgcatcatcgtgacagacggagtattctccatggatggcaatgtggctcctatggataaaatctgtgatcttgctgagaaatacgatgcattagtaatggtagacgaatcccactccgccggtgtggtaggcgctaccggtcatggcgtgagtgaactatacgacacttacggacgcgtggacatctataccggtacgttgggcaaagcctttggcggtgctttaggtggtttcaccacaggacgcaaggagattatcgacctattacgccaacgcagccgtccgtacctgttctccaactcacttgctccgggcatcatcggtgccagcctcgaagtattcaaaatgttgaaagagagcaattcgctacatgacaagttagtagaaaacgtaaactatttccgcgataaaatgacagccgccggattcgacatcaaacctacccaaagcgccatttgcgccgtaatgctgtatgatgccaagttatctcagatttatgcagcccgcatgcaggaggaaggtatttacgtaaccggcttctattatcctgtcgtacccaaagaccaagcgcgtatccgcgttcagatttctgccggacacaacaaggaacacttggataagtgtatcgcagcatttataaaagtaggaaaggaattaggaatattgaaaggataatataaaatgatagggtggcaaggcttgtcgcctttaccaccctatctctttattactttttctcttattttctttcacccagcttcgcatcaacaaagaaaattccggtagcaccggctttcttcaccatatctacgatgcccgatgcagtagcttcttcttctacctgctcacgaacaaatccccacaagaaatcttgagaagctttatccttttcagcagcggctacatctacaagagcatcaatcatctttgacacacgacattcatgttcataaacctgttcgaatacttccagcggagtaccgaagtcattaggaacaacatcaattttatccaattttgccttaccgccacgcttaataatatatgaggccagttcacaagcatgtccatgttcttcgaatgactgcttcttcaaccaagaagccataccacaataaccctctttctccatatagaaagacattgctaaataaaggttggatgaccacatctcagccgtaatctgctcgttaattgcattctgtaatttttctgttatcataattgtatttattaattaaattgaaatgattacaaatataacaagaacacatatagattgttcacaccgataacattatttagtaaaataagtaaaatctaaccttacaaatgttccagttacattacaggacagctaccggcagaactcataattcccggctgtaccttcaaaagagagaacaccctcggaagcccgcacctcagccagcggaataaaaacacgaccgtctttctttacctgccagttgcctgccttaaggtcagtgataacaaacttaaatattcccgtaccactcacagagaaagcaaagtcccggcataattgttcgctattcttagcaaaagttactacgcgatcagccaattgagcgcctacaaccagctcattttcaatacgctgtacggcatttagtttattgcattgattatcggcgacctgtattacattcaaaaagttgtcggtagcggcaggagcaacaggagacacctctactctccacgcaccacgctcattggcattgtcaagataaggggctacggcatcattgggataattggttccgaacacccaattttctttgccgggaccgcctaccttatcaatatgcatattgtccgcttggggcaaaagtacggtgttatgtaacataccgctatcaccatctttggtacgtcgcactgtgaaagtgttgctttcaagtgtaggttcctcaatactatgtaataaccaatatttacgataaccggaattggaagcaactactttgtcatagacaataagcgcagcaggcacctgctccgattgcaggttgaggaacacaaatgaacgtttggcctccttcaccttccgggtgtaggcttgagtaatatctcctttcaaataagaataatcgggcgtttgcgcatcaggaccaaacccatgcgccaacactttgcccaccgtatactcttcggacaagagactatcaagcgaattacaagttttccagccctcgccacacatacgctgcccgccgtcattggctgcaaaccgggtctttccacctcctccatagttccaacattcaaatttttcatcaggatcgtacaccaacaatgaattgtgggcaatggtacgtttaaagtagttcttgttgttgggactgttataaccacctgaactaccgctataagcgcctgcatcaattgccaaaggtcctttgtgataaatctggaagctacctccgtccatgtgctggtggttacccacaaactgttcatttatcttcatttcggcaattacactattggcatcccaccccgtacgggcaatcatccagccataaggagtaccggaatagcgggtcaaaggaagatcatcaggagctttacctttcagattatagtcacgccacagtaaatcgtatatcagacagtggttcatagattcattgcccgacttattcaaatgaggattacgctcgaactcataagcaagatattcatccttatagtaactggaagctaacatcattggcgtaggcatcgtgagcagtgcaggacgattttgcggataatcatcgcccgaaggcaacaacaccccgtcgggacgccggcgatagataatgtcataaagcacaaatcttgccgaagaatcataaatgctgcccgcccccattttctctaaaatccaaagaggaaaaaggtcacaggcaaaacgtacatgcacatagttagtaccctgatgatagttctgtcctccgtagaaatagttacgaaccggaatataatcacgatggagcatagtaatgacatggttgtacatatcgggatattcatcataaatagcaataccagccgacagcatatcacgcataatcatccattctgacggatggcccgctatgggctggttgttgtgcggcggataaccacactccatactttttgccaaccggacaaactctttgatataggcttgtttctccgaacttttcatttgatcgtagcaccagtcatataccatagcacccgttatcagcatagccccactggccctcgacatatcggaacgagtaccaaaactggcacgttgcaatgtgtcgagcatggcggtaatagccctacgagccaagcgtttatcaccatccaaaagataatcgagagcctgtaactgtactctcgtcgtgacaccgcgcatttcataataatagcgaaagccgcgatttgttacggcagcttcttcatcaggcgtacgatccttgcccaactccttcatgagagaaagggtttgttgtgcctgcggagttttcattcgctcctttaaaacaggtaaatcggacgaacggacgtacaaccgaggatgcgtttgaggtggaatcggtacattaaccccttctactttttgccaaaccacctctttcggcaattcctgtgacgaaagggaaaaagagcttagtatcagactgattgaaaagaaaattgatttgtgtttcataatggaatttatatcagatattactgttgtaaaaatacaataaaaaaatcaagtagctataaaaaataagcacagaaacaaaaagattgtttctgtgctctataattcctctataaacttgtacgcttacactaactcatccgatgtatagccctgcggcagctcacgacagttatagcccgaagccataatttcaccgtaggctccggcagaacgaagcgccatgaggtcaccacgcttcacgccattcaaatcaacagccttaccaaagacatcggatgactcacagatagggcccacaacatcataagtctgcagcggagcgtcggacgtaaggttctctatcttgtggaaagcctgatagagtgcagggcgaatcaaatccgtcatacctgcatccaaaatggcaaactgcttattagcaccttgctttacgtacaacactctcgaaataagcgaaccgcactgccctaccaccgaacgtcccagctcaaaatgaagcgtctgataagaacgaagtttcaggcaattgtcgtacgtttcaaaatagcttttgaaatcgggtatcgcctgacggttgggatgtccgtaatcaatgccgagaccaccccccacattgatatgttcaatgcgtatctgacgagcttcaagcctgtcctgcaattcattgacacgattgcacaaagctacaaaatcgcccatgtccagtatctgtgaaccgatatgaaaatgaagtccgatgaatttgacattcttcatttcctgcgccacatctatcacatggtccatatcctgcatactgatgccgaatttattttcagctaatccggtagtgatattggcatgagtatgtgccccaacattgggattgatacggaaagcgacattagctatcttacctttcgcctcagccagttcattaataatctccaattcgggaatggactctacgttaaagcagaagatgtcataatccaacccgagatttatttcccagtctgctttgcctactccggcaaacactatcttattggcaggaaaccccgccttgattgccgcacgaatttcaccaccgctaacacagtccgcccccaatccgctttctcggataatagtaaggactttggaattggcattagcctttaccgcataatgcaccgaataattatcgtagcgtgacgcttcagtgcggatgcaagtcaaagtatcacgcaatactttcgtatcgtaataataaaacggtgtacgcagttcgcggaatttatcaataggaaatgttcctttcatacaattattatgggttgttcgtcattcagttaaaaagagcgcttttatcaaaaggtaaaagcgctcataatctactatttctttatattattcattgaacagcgcatcactgagtgactgcaaagcctgtttcttatcacattcacgaatgaggaaagaaatgttatagttgctgccgccgaaagaaatcatacgcaccggaatatcacgcatggcatcaagagccttagcttcaaagcctacattttcccattcaaggtcacccactacgcagataatgcacatatccttatccaccgtcaccgtaccgtatttcttcaagtcatccaatatttcgttaagatgcttggtgttatcaatagaaacggacactcctacctcggatgtacaaatcatatcgatagaagtctggtagctttcgaaaatttcaaataccttacgtaggaaaccatgagcaagcagcatacggctggacttaattttaatagccgtaatattctccttggcggctactgccttgatcttacccttctccgtatcattggaaatgagtgtgcccggagctgtgggatccattgtattgagcagacgtacggggatgttagcgtacttggcaggctggatacaagtgggatgcaggatttttgcaccaaagtatgccaactcagccgcctcttcaaagtggagatgacgcacaggagaagtcttatctacaacacgcgggtcattattatgcataccatcaatatcagtccatatctgaatctcagaagccttgacggccgcgccgatcaatgaagcggtatagtcactgccaccccgttgcaaattatctacctcgccataggcattgcggcagataaaaccttgcgtgatatagatttcggcattgggatgcagttcgagctgaacctgaagtttatctttgatataaaccggatcgggctcggcatttttgtccgtacgcatatattctaaagccgggagtaaaactgacttcacaccacattcttgcagataatagttcatcatagcagtagaaatcaactcaccttgtgccagcacaactttttcctcgaacagtgtgaaaaggtctttggtataagaacggatataatcgaaatgagatttgataagttccaaacccttctgtttatattcaggagtagcatagagttcatcgatatgctggcggtattttgtttccagtctattgataatctcgttagcaccttccggatttttcttgtacagatagtccgaaatctcaaccaatgtgtttgtggtacccgacatggcggagagaaccacaatcttacgttcaccatcggtaatcaatttggctacttccttcattcgttgagccgaacctactgaagtacctccaaactttaaaactttcat

SEQ ID NO: 132 - DNA, 14073 bp, unidentified
  source 1..14073: mol_type = unassigned DNA
atgaaagaagactggaaacccggaacaatgatttatccgctgcctgccgtattggtgagctgcggaagcactccggaggaatataacattctgactatcgcatggacggggacgatttgtacgaacccgcccatgtgctacatctccgtacgccccgaacgccactcctacgacatcatcaagcggaatatggaattcgtcatcaatctcaccacgaaagacatggcccgtgccacggactggtgtggcgtacgctccggaaaggactacaacaaattcgaggaaatgcatctgacaccggggaaaagcaccgtagtcagcgcgcctcttatcaaggaatcaccgctttgcatagaatgccgggtaaaggagattatggctctcggttcgcacgacatgtttatagcggatgtggtaaatgtacgtgccgatacccgtaatctgaaccctgaaaccggcaaactggaactggcggaaacgaatccgctggtctatgtgcacggtggatattatgagctgggagaaaagataggcaaattcggatggtcagtagagaaaaagaagtaataatgcgataaaggttttaagagatggagttgcgacgaatcttgatgggcttatatctgttggccttccccgccatgatgtggggacagactccggttgtgcccggtactgccgacgaagagcattccagacaccgcaaggaaactccggtcaatttcggtttcaaaggcggtttcacctcttccttgttccttgtatcccagttcagcgtcaacggagtgcccattgacgaagtgcagaacaattacaaaataggatatttcggttcccttttcatgcggataaacttcgaccgccacttcctgcaaccggaaatatcctacaacatcaaccggtgcaacatcaccttcgagaaacctctgcccgaagacgccgcatcaggagcccggccggaggaagcctccattacatcgtccatccacagtatagacatccccgtcatctacggatacaacttcatcaaggaggggccgtacagccttgccgtctttggaggacccaaagtgcgctatatatgggacaggaaaagtgacatcgacttcgagaatttcgaccaggtgaatatccgtgaaaggctgcgtccgctcaatctcagtttcaccgtcggcgtatccgtcaccatctcacgcgtctttttcgacttccgttacgacatggggctgcacaacatctccaagagcgtgacatacgatattccggccgacaacaacgctgctgacgaaaacacgaaaaacgaaatccgttttcaccgcagggacaatgtgctgagtttttctttcggagtgttcttttgacagtaaatttcttccttttctttcaatttattcatttatttcccgtaaatttgtgcgcttaataagagaacacagatttatcaaacttatctaataagcagaatgaaaagagatgatttaattttcgaacttatcgaaaaagaacaccaacgtcagctcaaaggcattgaactgattgcatcagagaactttgtaagtgaccaggttatgcaggcaatgggctcctgcctcaccaacaagtatgctgaaggataccccggcaagcgttactatggtggttgtgaggtagtggaccagagtgagcagattgccatcgaccgcttgaaacagatcttcggcgcagaatgggccaacgtacagccgcactccggtgcacaagccaatgcagccgtattcctcgccgtgctcaatccgggcgacaaattcatgggactgaaccttgcacacggcggtcacctctcccatggctcactggtcaacacttccggtattatctatactccctgcgaatacaatctgaaccaggaaaccggacgtgtggactatgaccagatggaagaagttgccctgcgcgagaaacccaaaatgattatcggcggcggttctgcttattcccgcgaatgggactacaagcgcatgcgcgaaatcgcggacaagataggtgccatcctaatgattgacatggctcatcctgccggactgattgcagccggtgaactggataaccccgtgaaatatgcccacatcgtgacctccactacccacaagactctgcgtggtcctcgcggtggcgttatcatgatgggtaaggacttccccaacccctggggcaagaaaactccgaagggagaaatcaagatgatgtcccagttgctggattcagccgtattccccggtatccaaggtggtccgctagaacatgtcatcgcagccaaagccgttgccttcggcgaaatcctgcaaccggaatggaaagaatatgccaagcaggtgaagaaaaacgccgctgtcctggcacaagccttgatagaccgtggcttcaccatcgtttccggcggtacggacaaccactccatgctggtggacctgcgcagcaaatatcccgatttgaccggtaaggttgccgagaaggcgttggtatctgccgacatcaccgtaaacaaaaacatggttccgtttgacagccgctcggctttccagacttccggtatccgtctgggtactcctgccatcacaacccgtggtgccaaggaagacctgatgctcgaaattgccgagatgattgaaaccgttctgtccaacgtagacaacgaacaagtcatcgcagaggtacgtgcacgcgtaaatgcgaagatgaaagaatacccgctgtttgcttattaataagcaaacagaattaaaaattaagaattaaaaattaaaggctgcgcaatgttcgctttgaactgcgcagcctttaatttttaattcttaatttttaattctaaacgcgctccgcgcgtttagctcagcccttctatatttccgtccacaatatcaatgtgttcggcttgtggtttcttgggtaatcccggcatacggagaatttcaccggcgatggctacaatcatttccgcaccgttattgaccacaatatccttgatgtggaactcaaagttgttgactgcaccatatatcttcgggtcggcagagaaggagtactgcgtcttggcaatacagacggggtaatggctgatacccatctgctctatcagtttgataaccttgcgggagtggagactgtaagtcactacgcttgccccgtagaggttgcaggctaccttttctattttacgttccacgcaatcgctctcttcgtaggtgaaggtcagcggttcggatggtttgttctcgatagtatctactaccagattggcaaggtcaacggctccctctcctcctttggcaaaggcgttgttcacggcaaaacctacctcaagcttttcttcgcaatggcggcggatagcttccacctcctcgtccgtatcactggcaaaacggttgaatgccacgatgacctgctggccgaatgaacgcaaattgcgtacatgcttgtccagattgccgaagccctctttcagtccttccatattgggttccttgatgcggtccagactgacaccgccatgcatcttcagtccttgtgcggtagcaacgattatcgtcagcttgggctgtaggccgctcttgcggcacttgatgttgtagaacttctccgcacccaggtcagccccgaaaccggcttccgtcactacataatcgccgaatgtcatggccatttttgtggcaagaatggagttgcaaccatgggcaatatttgcgaacggtcctccatgaacaaaagcagcagagccttcggtagtctgtaccaggttggggttgatagcatctttcaacagtacggtaatggcaccagctactcctaactccttcactgtgaaaggagtaccatcgaaacggaatcccagaataatattttcaatacggcgacggaggtcatcgaggtccgttgccagacagagaatagccataatttcggaagccggggtaatatcgaagcccgactcctcggtaatgccgttggtgctcggtcccaatccggtgacaatgctccgcaaggaacggtcattcacatcaagtacgcgccgccagatgatttctttcagtccgaagccgtccgcctgatgctggtacaagtaattgtcgagcaaagcggaaatcatgttgtgtgcggaggtaatggcgtgaaagtcgcccgtaaagtgcagatttatcttctccatgggcagcacctgggcatatcctccaccggcagcaccgcctttcatgccgaagcaaggacctaacgagggttcgcgtaaagccacaatcgctttcttgccaatcttgttcagccccaatgccagcccgatggacacggttgttttaccgatacccgctttcgtagccgtgatagccgtcaccagtatcagattgctcttcttcactttctcttcatcaatcagatgcgtaggaatcttggctatgtaacggccatagttctctacttcgtcacgcgggatatccacactttcagccacctgctttatcttcttcagctctatgctgcgggctatttcaatgtccgatttcatacagagtcttttctttaaataacaactttaatgttttgaaagttgcaaaagtacgaaagatgtggcaaagtacaaaagaataccgtattttcacctgaccacctgcatcttctatctatttgaaccgcgacgtatccaccgcctcccgttgcttctccttatatccaccgaatttataagtaaacgatacgccgaattcgcggaagcatgagtaatgattcgtcacattctgcgtcttgaaacggatgcggggagaaatctgtcccgtctcaaaaatatcgttgcagtagaggttgaggatggctttgttcttggcgaagccgtagcgcagggcaatattcacattgcccgacgtgggcaggtcgtagatgccctgaatggctttgctatgcacaaatccggtcaccgtcagcttcaagtcgggcttggtggagagagtaaaagtattgttcatctgggcaatgccatagcattgctttctgtcgaaaggaatatcccagaaatcaccatccttttcgcggtgccacaagccgataagggtaaggcgcgaattcaaccagttcttcaccttaaacgggatagaggcttgtatgcctgcttgttgctgataatcgaaattgagtgtcttatagatttcaaccagacgttcggaagattggtaaagcgtctgtacggagtagtctttggtgtggttgaaccaagcgctgaagatgtatttgcttttcaaaatataggtcattttcagctcatactcttgcgccggtttcaacagcggattaccatgcagctcagagtatccaccgccgatgtaagagacggcatcctgcaccgcccagtagtcgggatagtccttgtcgctgctcagagagagctgaaggatatgtcccggtgccggcatatagttcaagttgacgatgggataccagtcccactggttccagacgggagtcttgtaatgctccacagccaaagaagcgtccaaagcaagtttgtcgccgaaactcttgctgaaacctgcatagatattccaagtttgctcgcggcggcgggacttcatattgctcaaggcatctgatgaggtcaactgttcaccggtatcgggatcgtaataatattggtagctattgtcaatactggtagtgtagacggctccataattcaagtcccagcctttccccaagttatgctcctgggccagaaagaacttccagcggttgatgcgctgacagtcttccgtgtagaaatcgagttcctcatcctgcatacggctatgcagtagttggttggacggggaacggtagtaggtcagttcggcaccggctttgaggccgaaaggggtacgatagtccagacggccgttgtgcagccagtcggtgctattgccatgagttgtggacacctgcgtgcccgtcacgcccgtccagttgtgggaggtggaatagccaccgttatagacgaaactcagctgatggtccttggcgatgttatagtccgcccctaccctgaaattatgggtatggctgcggccacggcccacctcatctgttgtcatggggtgaaccgagccgtctgccagagtgtgcacagcctctttgtcggtagtagagtagccccggccatggctgtgcgagtaaagaaaatctgctgagaatttatttttgctgaaaagcaggctggcgcgttcctcaaagccttcgttatgcttctggcgatacttggcatagagttcgccttgccaggagccggggccgcctgccgattgtttcaaggtgatattgataagtgcgccacgcacctggtagcgtgcaggggcgttgtacatcacttccgccttctctatgcggctggcagggatgctgcgcagcaaagaatagagctgctctgtgctgagggtggttactttgccgtccaggataacggtgactccctgacctgccaactgcagccctccattcatctcgatgacgccgggaagctctttcacggcatcgtaggcattatctacggggaggttctggataaggcggggcaggtcgtacaccagcttgccttgcgctgcctttacgatggggcgttcaccggtaatcatcacttccggcaaggtctgataaagactgtccagacgggcatcggtcgtgataaggctgtcggcgctgaggatgcggttgtcgtccgcaccggaggtggttgcagtgccgttgttctcttgtgccgaaagactgatgctcaaagcacagcatacaatagggagtaaatagaatcgtttcatgttcttctttttatttatgtttatattcttcttctgcaaatcttcgtctgcaaagtacggcagaatcagcagaaacttgtgttatcagcggcttaccaagtgttatccagtgttatcgggagtgttatttagtcttatcggatgatagggttcacaatattaatcttacctttgtatgtataaaagtaaccggaaacaaacatgaaactgccattcaaatatattgccatacttgtcatcgtctccctggccggcatcttcgcctaccaagcctactggctgacggggctctaccataccatgcacagtgaaatggaaagggacatcaccgaagccatgcgcatgagcgactataacgaaatgatgatacgcgtggataaaatgaagcaggacgacataaaccacggtgaagtcagcgtatcagccggatacagcgatgacggaaaatcatttgtccgtagcagtaccaccatctcccgtgaagattctttggacaacaccaccctgcacgaaaccttcatgcccaaaggagacagtgtttacgtgacccacccgaacgattcaacccgcgtggaagtcagtgtcaaggactcggacagctctccccaatccgcattgagtgccaaagggggactggatgtgattttgcgcgaccaaaacagtatgctggaactcgccacctacttccagcgcggactgcattcgggactggacatcatttccgaccccgacgtaatgctttatgacagcctgctgacttcattcctgcatgaccgtaacatcaatcttccccataggctgctacatcttcacaaaggcagcaaatgggactctaccattctctatatagatacattggtaaacatcggtacccccggctatgtgcctacctcaaaagccgtggaatataattattctttcgacatcaatacaagtcaaagctaccgtctcatcatggaaccggccggcacgttggtcttgcgacagatgtcgggcattctcaccacatcattcgttattctgatcgtactcgctttctccttctggttcctgatacgcaccatcctgaaacagaagacactggaagagatgaagagcgatttcaccagcaacatcacccacgaactgaaaacccccatcgccgtagcatatgccgccaacgacgctctgctcaacttcaaccaagcggaggaaaaggcccagcgcgacaaatacctgcgtatctgccaggaacagcttcagcgcctcagtggactggttgaacagatactttccatgagtatggaacgccgcaggactttccgcctgcacccggaggagtttgcaatacgtgatattctggaaacgctcatcgaacaacacaagctgaaagcggaaagctccgtccacatatcggtggacatcgaaccggaagatttgagcgtacttgccgaccgcacgcatttcagcaacatcatcagcaacctgatagacaacgccatcaaatattcgcacggagaggccgaagtggccatccattgccgcaaggtaaccgtcgaagggcagaatgaacagaccgaaatctccgtcagcgaccacggtatcggtattgctcccgagaagcagaagcacatcttcgacaaattctaccgcgtacccacgggtaatctgcacgatgtgaaaggctatgggctgggattgttctatgtgaagaccatgatagagaagcatggtggcagcgtatcggtaaagagtgagttgggaaaaggaagtacctttacgataaggatatgataacattatttgttagggtactttacattacttgttaaggagctttacattacttgtaacaaaagcgacaattatggaaaagataaccgtacttctggttgaggacgaacagaccctcgccatgattatcaaggacacattggaagggcagaacttcatcatccacaccgcagcagacggtgaagagggattgcgcaagttctttgacctccgtcccgacgtgctggtggcagacgtgatgatgccccgcatggacggctttgagatggtgcgccgcatccggcagaccgacaaacagaccccggtactattccttaccgcccgttccgccatcaacgatgtggtggaagggtttgagctgggtgccaacgactacctgaaaaagcctttcggaatgcaggaactcattatccgcataaaggccctggtaggcaaagctttctcctttacagaagaaaatcccaaggaaactaccgtttttgaaatcggtgactaccgtttcaattccgtcactcaacgacttgcttttgcaggcagcaccccgacttcacctgacgcggatacggaagtggaactctcccaccgcgagtccgaaatactgaaacgcctttgcgagaaccgcaaccaggtggtcaacacccagaacgtattgctcgacctctggggagacgacagcttcttcaactcccgcagcctgcatgtgttcatcaccaaactgcggcataaactggccggagacgagcgcatccgtatcgtcaatgtgcggggaataggatataaactaatagtgaactaaactaaaactaaactactatttatgagaaagttattattcattacttttatctgttcctcactctgcgcctatgcacagagcgagattccggaagacacaataaagaaccggcctcccgtaaagaaagagcagattcccttttctccaaaagagaacaagcgtacgggccttgatgaaagccagccccaacaaagtctgcagggcgaacagcaggaagagataaatctccatctccctccctccgactatgtggagcccctgccctggacggacatgaagaagatacactttcagaagaacatctttgaatgggacttccagcgtttcgccgatttcctgctctcgccggaagtcgtactgacgatgtacggcagccataacacctatcctgcaatgggctccatcatgcaggctggcgcaggagtcacttattacagtcccgacggacattgggaactgagcggcggagtgtatgccgcccactattccatctcccaaccttcatccattacaggtgcccagtatgccaaaagggatgccccccgaggtactcaatgggacataggctacaatgcctccgtatcctaccgcatcaatccctacatgcgcctgcatgccttcggccagtattcgggctacgggagaagcaactcctttcatggatatatgaacccgatgtatccgcaaagcggttatggcatggtactggaactgaaagtgacggactggctcgacctcaacggagggatggaacgaagatacgaccccaccaaaatgaaatgggtaaattcgcccatcttcgcccctaccattcgtataaagaaatagaaataatacaaagatatttccagaaatagagggaaacgagtatctttgttcagtctgcccctatgcggcagacagcaactgaaattgtgaacaaagaactatgaaacgaatcttcttctgcatcatcattttacttgcaggcatgtcatccgtcagcgcacagaacgggatgcctgccgatacggtacgtactgcagtacgtggcgaagcgtctcccgaaggcatgtctccgtctgaaaaggagcttctgccggacgtgaagaattacgacggcttcctgctggatatggggctgatgaatctgtccacccccactcttcccaaattcactttggagataccggatgccagcaaagactatagccgcatcttccagttgaacccgaacgtgacttattcacaaggtctttcgaacatattctcactcagcaactcccggtatttcagttcgaatcccttcggactgacgggcttctggggctctaccgacaacctgcaaatgggaagtttcactttgaagaacggcatgcgcatccatacgtacggcgaatatgacaaggacggctggaaagtacccaacccttccgcactgccttgggaaaagaacaatttcaaaggggcgttcgagctgaaatcagccaacggagcctttggcatacgcatcgaggtacagcagggcagacacgtgccctattgatgcccatcacttaacaacagaatcaatgacaagaaagaaaatactggtaataggcgccaacggttttaccggcagacgcatcctggatgatttgtcccgcaacttgtcttaccagacaacgggctgttccctgcacgacgacatctgtccccattcgggcgactatcgctttatccgtacggatatatgcgaccgccaggcggtggaaaagcttttccatgaagtacagccggatgttgtaatcaatacctccgccctctccgtccccgattattgcgaaacgcaccatgcagaagcggatgccgtcaacatcactgccgtagagcatctggcagaatgctgtgaggcgggaggcagccgttttatccatctttccactgacttcgttttcggtggtgatacggaccgaccctatacggaggagaatattcccgctcccgttaattattacggctacaccaaactggaaggtgagaaacgtatcgccgccgtttgcagggattatgccatcgtgcgtgtagtggtagtgtacggtgccgccctgcccggacagcatggcaatgtgctccaactggtggcaaacagattaaggagcaatgaggaaatgttcgtcgtatccgaccaatggcgtacgcccaccttcgtgggagacgtgtcgcaaggagtggagaagctgataagtcatccgcaaaacggtatctatcatctctgtggcagcgagtgcctgaccattgcagacatcgcttatcgggtagcggacgtattggggctgaatcgctcgctcatccgtcccgtcactacgaaggagatgaatgaaaagacgccacgtccccgtttcagcgggctgagtatagaaaaggcaagccgggaactggggtatcagccgcacacgctggaagaaggaataaagcagatgttcggatggtaaataatgcaggtgcggatggcagcagattcgactacagcaactccggctctgccagtcctttctctttgcgatacacacgtaccatctccagaatcacatctccatatttctccacccctttttttccgaaatacggaatgcgtacaagcatggccttatccgaaggaagcagattgcagatgcctagaattgccttctgctgaatgacggtgtatacgggcagccctaatgcggaagcttctgcattgcgccatgctaccaagcggttgtaaagttccggatgcagcacatccgtgggtacttcaacagccgcagcatcgcgtttccgctcacgcggacgtttctctttatcagcctgcttactgcttccctgcccttctttggcagaagcacttctccctttgcctttacccttctgcgaagccgaatcatcaatggaaagcagtgctttctgcttcaagtatcctgccatatggaaaccattctccagcacataatccagcaaatcagtcttcatgtcaaacacttcctccagctcctccatggcatcccggagcttcttcttcaactctttattatcagaagttaccgtactcgccatcaccgcatccagcggttgcaactgctcttgaaaataagtggcggcagagtgtatgcgcccctgcaaagtcgggtcggctgcatagtcctgcgcagtatcaatcaggcgggtatactggatactgaacttctgggctactttcgtcactttgtcgtgaaaacgttccatttcctccttacaggctgcgagttgcttgggaaagagcttgtacaagtgttcgtctatcagccgcacataccgccgcaaagcctgctccatgggctggaaatcgaacaagcccgacagcagttccaggaaataggtctgctgcaaggaacggaagcgtttctcgtccggctcgtttctccgtgcctccatcgtgaaggtatctactgcatggtcactgataacggcctttgcagaaagcggggcactgagcaccactccctccaatgtcttgcagcggctcagagccacataggtctgcccatgcgcaaaggaggcactggcatcaatcacggcacgttcaaacgtcagtccctggcttttgtgaatggtaatcgcccacgccagcttcagcggatattgccggaatgttccttcaatatcttctgtaatctccttggtttcctcatcaagcacgtatttggcattcgtccactcttcctcctgaagtaagaaggtagcgtcgcttcccttactgcgcacttcaattccatctgccgacacggctgtcacctctccaatcatgccattgtagtaacggtgctcaccggaggtgtcgttcttcacaaacattacctgggcaccgcgtttcagttccagtacttcatccgtgggataggaatattcgggaaactttccgtcaatcttggcacgaaaggcatacgagcgtcccggaagttgttccagctcatggtcattaatccgttgggcctgataattgtgggtcaccaggcggatgtatccttcttctttatctggtacgaaattgggaatataccggcggttcaaggcttccagcacttgcccgtcacaacggttttcgcgaatgcggttcagtaattcaagaaaagtcccatcgttctgccgatagactttctttagttctatagtgcagtattccgtctgcttcaaggcctggctggagaagaaataaggcgtgtcatagtatttgcgcagcatctgccactcatcgtctttcactacgggagacagctgctgtaagtcgccaatcatcagcagttgcacgccgccaaagggtttgttccggtcgcggaaccgcctcaagacggcatccaccgaatcgagcaagtcggcacggaccatactgatttcatcgatgaccaataaatctatgctgcgtataatgttgattttctctttcccgtaacgaaaacggtaggttgccttgccatctgcgctgaatgagctttcgggcacataaggagcgaaaggtacttggaaaaaagagtggatggtgacaccgcctgcattgatagcggcaattcccgtcggtgcaagtacaatcatccgtttcggactctctgccctcagttttcgcaggaaagttgtcttaccggtacctgccttgccggtcaaaaaaagatgagtgcctgtgttttcaatgaattgccatgcaagcgctatttcgggattattctccat

SEQ ID NO: 133 - DNA, 12722 bp, unidentified
  source 1..12722: mol_type = unassigned DNA
ttatttattattctgctgtctgcaccactggattgtctctacaatacccttttcaaatgtatattgtggttcaaagccagtatcagcctttaaatcttctatatctgcacacagatacataacctgattaggactataaggtatatccccgaatcctatttggatcgtactatctatgctttctcccattatattaatatattccttaagcggtcttgcctgaccacttcctatacaatatatttttccatctatgcccttctcaccaagcagtctcatagccagtgctgcatcttttgaatacagaaaatcccacatctgctcacccttcgtacatgaaggaacttctcctttaagaagtctgtctatcgtactcattaccattgttttttcgccatcatatggtccatatatactgagtattctcgtccagatatgcttaattcctttctgctggcacattatacgtgtcatctgacctgcgcataatttagctattccatatccattttctggaaatgttggggtacttccattaagttttccctcaaatcttccatattctgcctgtgagcctgctcctacgaatgttttacatcctaactttgaggcagcttctacagcatcaagtgcatatttaacattaaggttctgtcctttcatgttgttacggctgtctccgaatgttccatcccatccaaaatgataaaatacatctgctccatccggtattaattctggcaatttatcaagcttagaaagatcacacttaacacattttactaaagaactttcttttattctgtcagctcttttagaaccaggtcttacaacagcaacaacttcaataccattagcttcaagttcattaatcaaagcaatacctatagaacctgttggtcctgttattacagctcttttcatataaattgtacccatacctttcaaatatatcttattttactactttttaccaaaagcccatattttatttaagaaaaagttaattgggatgttgattataagattaataattggtgctatcattttgcttacatgtagtactgaaacccatataactgataaaacattatttaatattaatcctgtaaatccatatgatacatatgttttaaataatgctgcccatatatttctatgttcaccttcttctttcttaaacacaaacttattattccaataaaatgaccagagaacactaagcacccatgaaactacattagctataatatagtcaaatgtcactccacttttagaaacaagaacaagcgttacaacataaagtaaatatgatattacagtattagatacacctactaatccaaactgtagaaattctttaaatgtctgtctggttttatctgttaaatcctttctaataatcttaaaaagcaattcaacaaaaaacatgtatattttttctataaatccgtatatcatttttcccatatcaatatatacccttacatcattataatccagacattaaatataatgtctggattataatattatttatttttaatatatatcagactactgattaactgcttcctttatagtcttagccatataatctatcatctcatctgtcattcctggatatactcctacccagaatgtatctctcatgattctgtctgtattatcaagatttccaactactctgtagccttcctttgttgctctcatctcatcaaagcatggatgctttataagatttcctgcaaaaaggtttcttgtctgtactccgtggttttcgatatactctacaactgcctttctgtctatgccttcctttactgtgataaggaaaccaaaccagcttggtcttgagttatcacatggtactggaagtattaccttatcttcgatatcagcaagcgctgctcttaatctgtcaaagttatgtcttcttctttcaacgaatgaagggaacttctcaagctgtgcacagcctactgctgtctgcatatctgttgccttaaggttatatccaaagtgtgaatatacatacttatggtcatatcctaatggaagttctccatactgcttatcgaatctgtgtccgcagaggttatcctttcctgatgggcatacgcagtcacgtccccagtctctgaatgagcggatacacttgttaaggagtgcattgtttgtgtatacagcaccaccttcacccattgtcatatgatgtggtggatagaagctgcttgttccgatatcaccgattgtacctgtgaacttttcttcaccattgattgtatacttagaaccaagtgcatcacagttgtcctctactaaccagagattatgcttatcacagaattcctttactgctgataagtcaaaaggattaccaagtgtatgtgctatcatgactgcctttgtcttatctgagtaagcttcttcaagctttgttacatcgatgttatactgtggaatagtaacatctacgaatactggaacagcaccatactggatagctggtgttactgttgttgggaaaccggcagctactgttattatctcatcgcctctctttattcttctgtcaccaagaagtggtgatgtaagtgccataaatgcattgaggttggctgatgaacctgagtttactactgatacatactttacattaagatattcgccaagcttcttttcaaactcatctgtataacgtcctgatgtaagccagaactcaagtgctgagtctacaagattcatcatttccttgctgtcatatacgcggcttgcataaggaattctgtccccttccttatactttttctggttatgatacttcttgcagtattcatcaacaattccaagaatttcttctcttgcttctaattcgttcttgttttcaaacatacttttctccattctatatttgttatattccaaaatttttatatttccgcatttttatttctaagataatatattgatgtcggggtcgaaagaaagctaataatatatctttttagcttaatcattaaagaattcatcaatttccttatcaagacatgcaacaacgtctccgccagatgcatatacttttgaccattctactgacttttctatagccatatcaaaattccatcttggcttccagccaaatgtcgtctttaacttagaacaatcaagctttaagaaattagcctcgtgtggacctccatcatacttgtttatccacttaagtccttctccccacttgttacagaatgtatcaacaagtgttcctgttgttatacagtcactctcatccggacctacgttataaaagcctgcatacttcttatcttcgtactgcttcatggctatcataagataagctgcaagtggttctaagacatgctggtatggtcttgttgaatgtggattacggacaactatatcctctttctttacagcagcccttacacagtccggaacgattctgtcgttggcaaaatcaccaccacctataacattgccagctcttgctgttgatactgcaacatccatatcattaaaaaatgaattgatatagctgtgtgttacaagctctgaacatgacttgctgttagaatatgggtcatatccgtccagaggctcattttccctgtagccccaagcccattcgttattgtggtataccttatctgttgtcacgttaaggaatgactttacacatgagttaagccttacacattcacatatattcactgtacccatgacattagtctcatatgtgtatactgggtctttataagaatctcttactattggctgtgctgccaggtgaagcactatttctggctgtgtttcttcaaacacattttttaaatgttcaagatctcttatgtctcctattactgagtttatgttgttctctacatctgccatagagaaaagattaggtgttgtaggtggtacaagtgaatatcctgttacctgggcacctgcctttacaagtatcctgcagagccatgaacccttaaaacctgtatgtcctgttacaaggactttctttcctttataaaagcttaaatccatctttgtatataacctttctgcttatcaactatcttaaaacatataaatattcatcttatataattctatataatctgccacctgtgaatttaccacttcttccaaggagctgttcctgtggcaagatacttctcaagcatatccatctctcttttgttatccatgcactgccagaagcccttatgcatgtatgacataagctgtccttcttttgcaagcttttcaagtggttccttctcaaagactgtatcatcaccttcaatatagtcaaatatttcaggatttaacaccatatatccggcattgattggagctccatccatgtggctcttctctctgaatgacttaactgcattgtcaccaccgatatcaagcacgcccttctgctgctctaacataactgctgtaagtgtagcaatcttgccatggttcttatggaaatctacaagctttgatatatcaacatcacatactccatctccataagtcataaggaatggttcatcgcctacatacttctggattctcttgattcttccacctgtcatagtgttaagtcctgtatcaactacagtaaccttccatggctcacagtgctgctcatgaataatcatatcgttagttcccttagtgaaatcaaatgtgatatcactgttatgaaggaaataatctgcaaaccattcttttattacatactgcttgtaacctgcacatatgataaattcatcaaaaccatagtatgcatactccttcataatatgccataaaataggctttccacctatctcaatcattggctttggcttaaactggctttcctcacttattcttgttccgaagccaccggctaaaagtactactttcattcttctcctccagtctattcatatatttaatatctctttggcactttattaatcaacacttctccaatattcaagtgtttctttaagagtctgttttaatgaaatgaccggctgccagccaacttctttcctaatcttatctatatcaggctctataatcggaacatcaacaggacgaagctttttttcatcaattttaacttcaatatctctgtctgacattgctataatctcgtcaagtatctgtctgatttcaatggcatgtcctgttccaacattgtatgtttctccgcgtctgccatttttaacaagaagtgcataagcctttacaacatcccttacatctgtgaaatcacgttttgcacttaaatttccaacatatattactggttcctgttttcctttttctatatctgcaacctgcttacagaaatcagcaaccacaaacataggtgtctggtttggtccaatatgattaaatgcccttaccatcataacatcaagtccatatgcatctgaatatatctttcctaacatattctgacatgactttgttgctgcatatatatttccaggtcttaacacattatcttctatgataggacattcatctttctttatatgtccatattcctcacctgaacctataagaagcactcttggctttttatcagcatcctttaccgcttctaataaattcacacaaccctttatgtttacatctactgtcagtgtaggattcttccatgaataagcaaccgaagactgggctgcaagatggaataaataatctggtttttcctcactaagaagctctgatatctgattcttatccagaatatccagattccttacaactgctgaatctattgtaagagtttctttctccgtcttggtaactgtcacatcatatccaagatctttagttaagtgtcttacgagatatggtccgacaaatccacccccgccaactactaatgccttcattaactacctctcttctgctacattaaatattgtcaggacagattaatcattctctgccctgactataaacatcattatatttattaattattagcagcttctttcttaacaagttcaagatcattcttaaccattctttcaactaattcctggaatgatatttctctcttccatccaagctttgactctgccttagctggattaccaataagaagttcaacttctgctggtctgaagaaatctggattaaccttaagtacaaccttgcctgttgccttatcctttgctatttcatcaacaccttcaccctcaaactcaacttcgattcctgctgctgcaaatgctgtcttagcgaattctcttactgttcttgtctcattagtagcaattacataatcatctggctcatcctgctgtaaaagtaaccacatagccctaacataatcctttgagtgaccccagtctctctttgcatcaagattaccaagttctacacaatcctgaagtcctaacttaatatgtgctacagcattagtaatctttcttgtaacgaactcttttcctcttctttctgattcatggttgaaaaggattcctgaacaagcatacatattgtagctttctctatagttctttgttatccaatgtccgtaaagcttagcaactccgtatgggcttcttggatagaaaggtgtatcctctgtctgaggtatagcctgcaccttaccgaacatctctgatgttgatgcctggtagaatctgcactctggctttacgattcttatagcttcaagcatgttagtaacaccaatagcatcaatatcagctgttgtacatggtgtatcccatgatgttgcaacaaatgattgtgctgcaagattatatacttcatctgcctgtgatatcttcattgctgatataagtgatactatatcctgcatatctgcgtagataaagtgaatcttatccttgatatgatctacgtttccgtaatccacaacactctttcttctcataagaccatatacattatagcccttttcaagaagaagctctgctaaatatgaaccatcctgtcctgttatacctgtaattaatgcgtttttcataattaatctccatttctataaataaaaatatacgctttaaactcgcacaaaacaccttaccacaaaatcatattacctgtgtctggcatattgcaagtattttcacgaaagctaaattaacttttatagtttccacacttaaatcattatatatttaccaaattataaatactgattctttccctcttctctaagcttagcaagtactttctttatctcacctgcgttctccttagtagaaatgagtgtagcatccttagtatcaacaactatcatgtctcttaatcctacagttgcgataagcttgtctgcaccttcaataacacagttctgtgtattaactgtaacaacattgccattcacaacattaccttctgaatcattttctttgattcttcctactgcaagccatgagccaacatcatcccagccaaaattaccagcaagcgtgtatatatcagaagccttctccatgataccatagtcaactgactgtgattcaagattagggaattccttttcaagagtattctgataatctgctgtaccaactgattctttgatctttaataatccttcatatgttgaagtcatatacttcttaaagcatgaaagtatagtcgataccttccatacaaacatacctgagttccaaagataagaaccatctgcaagatatgccttagctgtatcaagatctggcttttctacgaacttctctactgaaaagctctcaccctctttattatccttgttatactttatataaccataacctgtttccgggtaattaggtgtaataccaacagttacaaggttctcacccttctctgctatatcacatgcattaacaaatgtatccttaaatatatcattgtgctttataagatggtctgatggaagaactatcataaccgcatcatcatacttgcttgccacatgaactgcaccaagtcctatacatggagctgtatttcttccaataggctcacataaaatattctcctcaggaagacctggaagctgctgctttacaagttccttataattagcattcgttgcaatatatacgtccttaatatcaactaatggactgattctctcaaccgtaagctgaatcattgtctttccatcatctgttaatgataaaaactgcttaggaaggttaactctgcttcttggccagaatctttccccttttccacctgccattattaacgctgttttcttcatgatatacctcatttcttatataaataaatatattaattgccatttctgcgcaccttttgtgcatatcgagtttgtatcaaatatatgtagacttcacacatatacgctggaaaattatatctcatactgctcattttgtcaattaaaccggctcaaacggtattataaacaacacaaaattataaaagctgtaattcattttacacataaactacagcttttatcattaacaaatattttttaattattcaaaagataatcagagtatatttctgccattttgcgccaattaattaaagcttctcctatattggcaccacacagctcgcgataaattgcccatacaaaccaataatatgctattattgcaacataggccatgtaatgaaatcttgttttctcactatattcttcctgaagatactcttttataaattcttctgccttatcaaaatcatacattgcatctacaatataataacctacatcaattccaggatctgaatatccaccatactcccagtcaataagtataacacttccatctggttttatcatccaattaggtttatatgtatcaccatgacaaaagcatttatctactccatcgccaagtgtcatattataaagcttttctatctttaattttaactgttcatattctttaaagcaatcggaatcttttttcttaatcaaagcttccatctcaagagcatcttcccatggtttcataccataatcaactttaatatctgccttatgcaattttcttagcactgaaagtatctttttagaatcttcaaaagaattatagtctggttcacggaattctggtataaatacagaaattttccatccttcattcacatctgcatatatatatgttggatcaattcctatttttttagctaaaataagtgattttttttcattttttctattaattatactttctgttccatcacctggatgcctgtatatataatccactccatcaatcttgaatatgaaagatatattagtcataccttcacttacatttctaaagtcaactatatcttcttcatcgcatctgaatacaagcttaatatttcttattatttcactatgtgtataacctaaatattgcgaatcaaactttcttaactcttcaaaataatcaaattcaaatatatttccttttttatactctctcacatacattgatggtaaatcagaaagcttatcttttaaaaggatttcccaataagaattattatattttccatcatctctgatatcttccattacattaataaatgaatcagaaaactcttttttccaaaatgaatgtcccataagaatataaccattatctattggtttattatccatgcagactattttaccatctgagtcgacatcagcatatatctcttcagtaataagatttccacgataacctgagtaatatgtaatatactcatattgattaaatggattctctatatagtaactgtcacttacacatatgtatgtattctttaattcttcttttgcaagatacaggctttctatattattcttaatattaaatgaatcattaataataagtttaacgccatacttatcctcgagatagaaaaacatttccttcttatatccaagaactatcgtaatattcttaattcctgcattttgaagttgttctatctgtctttcaataagcttttctccccttacttcaaacaaacctttcggctgttccagtgataaaggaataaatcttgttgatgaacccgctgcaagaataactgcattattaaccttatatggctctaaagctttaatacctaattcagtaagacatccactctctttatcaatatatcctgcatgaactaatctgttatatgctctggtatcagataaggctctgacacaatctaatgcatacgaacaatccgcacggcctatacttccgttatataaactgttcaatatataaaattcattttttttcacagtgaatacctccaatgtaattcaacttttattcctgtcccggataatctttatatgaagaatccagctgcacaagttcatagaaattatctatttccattatatctgacttctcacatggtcttacttcaacattatatctttctttgcgtaataccaatggtataaattcccagaaataatccttaccatcttgttcctcttcatacacctgtttaaaatcatttcgtaattttttactatcatctttattccaatatgatataccataataattaaaacaaaacgtattaccttttttgtaatcagttatataaccgttatcaagtttataactccaatcatctgtttctattgagaatgatccaagaatgttactgctatactgatacttactaattatatccggattagatatatataagtctgcctcacataaataacattcatcaatattctcaagagcagccatagctgatgatatattgtttgttttatcatacacatcattatcaacaaacttaataaaaggatatttatcagtaatttcatcaaatttttctttcttgtatcctcttaccagagttatatcttttattccgactgatactaatgcatctaaaagtgtatctattattctcacgccattgactttaaccattggttttggcctgtccagtgttaccggaaccattcttgaaccaaaaccagcagccattataaccgccctttttactctatatggctcaagcatatcaagacctttagctgtaatttctaacaggttttcatctcttaatattgcacctatattggtcaactcatcaagtgccttactaacctcagtacctgatatttttaatttatctgaaagtgttctgattgcataaacattctttccatttttttcaagaaatgcaagaacttcaaactgataacgattcataataatcctcatttctgtacacactattttacatataacttatttaactatcataggtatgatatatatgcccaatgctatacatgtaactataattgtacatactttccaaatattgtattgtttatccatcttcttttttgtttcttcatctggttcttcaataataccgatttcttcttcaatagatggcatcttaaattcttttttatgtgaatataaataatagaatattatacatgcaaccgttattattccagatgtaagaagtgccattttgtctgcgaatataagcataaaaacatataaaactatagtaacgacacatccaacaaccccaagtggtgccttatatggtcttttcatatcaggatattttttcttaagacctatatatgataagcatccaatcatataacatatagccagtgaaataagcgaaacagaggctatatagtcaatagatcctgtagcaattaatatgaaattaattactccaactgcaattactgctatataaggtgtcttatactttggatgaatcttacccaggaatttaggcaatgctccatcctcggccatagtatatatatatctcgctggtgcagcaattcctggattaattgtagataaatcaccaccgaatgctattcctatacaaagcaaaattatagggaaacctattaatcctactgcctttaacccttccgcatatggtgcattagccactgcaagcacaccgtaaaactcttttggtacaagaccaactaaaaaccactggaataatgcattaagtgcaaataccataaatacagaaattttcaatgctcttggtaatgtatactgtggatatttagtctctgcacccattgaaacacatgtttcaaaaccagtataacaccaccatacaagaccaaatatatacatcatttcattaaaaggtggtaatgaattcatagcaattccaccaaaatattcgagatgtaccttaggaatcatatataaaaaccaacacactgaacatccccagaagaaaaacataaatgctgtctgtgcttttccagactgctcaatccccctgaaattcaatacaagaaatactgcaacaagaataatggcaataattcttgaatccaaccatactatatcaactccaagctgatcaagtaatattttaaaataattagcaaatgctaaggtttcaccagctcctatagcaactaccgatactatataatgccatccagcaagattagcccatattctgtttaatcctcttttagcataattataagttcctcccgcacatggaagcgctgctgacatttcaccatagataagacatggccatattgatattaatagtgctataaatgtaaatgctataatccatgagcctacacttcctatctgtgctgaaccacacgtaaataatccaactccaactaccgttcctatagtcatactaattgcttcttttaacccaagagccctgaccaatttgttatctcccat

SEQ ID NO: 134 - DNA, 8141 bp, unidentified
  source 1..8141: mol_type = unassigned DNA
atgaaagtattaatcgtaggtggcggcggaagagagcatgcaattgcacaaagtgttgcaaagagtgagaaggtcgataagatttactgtacaccgggaaatgccggaattgcagcactggcagaatgtgcacctatcggagcgatggagttcgataagattgtagcctttgctaaggaaaaagaagtagatcttgtaattgtaggaatggacgatccgcttgtaggtggccttgtagatgaactggaagcagcagggattcgtgcattcggtccaaagaaaaatgcagcaattctggaaggctccaaagcattttcaaaagatttaatgaaaaaatacaatatcccaactgcagcatatgagaattttacagatccggatgcggcaattaagtatctggagacagaggcaaaatttccaattgtattaaaagcagatggactggctcttggaaaaggagttttgatctgcaatacactggaggaagcaaaagatggtgtcaaaaagattatgctggataagaaattcggttctgcaggaaatgagatggtcattgaagaatttatgacaggtcgtgaagtttccgtactttcttttgtagatggcaacacaattaagaccatgacaagtgctcaggatcacaagcgtgccggagatggagatactggactcaacactggaggaatgggaacattttcaccaagtccattttatacaaaggaagttgaagatttctgcaacaaatatgtatatcaggcaacagtcgatgccatgaaagcagaaggccgcccattcaaaggaattattttcttcggactcatgctgacaccagacggaccgaaagtactggagtataatgccagatttggagatccggaggctcaggtcgtacttccaagaatgaagaatgatattattgaagtcatggaagcctgcattgatggaacattggatcagatcgaccttcagttcgaagacaatgcagcagtgtgtgtcgtgcttgcaagtgacggatatccggtaaaatatgacaaaggtctgccaatcacaggattggaggaatttgataaacacgatggttactattgcttccatgccggaacaaaatttgacggagaccagatcgttacaaacggaggacgtgtccttggtgtgacagcaaaaggaaaggacttgaaagaagcgagagctaatgcctatgcagcaacagaatgggtaaaatttgacaataagtatatgagacatgatattggaaaagctattgatgaagcttagtttactattatcggaagtttgactggaagtaaaaacttgacaaatcatttcaaaaggataagataaaatagacaagatgtaagtcttgtctattttcgtataggaaaaggcattttgttaaaaagaacaagtacaatagaagcaggagggcgtcatatggattacatacacgagattgggaagcgtgcaaaatcagtttctgcacaggttcagcatctttcccaaaatcagaaaaatgaaggacttcgaagagtagcggaagaactggaaaatcagaaaagctatcttatggcagaaaatgaaaaggatattgaaaaagctaagaaagacggtatgaaagcatctctgattgaccgtcttcgcctgacggaagaaagaattgccggaatggctgaaggtctcagacagattgctgatctggaagatccaattggtgcaacattgtgggaaaaggtcagaccgaatggccttcgtattggaaaaagagtggttccacttggggtggtcggaatcatttatgaatcgcgcccgaacgtaacggctgatgcatttggactttgctttaagacaggaaatgttgtaatcctgcgtggaggttctgatgcaatccattccaatcttgctgtgacaaaagtgattcaggacggtttgaaaaaatgtaatcttccagaggatgcgcttcttcttgttgaaaatacagatcgtgcagttgtcaatcaaatgatgaagctaaataaatatattgatgtactgataccaagaggaggagcaggactcattgcaaatgtagtgcagaacagtacggtcccggttattgagacaggaaccggaaactgtcacatttttgtggacgagactgcagaccttgacatggcagtcccgattgttgtcaatgcaaagacacagcgtctcggcgtatgcaatgcatgtgaatcacttgtggttcatgaaaaaatcgcagaacaggccattccggttatttataaagcgctttgtgaaaaaggcgtagaagtccggggggatgagtgtgctcgcgagattgtaccggagattgtgacggcaacagaagaagactggggcacagagtacctggatgcgatcatttctgtgaagattgtttcttccatagaagaggcaattgcacatattaacaaatacaataccggacattccgagtccattattacaaaagattatacaaatgcactaaaattccaggacgagattgacgcggcagcagtttatgtcaacgcatcgaccagatttacggacggatttgaattcggattcggagcagagataggaatcagcacacagaaattgcatgcaagaggaccaatgggattagaagcacttaccacgacaaagtatgtgatttttggagatggacagattcgcccgtaagaaacagaaaaaactatgaatttgcttacgaaagtatttgagccgtcactccgttgcacaaagcattccgacaagcctgacagaacaaaaatcatgtcagcaaaggctaccatgatttttacagtcttgtctccataatgcaaagtcggacggtcataatactttcgatagcaaatatagagttctacgaattttgcaagtttcttagagggaattaagaggtagactttgggacgaaagtttatcatatgtcgcacttttacaggcagaaggataaagagtaaagattaaaatatgctgtgaaattgtgcaaaagtattcatgagattggataatatgcataatattaaaaagttatgcataaacacttgaatattatacatataagttgtataatcatgcacatggattgaagtgtatacaatgataattttagattttacaatataaggaaggtacaaaaatgataaaagtaggaatcatcggagccacaggctatgcaggtggagaactcgttcgtattttaatgggacataaggaggcagaaattgtgtggtatggctcaagaagctatattgatcagaagtatgcagatgtatatcgcaatatgtttcagattgtagatgcaaaatgcatggatgacaatatcgaagcattggcagatcaggtagatgtgatttttacagcgactcctcagggatttctggcttctgtcattaacgagaatattttaggcaagacaaaaattatagatttaagtgcagattttcgtatcaaagatgttaaggtatatgaaaaatggtatggtatcgagcacaagagtccgcaatttattgaagaagctgtttatggactttgcgaagtgaaccgtgataaagtaaaaggcgcaagactgatcgctaatccgggctgctatacaacttgctctattctgacagcatatccgctggcaaaagaagggatcattgatatgagaacactcattgtagatgcgaaatccggtacttccggagcaggaagaggagcaaaggttccgaatcttttctgtgaagtcaatgagaacatgaaagcttatggtgtagcatctcacagacatacaccggagattgaagaacagcttggatatgcgtcaggtgaaaatgtgaccatcagtttcacaccacatcttgttccgatgaatcgtggaatactggcaacagagtatgctacattgaaaaaagatgtaacaggtgaagaagtaaaagcaatttatgataaatattatgcagacgagaagtttgtgcgtgtgcttggtgaaggcgtatgtccggagacaaaatgggtagaaggcagcaattatgtagatatcggattcaaattggatccaagaacgaaccgtattgttatgatgggagctatcgataaccttgtaaaaggtgcggctggacaggcggttcagaatatgaaccttcttttcggacttccggaaagcgaaggactggaacttgttccgatgttcccatagaacaaatctgaggggagaaataaaatgatacgaacaatgacaattgaagattatgaacaggtgcataatctttggatgaaaatacatggttttggaattcgaagtgtggatgattcaaaagaaggtgtggagcgtttcttaaagagaaatccaacaacgagtgtggtggcagttgaagatgataagattgttggtgctattttatgtggacatgatggaagaagggggtgtctctatcatgtctgtgtggatgaagcataccgcatgcgcggaatcggaaaagcaatggttgtatttgcaatggaagcactaaaaacagaaggaatcaacaatgtttctttaattgcatttacaaagaatgatataggaaatgcattctggaaagagattggctggaagaagcgggaagatttgaattattacgactttatattaaatgaggcgaatatcactgcatttattcagtaactgagaatgaggcaagtgcgaagtgcagagcaatctgcaggcatcataagaatgcagaggcattcttgaatatgaagaaaatgctttgtaaaacaaatgaataaatagaaggaaacttcaggaggaatatatgaaacagataaaaggcggcgtaacagctgcgaagggatatgaggctgcaagtacagccgcagggattaaatatcagggacgtaccgacatggcattgatctatagccaggtgccttgtgtatctgcaggaacatttacaacaaatgttgtaaaggcagccccggttaaatgggatcgccagatagtagacagtggcgcaggcgtgcaggcagttgttgtaaactcaggaattgccaatgcatgtaccggtgaagaaggcatgggatattgcaaagagacagccgaggcagcagcgaaagtgcttaatattgatgcagcaggtgtcctggttggttccacaggagtcatcggaatgcagcttccgatgcagaagctggtggacggaatccaggtgctggcaggaaagaaagcagaaggtctacagagcggacacgatgcagctcttgcaatcatgactactgatacagtagaaaaagagatggcagttgagatagagattggcggcaagacagtcacaatcggagggatgtccaaaggttccggtatgatccacccgaatatgtgcacgatgcttgcatttatcacaacagatgctgcaattacaaaagaggcactgcagaaggcgctgagtgaagacgtagaagatacttataacatgatttctgtagatggagatacatctactaatgatacagcaattcttcttgcaaatggtctggcaggcaatcaggagatcacttacgcaagtccggagtatgagacatttaaagaggcacttcacatggtcaacgagacacttgccaagaaaatggcaggagatggagaaggagcgactgctttatttgaggtgaaagtcgtaggagcagagagtataaagcaggcaaagacacttgcaaaatcagttgtatgctccaatcttacaaaggctgcaattgccggacatgatgcaaactggggaagaattctctgtgcaatgggatattccggtgtacagtttgatccggaaaaggtggatctgttctttgaaagtaaagctggaaagcttcagattattgaaaatggtgtggcaacagattatagtgaagaagtagccacaaagattttatctgagcctgagatcacagcaacggcagatatcaaaatgggcgattacagtgcgaccgcatggggctgtgatctgacacatgaatatatcaatattaacgcagattatagaagttaaagtacagataattgttagaaactagtagttggacgacagaagggaagtttttggacatgaataaagatatgcagcaatatttggataaagcagaagtactgattgaggcgcttccatatatccagcgttttaaccgtaagattatcgtagtaaaatatggtggaagtgccatggttgacgaggaactcaaagcaagagtcattcaggacgtcacacttttgaaactggtaggcttcaaaccgatcattgttcatggcggcggcaaggaaattagccgctgggttggaaaagttggtatgaaaccggaatttaagaatggacttcgtgtgaccgatgaggcaactatggagctggctgagatggttctgggcaaggtaaataaaagtcttgttcagcttgtagagagcctgggagtccgcgcaatcggcatcagtggaaaagacggaagacttctctctgtaaagaaaaaatatgcaaatggtgaagatatcggatttgtcggtgatgtgacaaatgtaaatgcagatattctttacgatcttctggaaaaagatttccttccgatcatttgcccggtaggattggacgatgacaacaatacatacaatattaatgcagatgatgcagcatgtgcgattgcaaaagctatgaaagcagagaagcttgcatttctgacagatattgaaggagtctataaggatccacaggattcatccacactgatttctgaactgacagtatcagaggctcataagctggtgggagatggatatatcggtggcggaatgcttccgaagatcaacaactgtatcgaggctattgagagtggggtatccagggttcatattctggatggaagaattccacactgcctgctgcttgaaatctttacaaacaaaggaattggtacagctattttaaatgacagtgagagaaggtattatgatggagaataatcagacaaatacatatatggaagagacaaactcagaactggtccatacatataaccgttttccggttgtcttagatcatggtgagggtgtttatctttatgatacagaaggaaagaagtatctggattttgcggcaggaattgcggtatgtggacttggatacagtaatgaagagtataagactgcattaaaaaatcagatcgatcttctgacacatacttcgaatttatactataatacaacttgcggaaaagcagcaaaagcacttttgaaagcatgtgagatggataaagtattttttactaacagtggtacggaggcaattgaaggtgcattaaaagctgccagaaaatatgcttacaaaaaaggtaccggacgttatgagttcattgctatggaagattcttttcatggaagaagtatgggagcattgtctgttaccggaacagagcattacagaacgccatttgagccactgataccgggcgtgaaatttgcaaaatataatgaccttgacagtgtaaaagcactggtaagtgataagacatgcgcaattattctggaagctcttcagggggaaggcggaatcactccggctactgatgaatttatgaaaggactccgccagatttgtgatgaagaaggaattcttctgatttgtgacgagattcagtgtggtatgggacgtacaggttctatgtttgcatggcagggatatggtgtaaaaccggacatcatgacaatggcaaaagcaattggaaatggagttccggtaggagcatttgccatgacaaaagaagtggcagaatattctcttgagccgggagatcacggaacaacttatggtggaaatccgctggcgtgtgcagcagttgccaagacgctggagttatttgaaaaatacgatctcacagctcatgtgcgtgagattggcgcgtatctgacagaaaagctagatgaacttgttgcagcaaatgacgcagttctggagagacgaggaattggacttatccaggggattaaggttaagaagccggtaggagagattagctcggaggcactgaaagaaggacttcttattatcagtgcaaaggggaatgtacttcgcctggttccgccacttgtgattgaaaaagagcatgtagatgagatgctggagattttgaaaaaggttctgtaa

SEQ ID NO: 135 - DNA, 8195 bp, unidentified
  source 1..8195: mol_type = unassigned DNA
ttacttttcattcctgtcaatctttaaatctttgtaatattgcattggagtaacaccatattctttcttaaatgctctaaaaaaatgattataccctccaaatccaccaagctcatatacctcatgaatacttttcccctgctctatataatggcggcataaatcaagtttgctctttacaatgtatgaatgaggggtctcacctgtcaattttttaaactctcttactatatgataacggcttatataaaattcattttccaagcgctccaacgagatatcttctgtcaaatgttctctgatataaataaaaatatcatccattacaacgtgttttttcttcttcgtcttgatctgtacatcatcctgaacagatgagcgaagtgcaagtacaagaatcatagttaataggcttttctcgtataatgagtgggcaaatttaggcggctcattattcatcgaatagagcttttttgatatattctttataagcatagccaattcagtctcagaatgaacaatcttaacttgatacggaacaaaatcaaacgcttcatcaagtcttgtttcttcatctgacaatttccttaaaagttctccacctatataaagaacataaacttcaagaggatacttatttttacgatattcaagctttactttattacctggcttaataaatatcaaatcctccatagtacatacaatattatcgtcctcctggtgcatataccctatcccaccagctataaatacaattgtatagctctccttttgcccaaagcttcgctgggcactatccaatattttcaaatattccattttgtagccttgctttttcatatgtctattttgtacactttcctattatattttttgttcatttcgtcaaaatatacaatatatcaatttttcgtagtttgcaagcaatatttgtatatggatatcagcataaccccaatataataagattgtagctactaaaacaatataaatgtttggaggtaaattatcatgaaagaaacaagacctttttccatgaaggacaaaattggttacactcttggcgatttgggatgttgctgtactgagcagttccgtgccatgtatcttgctattttttatacactggtatttaaaagttaatccagtacacgtaggaatccttatgcttgttacaaagttttgggatgctataaatgaccctttaattggtgcacttgttgatagccacaaaaacaaaggaaaaggaaaatttattccttggattaaattctttgcttttccaactgcagtactctgtatattaggatttgttaacgtaagcaatttcgcttatggtgcacgtattgcttatatgttcattacatatattgtttacgaaattatgtacacatgtgtcaacgttccatttggtagtctttcaagtgtaatgactgatgatgttaaccaacgtactgacctttctcgtttcagaagtcttggcggtacaatttttatgacagttatcgttattgttggaccattattcttatataaagataaccagccagtacctagccatttccttattatgtcagcaatctgtgcagttattggattaatctgtcttatgtttacatctcattggtgtaaagagcgtattattacagagccagttgttgagaaaaaagaaaagtttaactacttccaggtaattaaagatattactaaaaacaaagcattactcggagttatgttatcaagctttatcggtattgttggagcaggtatggttaacggattaaatacttatttattccgcgattattttggaaatgttgccatcatggcattttcaggtatgttaagtgtactctggtcacttattgcattcgtaggtacaaaatttgttgctaataaatttggaaagaaagaatggattatgtacagtgcaactttctcagttgttgtttatgctattttattcttcttcccacttgaaaatcctatgctctttattatcatcaacggaatctgctatcttggagtaagtggtttccaagtattagtttgggcacttgtaaatgatgcaattgattatcaagaacttcagacaggaaaacgtaatgaaggaattgtatattcggcatatacattcttccgtaaacttgctaatgctgtatcaggaagtatgagtagttttgcacttgcaattgctggattccaggttaatgaagctgtccagaatgaagcattctcaggacatctttggaaaacatatacaggtttatatgttgtaggatatttattagctgttctggtattaaaatttatctaccctcttacaaaagagaaaacagctgaaatgttacaggatttagctgacaagcgaaatgctacaactgcagaataaaattagaaatggaggtattttaaattgacaaaacaagtagaaatcacaaaccgtgatggacacatcttacgcggaatagttaacattccagaagatggcacaagatttcctgctattgtaaatgtacatggctttacagggaataaaagcggttacaaaagtatttatacgcacacagccagattattagctgaacatggatttgccagtgtccgttttgatttatacggaaatggtgaaagtgatggtgaattcgaggacatgacctttacaggtatcctacacgatatcgaggatattataaactggactaaaacacaagattttgccaatccagataagattatcttatctggtcagagtatgggaggatacgcagctgctactgccgctcctattgttaatccttatgctctcatgcttatgtgtccaggtgctggaatgtggtttggatgtaaggatcgtgctgaagccatggaagctaaggggatcaccaaggccgatattgaaggactcactttcccaacatcttttaattatgatttatttaattatgagccattctcgtcagcagaaggatacaacggaccagtcctccttataagaggaactgcagatgatttggtagatgatgcaacatgccataaatatgagtcactttacaatggaaaatgcaattataaaacaattgaaggcgctaaccacaattttgccagtgcttttgcaagagcagaattagacaaattaatgttagagtttttaacaccacttaaatagtatattcaatttgaaaggaagtatgaacaatgaaattattagagcctataaaagttggaaatattgagtttaaaaaccgtattatgttcccaccacttacaacaggatatgaggaaaaagatggttcaattggagaacaaagttttcgtttttacgagcgtctcgcaaaaggcggtgtcggatatatagtaattggagatgttgcaccacttccaacattctctcctacaccaaagctttattcacctgagcaggttcaaagcttcaaaaaacttgctgacgcatgtcatgaaaatggtgcaaagcttggaattcagttattccatcctgactacaatgttaaagctttaaacgatatgtttcatcagggcaaaatgcaggaagcaagagctaaacttcaccatgatatgcagcactttgtaaatgaagtaactgcagaagaacttgatgaaataataaagcatatggaaaactgtgctatcttagcacacgaagctggtgttgattgtattgaagtacatggagaccgtcttgttggttctctctgctctcctattttaaatcatagaactgatgaatatggcggtgacctggctaatcgtacacgttttgcattaacactcgtaaaaagattaaaaacaattgtacctgacatggttatcgactacaagcttcctatagttactcctcttggagaaaatagttttagaggaaaaggtggtcttccacttgatgaagcttgcatttttgctaaagaattagaagcttgcggtgttgacacattacatgttgcacaggctaaccatactggaaatatgggtgatacaatccctgccatgggaacacagccatacggatttatggtttcttattctaaaaaaatcaaagagcttgtatctattcctgtatctgtagtaggccgtatcgttacaccagaagctgctgaagcagttattacaaatggttctgctgatattattggattaggtcgttctcttctcacagaccctgactttgcaaacaaatgcgcagatggacattgctgtaatgtcagaacatgtatgatgtgtaataaaggatgtacagataatattcagaatcgtgctttcttaagttgtgtacttaatgctgaaaatggttacgaaggatctcgtcagattactcctgcagcatcaacaaagaatatagcaattattggtgctggtattgctggacttgaagctgcacgtgtttccgcattaagaggacatcatgtaactatatttgagaaatcacttcagattggtggtcagttacttattgctagtgtacctccaagaaaagaagaaatgatgagaagcattaattattatacaaatgtacttcctgaattggatgttactttcaggcttggtcaggaattcacatcacaggattataattcattcgatgaagtaattgtggcaacaggagcaaacaatgcaataatccctgttcctggcaaagatcttccaactgtagcaagtgcatgggatgtacttgccaagaaagaaatcgtattcggtaatgtttctgtaatcggtggtggtcttgtaggtgttgaaaccgctgaatatctggcttcacgaggatgtaaggttacaattattgaaatgatggatcagattgcaaaagaagaaagtaacactattttacctactctaatgagggaattagagcattataatgttcaaatagtaacatctgcaaaattatcagaaatcaaagatgattctgtagttgttgaaaaaacaatagacgacaatacatcaacagaagaaattgcttcagactttgttgtaatggctgttggtgcaagaaagaaccttccagagctttctgattgtcctcttccacttcactatattggtgattgtgctggagaacgtccaagtaatattgatcatgctattaaatcagcatatgatgtagcatgtgaaatataaattattaattaccctattaccacaaaggggctgccgcactaagaatgatgtgtggcagctttttttagattgtgttgaaaaattttgattaatataaaaatattatataacaataatgaggcgtacaatagttgtgacagtaaataatatgaaatttgacttgctattttgtgttggtgtatgcggtaaaatagtgtataattattaacaagatatgaatgtgaaatgcatttatattattaggaggaaaatgatatgaagtggggaattctggctacaggtaatattgcaagaaaatttgcatcaactataaatcagatgagtaaggaaaatgaacagcttgcagcagtaggctcacggcacatggatagtgcaaaagcttttgccagggagcatgacattccacgatattatgattcttatgaagcattggtaaatgatcctgatgttgaggctgtttatgtagcaacaccgaatagtttgcattatgagaattgcagactttgtcttgagcatggtaagcatgtactttgtgaaaaaccatttacaataaatgagaaacaggcacaggaactgtacaggctggcaaaggataagcatctttttattatggagggattatggatatggtttctgccattgtataatcgtctgcgtaatatcctgcttaagggaacaataggagaaattaaacatatttcctgtcagtatggatttgttgcaacgggtgccagaaaagagcgtaaatttaactctgcacttggtggaggtgctctgttggatataggaatttacaatctgggatttttgcgtattgttacagggtgtgatccgcagaatgtagaaactacaaaagtacatattaatgagaatggaacagatgattacagttgtctcaaactgacatataatgatggatgtattgcagaatcagtccagacaatagggcaggagttaaaacgtaatgccagaattgagggaacaaagggaagtatatttttaccggatttccaacacgcaaagaccttgatacttgaggtggatggtaaagaacctgaaacaatcgagtacccagttgatataaatggatttgaatatgagattcgtgaagcaggcagatgcatagcatcaggaaacagcgccagtgctatttatacaccggaagatagtattgcacttacaaggctgatgtatgatatccgtatgagctggaatatgatatttgatggtgagatacaggcataaaccgacaaatagcttatttcagataaattgacaatgcaaaataataaagaagaatatgggggatatgtgtattctatgtgtcattgcgccaataatcaaaaagattacaggatatgacaaaaatattaataaatgagtaaatgatgtgagtatgttatactctagtttgtaaaaatagaaaaattggagttgtgtgcccagacaaagggcgagtagtctaacaggtggaatacctgtctggtaaggtttaaccaacagccagtagcataagcagatgccgttattcagacaagtgaagatgaaatgaaaatgttttgtgatagattaaacaaaaagtaaaaattatatcaaatgataagaatttacataacttaataacttatggtcttgattgcgtatgcttaaatactgcttgtaaaagatgaggttgtaggtggtgataaacttacctatgatgagtatcttgagattatgaagaattccggaaaagagagcaggcattattttgaaatggtatatagaaactgtggacttgaatttaaaggccgcatagagaagaaaaatcatcaaaatatatgttttgagagaatctatgtatccggaatgtacatggatggtgtttgctttgacgataaagaagaacatctcattgcagctaatggcgaccatatattgaatctttctgtggtttatcatctgttactggttcaataaggaaatctaaaaccttacgctgttcacatctatattgtaaaatccccaatatcagtaataatttttttaaacatttaaaatcataactcaaatattgtattataactttatttgagttataatacataaaataagttatgaatggaggcatatatatggaatatctccaaaaagttctaggattgaaactgacctatataaatgatgacattaaacatatacccaattttattggaacaagatatgttctgcgtaatgtactattggatagacaaaaagctgtttttatatatcctaaaacggaactagagcagattgaaacgttaaaaaaacatatttcaaagataaaaagcatagtgaatttacctgttgttatgattctggacgaaatcacatatcgtcagaaggaatatttgcttcgggagaagattccatttgttgtaaataataaacagatatatctgccttttatggcgttatatttacaggaacgttgcaatgcagaaacatttcctaatgaggaaatacttccttcagctcaggttctgttgttgtactttatatataatgggactgttgaaataacaacgagtcaggcatcaaaagaacttggactcacgcctacatctatttcaagggcttctcgtcagcttgaaaaattaggattaatacagaccatgaaaacaggtaagcagaaaattatacattctgatagctcacccaaagagttatttgagagaactcagcagaaattacttaatccagtaaaaaaaactgtatatatacctaaaaattgtgtaacttctgaattgttagaaagcggatatttcgcattagctcattatacaatgataaatgttccacaaatcaaatgttttgcaatagatagtatttcgcgttggaaggatgttatgacaaataatttacttgattcagaaaatcaaatggcagttgaaatgtggagatataatcctcatttattatcaaaagaagataaggtagatgaactttctctagcattgtcattgagagatgatgcagatgagcgggttgaagcagcagtagatgagatgttggaaaaattatggggaaaaatataa

SEQ ID NO: 136 - DNA, 17158 bp, unidentified
  source 1..17158: mol_type = unassigned DNA
atgatgactaataagaagcccgatgaacgcctggatgatctccaggtgaagggctatgagattatacagaagcccggtcggttctgctttggcatggacgccgtgcttctgtcttcctatgcaaaagtaaaacgtggggaacgtgcactggatcttgggaccggaaccggaattcttccgattttactggaagcaaagaatccgggacttcattatacaggtctggaagttcaggaagaaagtgctgatatggcaagaagaagcgtggcacacaacgggctggagaacaagatagatatcgttaccggtgatatcaaagaggcaagtcacatatttggaaatgattcgtatgaagtcattgtatccaatccaccgtatatgattggagaacacggcctgaaaaatgataacgaggctttgtatatcgcaagacatgaagcgttatgcacattagatgatcttctgcgagaaagtgcaaaagtactgaaaatgaaaggacgtttctacatggtgcaccgtcctttccgcctgccggaaatctttacaaaaatgtgcaattacggaatcgagccgaaacgtatgcgtctcgtccacccatatgcagacaaagagccaaacatggttcttatcgaaggcctcaaaggcggaaaaccacgcctcgccgtagacccgccgctcatagtctatacgaaagacggggagtatacggaagaagtactgaaattgtacgggatgaaataaaaggagaattatatgtcaggaacattatatctgtgtgcaactccgatcggcaacctggaggacatgacatttcgttgtgtccgtattttaaaagaagttgatctgatcgcagcagaggatacccgcaatagcattaagcttttgaatcattttgatattcacacaccgatgaccagttatcatgaatataacaagattgcaaaagcgcatacgttgatcgagcacttggaaaatggtgaagatattgcactgatcacggatgcgggaacaccgggaatctccgatccgggtgaggagctggtggcaatgtgtcaggaagcaggaatcactgtgacagcagttccgggggcagcagcttgcatcacagcgctgaccatttccggattgtccacaagaagattcgcgtttgaagcatttcttccgacagataaaaaagaacgacaggcagtgctgaacgaactgatggaagagacaagaactatgattatctacgaagcaccgcacagactggtccggacattagagcttctgcttgcgaccttgggtgacagaagaatccgcatttgccgggagcttacgaaaaagcatgagaccgtctttgcaacaacgatcagtgcggcagtggaatattataaagagcaggaaccaaaaggggaatgcgtgcttgtcattgagggtaagagccgtcaggaacagatagaagaagaacgccagaaatgggaagaaatgtccattcaggaacatatggattattatatggatcaggggattcagaaaaaagaagcaatgaaaatggtcgcgaaagaccggggagtcggaaagagagacatttaccaggcgttgttgtaaaaaagtaatgatggataaaaagcctgaattacagtagtcaggggaagacaaagaaaggggctgatcagatggcaagtctgacattaaaacatgtagatcgcgcatttccgaatggatatgaggcagtaaaggatttaaatttccagattgaagacggagaatttgtaatattgactggcccatccgggagtggaaaaagtgctgttatgcgcatgatcgcaggtcttgatgaagtgaaaaacggagagatatggattggagacaagctggtcaacagtcttccaccggaggagcgtggaattgctatgatttttcagaattatactgtgtatccacgaatgacagttctggaaaatgtagaactgggcttaagacttcgcggcatagatgaaaaagaaataggaaaacggacactggaagtgatggaacttctggatcttgtagaagtccgatttgcaaaagtaaaaaacttgtcagatctgtggaaacatcggaccgcgctggcgcgtgccatgattttggagccagatgtaatcctcatggatgagccgcttcgcaatgtaagtcccaaattccataatcagttgactcaggagctggtggaattgcaggagagaaccggagttacaatactgtatgctacaaaaaatgtggaagagatggcactattggggaaacgaaaagtgatggtgtaaaataaaagaaatatattattaaaaagggttggaatctaggtttcaacctttttctatgtaatgctttacttctagagaagagtatgctatgatatgtccaattcaggaggaagtctagtctccgaatattcaagccgtaaggtgttcatttcggcgtttcgaattctgaaacaattacccgatatgaaaaatgtaacttgtaaacgtaggaagttctattgaaaacaggtaccaaaaaaattataatgagaggagaattagatggacaaaagaaaaatcatagaatggcacccggcatttgaagcatctattcagattgaatttgaaaatgaaattgaaaaaatgacatttgaaccggaacatttattatcgaaacagccaatgcggattgatgaattggtgattaaaattcgtggtgaagaaaagattcaaaagaacataggacggatattccgaaagcacaatattattgaatataaaagcccggacgattatctgacaatcaatgatttctataaagtatatggttattgctgcttttatcagtcggatacagagcatgtgtgtgaaattaaaccggaagaattaacgattacttttatttgtaatcattatcctgtgaaaatgctccggcatttacaagagtttcgcaaactgcaaatagaatgtgttgaatctggaatctattatataacaggagatgcatttcccatacagttactcattacaaaagagctggataaagaggaaaaccgctggctctgtagtctgaggaatgacatcacagatagaatggaaattgaaaatctagtgagacaatatgaagaaaagaaaaactctaaattataccaggcggcaatggaagttatcacgcgagcaaactggaaggcaatgaaggaggtaaaatcgagtatgtgtgaagcattaaaagaattgatggcagaagaatttcaagaggtaagagatcaggtaacagaagaagtgacagaacaactcatttgtaatgcgtataaaaatatcggtgatttggaaaaggtttctgagatactaggagtacctgtggaaactgttaagaaagcagttgaaaaagaaaagtaagaaaaggtctgacttttaaaaagatttaagtaacaaaaggggaagatttcataagaaggatttgtggaatcttcctctttagggtatttggttaatatttttaaaataatattttgtgtttttagtagctaaaatgtaaggcgttttgacattttaaatttgagacagtaattaattaaaggtaaagctttcgttatgaagagttagatattccagtagatgaaaaaatcagggaggaattgaatgatatgtgtaatttatcagaaggtattgaagaaaagggaatgaaaaagggtgaataaatggttggacatatgtcatgtgatgtgctaatatatacatgtatacaatctggaaataaaggtaattattaagaagaatataattacaggtaatcaggaggactagacatgttgaaattatatgacggcggtgcgtatctggtaaatggcaccgagatcattacggacgaagcagaagtaaaggcaaagacaggccgtgaggtatccaaggaggaagccagaacgcagacaatggcttacggaattttagaggctcataatatatcagataatatggagagactgcagatcaaatttgataagctgacatctcatgacattacatttgtcggaattattcagacagcgagagcttcaggactggagaagtttccaattccatatgtattgacgaactgtcacaactcactctgcgcggtcggcggaacgattaatgaagatgatcacatgtttggactgacttgtgcgaagaaatatggcggtgtctatgtaccgccgcatcaggcagttattcaccagtttgcccgtgagatgctggcaggcggcggcaagatgatccttggatccgacagccatacccgctatggagcacttggaacgatggctatgggtgaaggcggaccggaacttgtaaagcagctcctgaataagacatatgatattaagatgccaggtgtgattggaatttatctggacggagagccggtcaaaggcgtcggaccacaggacgtggcacttgcaattatcggcgcaacatttgcaaatggttatgtaaacaataaagttatggaatttgtcggaccaggtgtggagaagttaagtgctgatttccgtatcggaatcgatgttatgacaacggagacaacatgtctgtcttctatctggaaaacagatgataagattaaggagttctatgagatccacggcagaagtgaagattacaaagaactgaatcctggtgcagttacatattatgatggtatggtctatgtgaacttaagcgagatacgtccgatgatcgcaatgccgttccatccgtcaaatgtatatacaatcgacgacgtacgtaagaatctgaaagacgtgcttcacgatgtagagcagaaagcactggtgagcctggatggtgctgtggattattcacttcaggataaagtgattgatggaaaactttatgtggatcagggaatcatcgcaggatgtgccggtggtggatttgaaaatatctgcgcagcagcagacatcataaaaggtcattacattggctcagatgaatttacatttagtgtatatccggcaagtacaccaatctatatggaacttgtgaaaaacggtgcagttgcggatcttatggaagcaggaacaattgtaaaaacagcattctgcggaccatgctttggagctggagatacaccggcaaataacgcattttctattcgccactctacaagaaacttcccgaaccgtgaaggttccaagcttcagagtggacagattgcatccgttgcacttatggatgcccgttcaattgcagcaacggcagcaaataaaggcttcctgacacctgcaacagatatggacgtagaatacaagggacagaaataccactttgaccagaagatttatgcaaatcgtgtatttgacagtcatggtgtggctgatccggatacaaagatcaagttcggaccgaatatcaaagactggccggcaatgtcagcacttccggagaatctggtattgaaagttgtatcagagattcatgatccggttacaacaacagatgagctgattccatctggagaaacatcttcttacagatccaatccacttggactggcagagtttgcactttccagaaaagatcctgcatatgtaggacgtgcaaaggaagtacagaaagcacagaaagcaatcgaagcaggcgaatgtccgttagaggtattggaagaattaaaaccggttatggcaaagatccaggagaaatatccggaagcgggaaaaggaaatatcggagtcggaagtacgatctttgcagtaaaaccaggtgacggttcagcaagagagcaggcagcttcctgtcagaaggtgctcggtggctgggcgaatattgcaaatgaatatgcgacaaaaagatatcgctccaatctgatcaactggggaatgcttccatttatcacaaaagaagacgacaagaaattaagcttcaaaaatggcgattatatctttgtaccggaaatcagaaaagcagtggaaaacaaagatgcagagatcaaagcttatgtagtcggagatacattgaaagaagtcacatttacacttggagatatgacagacgcagaaagagagattattctcaaaggttgtctgattaattattataagggctaaataatccgataggtaaaattcacgttctatgttccgttgcactgggaattacgctgaattttatcttgcgcagtattttcggcggtaatataattgaataaacgaatgtaaataaaaggcggcacttatgaaaaaaagtgacgcctttttgtaacacttgggatattttgggactcttatatgtagaagaagtaataatactttttacactgggtattgggaacggcagttggataagtcaatggaggagtgtggagaacttcttgaaaaaaacaaattgaggaggaaaaagaatgaaatgtgatgtaaaagcattttcaaagctatatgagcaggtctatcaagacctctatcgctacgcgctttgtctgatgcgtgatccgcatgaggcagaagacgcggtgagtgcggcagtgttatctgcttatgaacatatacataaacttcgaaaagaagaagctttcaagagctggatttttacaattttgtcaaatacatgtaagaaaagattgaaacaggtggcgaaagaaggaatacagcagacagaagattttttcccggaaggacaggtggaaggaattcatgaagaagatgtgggacttgcgatggatgtgagaaatgcattttttattctttcagaagaagagcaaatgatagtcgggctatcagtgtttggcggttataacagcacagaaatcgggaagatcctaagcctgaagccgggaactgtccgggtaaaacgaagccgggcgctggagaagatgcagtgtgtgttggatgggaggacattttatgaataagaatgagcaggacatgattcggaaaataaaggaaaagtcagaacaggttccggtgccgaaagcgcttgaaccgagacagattgaagcaaagcttgcaggaaagaagaaaaaagtgtggactccggcgagaatcggtgggctggcagcagcatgcctggtgctgatcgtgggagtgatggtatatcagaattattttaaaatggaagacgcgactcgagatgataagatagcatgcagtgatgtgacgatcagtgacagtacgaaagtagaaagtgcggcggagtataaggatgtctatgcatatttggaaaaatataagaaagatcaggaaagagacagtgcatacacttcaagcggggcaagatcattgaatgatataagagtcgatgaatcagctgacagtaaggcaagcggagatgcagcacagaatattgaagaaagcagtactgcagcagcggacaccggaatggcaagcggttcttattctgagacaaatgtacgtcaggaaggtgtggacgagggggatacagctaaaacagatggaacatacctttacgtgttaaaagataagagcgatcagattgccattatagatacccgcgataatcggatgaagcaaacggctactataacagtggaagatgtttctgaaatccaggaaatgtatctggacattgagagaaatcaattaatcgcagtgtgtgacggttatgtgggcggtaaatggaatgatgatgattatggatatggtcagagggctaatacgaccgcagtaacttatgacatttcagaccgggaaaatccaaaagaagttggcagggtcagtcagagtggatattacaattcttcaagaattgcagatggatacttatacttattcagtgattattatgtaacacttgatggtataacggcgaagaatccgaagtcctatataccacttgtaaacgataatctgatcaaagaaacagatatctgtcttccgtccatttcaaaggcagatatgtattcgatcatcacatcagtttctctggaaaatccaaatgagacagcgcacagtaaggcacttttggcagacggtggcaatttatatgtgagcaacgataatatttatttttatgaaaatgtgtggcaatattccggaaaagatgtgacgacaatccgaaaagtttcttatgaaagtgggaaattgacggctggggcacagtgcaaaatagacggctatattaatgattcattttctattgatgaatatgatggatatctgagagttgtagtgaccgatggcgacacgaacagtgtttatgttttgaatcaagaactgaaagaaactggctccatcaaaggtctggcagaagatgagagggtgtactccgcaagatttatgggaaaggcaggatactttgtaacatttaaagagacggatccgttattttccgttgatctgtcggatccgaaaaatccaaagatcataggagcgttgaagatacctggattttcagattatctgcatccgtatgggaaaaataagcttctgggtattgggatgaatgttgatgaaaagactatgtcaacagatggcgtgaaattgacgatgttcgatatttctgatccggaaaatgtgaaagaggagcagacctatgtcattgaaaatgtgtactatacagatgtttcttatgattataaggcagctttagtagatgcagagaaaaatctgattggttttgctgcagacagcgaaggcggccgggagtactatacattttcttacgacgaaaaacaaggatttacatgtacgatgcatgaggaaatcaatggaaataatatgaggatcacaagaggtatttatatagaagatacgctttatgttatccagggaaatattatagaagcgtatagcctgaaagatttcaaaaaagtggacgatatcattttgtaacatttttgtaacaaaatctcgtatgtttttgacaataagactggtgtatgataaacttgtatctgtagaattgtcaaaaaatttgaggtgagaatattggataaatatgaatatcgggtaaaaaccgagcagatgctcgaacattacgaaaagaaacaatttagaaaagcaatggaaattgccgatacaatagactggagaagggtgaagagcccagcaatgttaaatacagtaagcgaaatctacgagaataacggggagtttcagaagagccgtgatacgcttatgatcgcatttgacagagcaccgtccagcagaaaggttgtgtatcgtctggcagtacttgccctgaaactgaatgatctgaatgaggcttcggactgttatgaggaatttgtaaaactggcaccgagagatccgaatcaattcattttgaaatatcgaattttgaaggcacaagggtccgatctgtcagaacagatttcggcactggaagaatttaaaaaggcagaatatattgaaaaatgggcgtatgagctcgcaaagctatatcatgaagcaggcatgacctcaaagtgcctggaagaatgtgacgatttgatcttgtggttcagcgaaggaaaatatgtatatcaggcaatggaattgaagatgaagtacaaaccactgacaccactccaacaggaaaagtacgatgagtataaaggtgtaccgaaaaaagagcctaagaaagcagtggataaaaaacctgagcgagctgcgcttaaggatgtaaagagtattccacaggatactgtatcaattccaaaagaacagattaaagcagcgcaggaagcagcagaagctgcggaggcagaacagcaggaatcaggagccaatacaacagaaactgtggatggtctggatgcaacgagaagaattccgacagcagagcttggagaagcattgaaggcaatggaagaaaatgccaaggcagacaaagaagttccgatagaagaaccggttttagaagaaccagtttcagaagagccagtttcagaagagccggaagaagctgtttcagaagaaccagaagttgtagaaatggaagcaccagtcattgaaccaatcggaaaggaaactccggaagaagctcggaatgtcagagagttagaaggaattcttcagcatgcggcagaaggaccaaaaaagtctattacgacagttgtgaagggtgcgacacttcaagaagcactggctaatggtgtagctatggcgagtggaattaatccggaagaccagaagaagatggaggaacgagaagaagaactccgcattgaaggtcagatgaagattgaagacatcttgatggaatgggaagctaagcagaaggtaaatgctgaggcgattgcaaagcaaaaagcatccgatgaagaacgacttagaaaagagagagaagcactggaagcccgccgagaggcagaaagacttgaggcagagagacgcgaggtagaagaaatagcaagacggaaagcagaagaaaaagcccgtcaggaagcagaagagaaagcacgccgtgaagcggaagagaaagctcgccttgaagcagaggagaaggctcgtcgtgaagcggaggagaaggctcgtcgtgaagcggaagagaaggctcgtcttgaggcagaggaagcaagaagaaaggcattgctttctgatgatatcagacagcttgtggaagaactggaagatcgtgtgacagcacaggagaaagaagaggaaaattttgatatagaagaggaactggagcttgcaaaagcagaaggggaatctgttgaagaagaaattgtagatcagtttatttcggaagaagagctggacgatattgtggaagaacctgaagagtctgaagaagaacctgaagaagagattgttgaagcagtttcggaagaagaggagacggaggacgaggattctgaggatgaagatgatttcgaagaggaagagtttgaagacgaagactttgagggtgaggacgaagagtttgaagcagaagatgaagtcgacgctgtagaagaaatcgaagaagtacaagaagatgaagaaattccggaaacagaaaaccaggatgattcggaagacaattccgaagacgaggatgatttcgaagacgaggaatccgaagaagatgattttgaagaggaagatggattcgacgaagacgattttgacgaagatggttttgtagatgaattcccggaggaagatgaggaagaagtagaggaattcgatgcagagtggaatgaattcccggaagatgaatccgaggacgaagacgatttcgaggaagaggatgacttcgaggaagaggacgactccgaggaagaggacgacttcgaggaagaggatgacttcgaggaagaggatgacttcgaggaagaggacgatttcgaggaagaggacgacttcgaggaagaggacgactccgaggaagaggacgacttcgaggaagaggatgactttgaggaagaagacgactttgaggaagacgatgacttctatgaagatgattatgtagaagacgacgattacgaagaggatgactttgaggaagaggacgacttcgaggaagacgatttcgaggaagaggacgacttcgaggaagaggatgattttgaggaagatgatttcgaggaagacgactttgaagatgagcttcctgagattccggatccggaagaccttgaaggagacttggaaattgaagaaccatctgaggaagagattcagcgcagaattaagaagtcaaaaggaagcggagttccatttgataccggatttgttgtaacaggaagatatgacttaagtgcaaccagtgagattggactgaaagccggactgacagaggagcagaagaaattattctcttacttcgtaccggtcagaggaatgagtgaacagattgttgcagtacttgataatgacagacgtgcccagagagagggaacttcaagaaccggtaacttaatgatcattggccgtaaaggatctggaaaaacagtacttgcagtagatattgtaaaagcaatccagaaacaaagaaatctgaaacagggtaaggttgctattgttacaggtgaatcgctgaataagaaggaacttggcaatattatccagaagcttcgcggtggagcgatcatcatcgaaaaggctggtaagttgaattctagaacaatcaaggaactgaatgcattgatgtcaagaaagaccggagagcttctctttgttcttgaagatcagagaaaacctctggagagaattatgacagctaatccggatttcaaaaagaaattcacttctaagcttgaacttccggtattcatcaatgatgagttagtaacatttggtcagacttatgcgaaggaaaatggatataagcttgatgaaatgggaattctggcactttacagccgaattgatgtaatgcagcgtgaagatcatgcggttacagttgcggaagtaaaagaaatcatggatgaagcaattaaacattcacagaaagcaaatgtaaagcatcttgcaagacgtgtatttggaaaatctacggattcgtcagatcgcattattctgaaggaagaagattttaaaatttaatgatatagtgaatgtaagtgatgaagcagggatacaattgtagaaaattgtatccctgttttttgtctggaatcgagtgacatagattgaattttgtgttccgctaaggtatacttaagatattgaaatccggatgaaatgtgagggaagtttatggagaaagaatggaaagcttatgaaatcggagaattagatcagtaccttttcggacagggaaatcactacgaaatttataagaagctgggtgcacatatggtggacgacgaagggcagaaaggagtttattttgctgtctgggcaccgaatgcgaaatcagtgtctgtagtgggggaattcaatgactgggatcgcacaagaaaccctatgacaagggcggaatatatcggaatttacacatgctttgtaccgggagtaaaagaaggcatgatgtataagttctgcattgagacgattacaggggagtatcatatgaaggcagatccgtatgccaattatgcagaacttcgtccgggtacagcatcaagaataacgaatattgagaatttgaaatggaccgatagttcctggatgactgcacgggaaaaatggaaccacaaaaaagaaccaatgtctgtatatgaggttcatatgggttcctggaagagacacccaggcacagaggacgagggattctatacttatcgtgagtttgcaaaagaaatcacaaagtatatgaaagatatgggatatacgcatgtggagatcatgggaatcgcagaacacccatttgatggatcatggggatatcaggtgacaggatattatgcgccgacaagccgttatggaacaccggaagattttgcgtggatgatcaattatctgcatagaaatggaatcggtgttattatggactgggttccggcacattttccaaaggacgagcatggacttgccgagtttgacggaacagcaacttacgagtatgcagatccaagaaaaggggagcatccggactgggggacgaagatatttgatcttggcaagaatgaggtaaggaatttcctgattgccaatgcacttttctgggtggagcatttccatattgatggacttcgcgttgatgcagttgcttctatgctgtacctggattatggaaagaaagacggagaatgggttccgaaccagtatggaggtaatgagaacctggaggcagtagatttcttcaagcatctgaacacagttgtacttggaagaaatccgggtgcacttatgatagcggaagagtctacggcatggccgaaggtaaccggagatgtagaagacggaggtcttggatttagccttaagtggaatatggggtggatgcacgactttacggaatatatgaagctggatccgtatttcagaaaagacaatcatcatatgatgacatttgccatgagttatgcgtacagcgaagattacattctcgtactgtcgcatgatgaggttgtccatttgaaatgttccatgatcaataagatgccaggacttggatttgataaatatgcgaacctgaaagcaggatatgcatttatgatgggacacgccggaaagaaattgttgttcatgggacaggattttgcacagcttcgcgagtggtcagaggaacgtgaactggactggtatctgttggaggagccggagcatcaggcaattcagtcatggatgcgtgatctactccacatgtataaaaagaaacaggcactttatgaactggatcagtcatgggaaggattcgagtgggtcaatgcagatgatgcatacagaagcatttacagctttatccgccattctaaagatggaaagcataaccttctgttcgtgatcaacttcacaccgatggcaagagaagattaccgtgtaggcgttcctagaaagaagcagtataagctgattctgaacagtgacgatgtgaagtatggcggaaatggcgagaagagacagaacatttatcatgccgtgaagaaagaatgtgatggaagaccatattcatttggatacaaattgccgccgtatggggtagcagtttttgaattttaaaatatataataagagaggccagctcgaaaatataacgagaatcactcaatgattttatcaccgcctggtgctacttttattatgtgatttacgccgggaggtgtggaagagaaacagggagatggaatttgagtattccatctccctgctaaagttatgaattaattttattctgcgtttgtagaagtgtcgttatcagcattgttgtcggtgctgcctgtatcggtgttgttgtccgtattttcttcgactgcgtcagtgctatctgtattatcggagttttcggtatcatcgcctccgaacagatctttgaaaaatcctacgattttatcccaaagtccttcctcttttgcctgatttacggcatcgtttgctttggcttttacggcatctaatgtgctgtcgatgattgcatcatttccgagtgctgcatcatctgtattgttaataattccgccgttggagtcatctccgccaaagaagcctttgatggaggaccacaagttgctgaagaatcctccggatttcccgtccaggttgtcgagagtctttttcagtgctttgacatcgtagtcgtactgggaaatagattccatcagacttgtgattttcgcaagctggtcatcggtcagtgtaattccctgcttatcggctgcgtcagaaatcgcgtcctgaatatcggatggatcagtcagtttgtcttcaataacggattctttgacatcgttgatcagatcagatgctgtatcctgaccgagatccttggcgaggtcaccggttgttaccagctcttctgttgcagttgctttctggtcttcggaaagttcttttccactggctttttcgtaagccatcataatacctgtcagtgcaccggttccagatacttcaattggagatccggcaacaacgttacagttctcaacgccggaagtcaaaagtgtactggcaatcatagaacttgttacaaatgtcaggtttgcgacttttacctgaattccgccgctgtctgtcggctcaacataagaacagctatatgttcttgtaccaatctgggattcggtcgcgatcccttccatatattttctttcgtctgtgttcgtgacttcgatcgtgtctacctgatcggcggaagtaccgaagtatttgtacatagaagctttctgttcgtcggataagttcgctccgagagtgactacttttgcgctgtcagccagggcagttaccggcaggcttacagatgccagaatgattgccaggctaaacggcagaaccctttttaattttttcatactcataattatcctgtggtgtcagacgccacatctcctttctgtacacccaataatagcatacttgtgtaaaagtaaaaagtaaaaaattcttaactatttcgaaagattttgttacggcttgtgtacatctgtggactaagacaggatttccagcattctggattcaaatgtgtgttcatccaccattccacccatgacactgactgcctttttatctttgaagagaacaaatgtcgggacgatttccggagcgtattctgcggcgagtactgcagattcttcaatttcgacttcgcagaacttgatctttccggcgtatttcttttcgatatcctccacgaccggcttcatcatggcacatttcccacaccagatagcgtagaacataacgacgaccgggagagaggtatcttttacttctatttgaaaattttttgcagttaaatgtaacatcaaatcaacctttctgatcagtgccttcggcagtcagaaccgtggttcagaatatcatatacttctttcagggattttctgaaacaaccgatccacctgtgcagacaccgatttcgataagtgtattcaaaaaacttttgtcggaagttttttttgttatgacaatttcggctcatggcgaacagactccgaaggctttctcattaataatatatgcgctgtagcgctaagaaagtcacagcagacatcttcttttagcaatgagcttgcaaatcgggtgatccatggatgaaaatttctcttcatattctgtcataatatttccaacgttcataatttcatcatggtgcaggtcataagtacattcggaaatgccccatgtttcggattcccctaaagactcaacggaaaaatcaaaaagatcacggttatctgtcttgaattctacctgtccgtcctggacaagcaccttgtcgtaacgtgcaaaaaaatccggtgacgtgaggcgccttcttgcatggcgggctttcggccatgggtcggagaagttcagatagatccggtcaacttcattttcagcgaacacatttgctatgtcctgtgcatccatacaaatgaagcgaatgtttggcagagtgctttcgttttcttctatatatatgtttaacttttccacagcacggagaaggacgcttgtgtagcgctcgattccgatgtagttgatctgtggatttttctgagccagtgccatgagaaaacggccttttcccatgccgatttcaatgtggaccgggtagtcattctggaatacatcagatgcccagtgatcacggaattcttccggagtctcgataacctgactgcactcttttaacacgccttcggcgcggggtatatttctaagtcgcat

SEQ ID NO: 137 - DNA, 11230 bp, unidentified
  source 1..11230: mol_type = unassigned DNA
ttggaaaccgaaacagtcacaggatacgttgatcatataatatacagaaatgcagaaaacgggtatacggtacttgttcttgtagtgaacgaggaggagctcacatgtgtgggcactttttcggacattgctgagggtgaaaatatagaggcgcatggtgagtatacagagcatgccacctatggcagacagtttaaggtagtaggctttgaagagaaggagccggaggatgagatggctattgagaggtatctgggctcaggagccatacatggtataggacttgcactcgcagcacgtattgtcaggcgattcaagaaggataccttccgcatcatagaggaagagccggagaggcttgctgaggtaaagggcatcagccagagaaaggctatggagattgcggaccaggtcaatgcaaaaagagacttaagggaagccatgatttttttgcagcagtacggcatcaatatgaatctggctgtgaagatatataataagtatggcggagagatatacagcgtgctcaaggaaaatccgtaccgcatggcggatgatatcgacggagttggttttaaaactgcagatgagatagcggcgcgggttggcatcaagactgattctgattttagaataaaaagcggtatacagtatgttttgcagcaggctgccatggacggacacacatatctgccgatggaggagcttacgaggcgtgctgtatatctgctcggagtggaaagctcgcaggttgaggcacattacatgaatctggccatggacaggaagattgtcatgcagctaaaggatgatataacccagatttatgctaataccttttattatatggaggcaaacacggcagccatgctaaagcagcttgatgtgacgtatgatgtgccggatatcgagatagaggctgcaatcagaaatatagagaaaaagacagagatggagctcgatgagcaccaggtagaggcggtgaaggaagcagtcagaaatggccttttagtcattaccggaggacccggaacaggaaaaaccaccaccatcaacactattatcaagtattttgagctggagggcatggatatttttctggctgcaccgacaggccgtgcggcaaaacgcatgagtgagacaacaggctacgaggcgcgcacaatccaccgtatgcttgagttaaacggcggcatggacacaggaagcgcagctggctttgagagaaatgaaaggaatccgctcgagacggatgtaatcatcatagatgagatgtcgatggttgatatatcactcatgtactcattgctaaaggcggttgtggcaggtacgagactcatacttgtaggagatgtgaaccagcttccgagcgtgggaccgggcagcgtgctaaaggatattattgattcaggtgccttccacacggtaaagcttacaaagatttttcgtcaggcgagcacgagcgatattatagtaaacgcccacaagataaataatggagaagaggtatcgttagataataagagcatggatttcttttttctaaagagatatgatgccgacaagataataaatgttacattacagctgataaagcagaagcttcctaagttcgtaaatgctacagagtatgatatacaggtgcttacgcctatgagaaaggggcttctcggagtggaacgtctaaacggtatattgcaggcgtatatgaatccggcagacaagagcaagcgcgaaaaagaatacaggggcacgattttccgcgagggcgacaaggtgatgcaaataaagaacaactatcagatagagtgggaaatcaggacaaaattcggactttgtgtggataagggcatgggaatcttcaatggagatacaggtatcattgaggaaatcaacgattttgccgagaccatgaccatatcctttgacgagggcagaaaggtggagtatccgtttaagcttttggaggagcttgaacttgcatacgcggtcactatacacaagtcacagggaagtgagtatccggcggtcgttatacctcttttgagcggcccgagaatgcttatgaacagaaatttgctctatacggcggttacaagagcaaagaaatgtgttaccatagtgggtgacgaacagacattttacgagatgatacaaaacaactcacagcagagacgctatagcgggcttagagacagaatagtggaggagactatctgatgaaaataagaaaacttacaaatgaagagataaaaggggcatgtgcctttgcggtaagtatatacaatatcgcaatcagaggctgctttcggacacaggactgtcatcgatattttgatgaatatatggatgcagacaggctgacggacgaggaaaggaccggtgttcttgtagtgtttggtgcgtttgatagcaatgtgctgtgcggagtatgcggcatgacaaacgaggggcatatcaccatgctgtatgtacatccgcagtatttaagacgtggaattggcaaaaagcttctggagagagtcaggatatatgcgcgcatgcagcttaagctcatgcaggtgtctgtaaatgcaatgccggcatacacggcagactacttcaggcgtgtgggctttaagagtgcatatcagggaggcttttgcaatggacaaggcgatatgtacgttcctatgacagcaaaaagcatatatcaggtggagtatacaccgcgacatatagctgataagacttttattgcaatttcagttggcttcacatgtcttgtatttttctcaggcgtgatatatgcggtatgcgcgggacttactccgtaacgctaagatgcagttttaatgggctgcaatagttgccggtcatactttggtgtgaacagtaactaacattgtatacataaatatgcatatttatgtaacaaaaaacagttgaaaaatcggctgtattatgatacactttttacaatttaagcagatatactatgcaactacactttataagaaaaagagacgccctctttttttttgcgcagacgtaaggttagttgcagctaagaagcttatggttacaaagtataacacgaaagggcagggtaaagatgaaagcatttttaattcttgaagatggtaatgtatttaccggaaccagcattggttcaacaagggaagtcattagtgagatagtatttaacacatcaatgacaggatatctggaggtacttacagatccttcctatgcaggacaggctgttgtaatgacttatccacttatcggaaattatggaatcacaccggatatggagtcagaaagaccatggccggatggatatatagtaagagagctgtcgcgtatgccaagtaatttccgctgcgagggtactatacaggatttccttaagaaaaacgatattccgggagtggccggcattgatacacgtgcgcttacaaagattctcagggaaaagggtactatgaacggaatgattaccacaaatgagaattacaatctcgatgagattattccaaagctcaaggcatatattacaggcaatgtggttgacaaggtcacatgcactgagaaaaaggttttaaagggacaaggaaagagggttgccctcatggatttcggtgccaaaaacaacatcgccaaatcactcaatgaaagaggctgtgaagttacaatttaccctgcacacacaaccgctgaagagatacttggtgacaatcctgacggaatcatgctctcaaacggacctggagatccaaaggagtgtgtagatattataaaggaaataaagaagctttatgacagcaatgtgccgatttttgcaatctgcctcggacatcagctcatggcacttgcaacaggcgcagatacacacaagatgaagtacggacacagaggtggaaaccatccggttaaggatcttgcaacaggccgtgtttatatttcttcccagaaccatggatatgtggtggacacagataaacttgaccctaatgtagctgagcctgcatttataaatgtcaacgatggcactaatgagggacttaagtatgtgaacaagaatatcttcacagttcagttccatccggaggcatgccctggaccacaggattcagcatatctttttgaccgctttattaacatgatgggaggtaaccagtaatgccaagaaataatgatattaaaaaagtattagttatcggttccggtccaatcgtaatcggacaggccgcagagtttgactatgcaggaacacaggcctgccgttccttaaaagaggagggcattgaggtatgtctggtaaactcaaacccggcaactatcatgactgataagcagattgcggatcaggtatatatcgagccacttactcttgagtcattaaaagagattatcataaaagaaaagcctgacagcatccttcctacactcggtggacaggcaggactcaatctcggcatggagctcgctgagtgcggcttccttgatgagcagggagtaaagcttatcggaacaacagcagagaccatcttcaaggctgaggaccgtcaggccttcaaggataccatggagaaaatcggtgaaccaatcgcggcttcacaggttgtaaagaatatcgaggacggtattgcatttaccaacaagattggttaccctgtagttcttcgtcctgcatttacactcggcggctccggcggtggaattgctcacgatgagcaggagcttatcgacatactttcaaatggacttcgcctgtcacgtgtcggagaagttctcgtagagagatgtatcgcaggctggaaggaaatcgagtacgaggtaatgcgtgatgccaacggcaactgcatcacagtatgtaacatggaaaatatcgacccggtcggtgtgcatacaggagattcaatcgtagtagcaccttcgcagacacttggagataaagagtatcagatgcttcgtacatcagcgctcaatatcatcaacgagcttcagattacaggaggctgtaacgtacagtatgccctcaatcctgactcattcgagtactgtgttatcgaggtaaacccacgagtttcacgttcatcagcactcgcatcaaaggctacaggatatcctatcgccaaggttacagccaagattgcactcggctatcacctcgatgagatcaagaacgctatcacacagaagacatacgcaagctttgagccaatgcttgattactgtgtagtcaagattccaagacttccgttcgataagttcctcacagcaaagcgtacacttaccactcagatgaaggctaccggagaggtaatgagtatctgcaacaacttcgagggtgctcttatgaaggctatcagatctctcgagcagcatgttgattcacttatgtcttatgactttacaggtcttacagatgatgagcttgagaaacagcttgcagttgttgatgacagacgtatctgggttatcgcagaggcgctccgccgtggagttaaatacgagcatattcacgagattactaagatagatctttggtttatcgataaaatcgcaatacttgttgagatggagaaccgtttaaagacagaggagcttacagttgacctgttaaaagaggcaaagcgtatcgagttccctgacaatgttatctcacagcttacagatattgatgaggctgatatcaagaagatgcgttacgacaacggcattgtggcagcctacaagatggttgatacctgtgcagcagagtttgaagcagagacaccatactactactcagtattcggcagcgagaatgaggcggcagagacaaatccacagaaaaaggtgcttgtacttggttcaggacctatccgtatcggacagggtgttgagtttgattactgttcagtccactgtacatggtcgtttgccaaggaaggctgggagacaatcatcgtaaacaacaaccctgagaccgtttcaactgactttgatattgctgacaagctctattttgagccactcacagctgaggatgttgagagcatagttaatattgaaaagcctgacggagctgttgtacagttcggtggacagaccgccatcaagcttacagaggcacttatgaagatgggtgtcaagatacttggaacaaaggctgaggatgtagacgcagccgaggacagagagctcttcgacgagattcttcagaagacaggtatcccaagagcagcaggtggtacagtatttacagctgaggaggcaaagaaggtagcaaatgagatcggttaccctgtacttgtccgtccttcatacgtgcttggcggacagggtatgaagattgcatggaatgatgatgaaatcgaagagtttatcggcatcatcaacacaatcacacaggatcatccaatccttgtagataagtaccttatgggtaaggaaattgaggttgatgcaatctgtgacggtacagatatcctgattccgggtatcatggagcacatcgagcgtacaggagtacactcaggagactctatctcagtttatcctgcacatactatctcagaaaaagcaaaagagactctggttgagtatacaaagagacttgcacaggcactccatgttgttggtatgattaatatccagtttatcgatatggacgacaacatctatgttatcgaggtaaacccacgttcttcaagaacagtaccatacatcagcaaggttacaggtattccaatcgtagacctcgcagcaagaatcatcatgggtgagacaataaagggcatgggctacacacctggacttgctccgacagccgattacattgcaatcaagatgccggtattctcattcgagaagctgcgtggcgctgagatttcactcggacctgagatgaaatcaacaggagagtgtcttggaatcgacaagaccttcaatggtgcgctttacaaggcatttgagggtgcgggagtcgagcttcctaagtacaagcagatgattatgactgtaaaggatgccgataagcctgaggcagtaggcgttgcaaagcgttttgagaagcttggatacaagatttatgctacaagaagtactgcaaagtacttacaggagcacggagtaaatgctcttcgcgtaaacaagatatcacaggagtctccaaacgtcatggatcttatcctcggacacaagatagaccttgtaatcgatacacctacacagggtaacggagacaagacaagagacggcttccttatcagaagaaatgcaatcgagacaggtgtttactgtatcacagccatggatacagcgaatgcacttgcacatgcattagagactgcttctgacaagaagacaccggttgacattgcaacagttaagaatctttaaaaatatatagaatatattttatccccggacagtatatcggatatgctgcccggggattgtttataaaatgaaaaatatgcaaagtttaatagaattttgacaaattattaacaaaaccaattgatttttacataaatttgtagtataataactttgttaaaaaattaacagcacggatgtgcaatacaatttaaaggagataatataatggcaaagaaagttgtaatcgcaagtgcttgccgtacagcaatcggcaaaatgggcggagcattaagcaatactccagccgcagatttaggtgcaatcgtaattaaggaggctttaaaccgtgcaggtgttgctcctgagatggttgacgaggttaagatgggttgtgttatccaggcagctcagggacagaacgtagctcgtcaggcttctatcaaggcaggacttccaatcgaggttccggctatcacaatcaatgttgtttgtggatcaggtcttaagtgcgtaaacgacgctgctacaatgatcaaggccggtgaggctgatatcgttgttgccggtggtatggagaacatgtcaatggctccttacgctatgacaaaggcacgtttcggatacagaatgaacaatgcaacaatcatcgatacaatggttaacgatgctcttacagatgcattcaaccactatcatatgatgatcacagctgagaatgtatgtgataaatacggcatcactcgtgaagagcttgatgagttctcagcaaactcacagcagaagtgtgaggcagctatcgcagcaggcaagttcgatgatgagatcgttcctgtacctgttaaggttaagaaagaaatcgttgagttcaaaaaggacgagggacctcgtgccggaacaacagtagagactctttctaagcttcgttgctgctcaggtaaagagggcggacttgttacagccggtaacgcatcaggaatcaatgatggtgctgcagcagtagttgtaatgagcgaagagaaagctaaggagctcggtgttaagccattagctacatgggtagcaggagcacttggcggagttgagcctgagatcatgggtgttggaccggtagcttctacaaagaaggttcttgcaaagacaggtcttacaattgatgatttcgatcttatcgaggcaaacgaggcatttgctgcacagtcaatcgctgtagcaagagatcttggtttcgatatgagcaaggtaaatgtaaacggtggtgctatcgcactcggacatcctgtaggagcttcaggctgtcgtatccttgttacattattacatgagatgcagaagagaggatctaacagaggtcttgcaacactttgtatcggtggtggaatgggatgttctactatcgttgagaagtactaattttctttgccaatagatatatgaggggatgcaggtgcatccccttgtagtgtgaattagtttattcacatcagtttatatatatgattaagttgtgctgcagaggcttagcacttaaagctttttgcaccataatatattttaggaggaattaaaatgaaggttggagttatcggtgctggtacaatgggccagggaatcgcaaaagcattcgcacaggtagatggatacgaggtagcactctgcgatattaagcaggagtgggctgaaggcggaaaagacaagattgcaaaaggatatgcaagacttgtagcaaaagaaaaaatgacacaggagaaggttgacggcattcttgcaagcatcactcctggtttaaaagaagatctctgcaaggattgtgacctcatcgttgaggctgctttcgaggatatgcaggttaagaaaactacattcgctgagttagacaagattgctaagccagagtgtattttcgcttcaaatacatcatcactttcaatcacagagattggaaacggacttacacgtccattaatcggtatgcacttcttcaaccctgctgaccgtatgaagttagtagaggttatcgcaggtgttaacacacctgttgagacagttgatgcaatcaagaagattgcagaggagatcggcaagacacctgtacaggttaacgaggctgctggtttcgtagtaaaccgtatccttatcccaatgatcaacgaggctgctttcatcaagatggagggcgtttcagatatcgccggaatcgatgcagctatgaagcttggtgctaaccatccaatgggaccattagagcttggagatttcatcggacttgatatctgccttgcaatcatggacgttctttacaatgagacaggtgacagcaagtatcgtgcatgcccactcattcgcaagatggtaagaggcggaaaccttggatgcaagagcggcaagggattctacgtttacaacgcagaccgcacaaagacacctgtagacgcacagtaggagcaataaagcctggtctcaaagcgtataaatgatgcaagcttgcttgcaaaaatttgtacgctttagagacgctaatggacatgagcaagaagcacggtagtgcggattgcgaatgtacataggattgcgggagcgaaagcgtagcaatccgtaggctttatataacatatatacgttataaaatataggtcttatgtagcttatatataaactataaagttatataagaattcaataacaaaacaaaaatcaaggagaataaatcatggatttcactttagatcagaaacatgagatggctcgcgaccttttcaaacagttcgcagagacagaagttaaacctcttgcacaggagactgacgagacagaggtattcccagcagagacagttgctaagatgggaaaatatggattcatgggcattcctgtaccaaaggagtacggcggacagggctgtgatccacttacatacgttatgtgtgtagaagaattatcaaaggtttgtggtacaacaggcgttattgtatctgctcatacatcactttgtatcgatcctattatgacattcggtacagaggagcagaagaaaaaatatgttcctgaccttgcttcaggcaagaagatcggtgctttcggtcttactgagccgggcgctggtacagatgcacagggatgtcagacaaaggccgttttagacggagacgagtgggttcttaacggatctaagtgcttcatcacaaacggtaaggttgctgatgtttacatcatcatcgctattacaagcatcacagaggacaagcgtggacgcaagaagaagaacttctctgcattcatcgtagacaagggaacacctggattctcattcggaacaaaagagaagaagatgggtatccgcggatcatctacatacgagcttatcttcgaggatgcacgtattccaaaggatgcattacttggaaaagagggaagaggtttcccaatcgctatgcatacacttgatggtggacgtatcggaatcgctgctcaggcacttggtattgcagagggcgcattagagagaactatcgagtacacaaaggaaagaaagcagttcggccgttcaatcgcacagcagcagaatacacagttcaagcttgcagatatggctacacgtatcgatgcagctaagtatcttgtatacgcagcagctatgaagaaggcagagtttgctaagaaccctaaggtttcttactcagtagatgcagcaaaggctaaattattcgcagcagagacagctatggctgttacaacagagtgcgttcagttattcggtggatacggatatatccgtgagtacgatgtagagcgtatgatgcgtgatgctaagattacagagatctacgagggaacttcagaggttcagcgtatggttatttcaggctcattactcagatag

SEQ ID NO: 138 - DNA, 10990 bp, unidentified
  source 1..10990: mol_type = unassigned DNA
ttggagaatcagtatgcgatcgaaatgctgaacatcaccaaaaaattccccggtattatcgccaatgacaacatcaccttacagctcaaaaagggcgagatccacgccctgctcggtgaaaacggcgcgggaaaatcgaccttaatgtcggttctcttcggcctttatcagtcggaggagggcatcatcaaaaaggacggcaaggtcgtgtccatcaaggacccgaacgacgccaccgcgctcggcatcggcatggtgcaccagcatttcaagctggtggacgtgttcaccgtgctcgacaacatcatcctcggcgcggagacgacgaagtgcggctttttgcagaagaaggaggcgcgcaaaaaggtcgaagagatctcgaagcgctacggcctgaacgtcgaccttgacgccaaggtcgaggatatcacggtcggcatgcagcagcgcgtcgaaattctgaagatgctgtatcgcgacaacgagatcctcatcttcgacgagccgaccgcggtgctcactccgcaggagatcgaagagctgatggccacgatgaaggagtttgcccgcgaaggcaaatccatcctcttcatctcccacaagctcaacgagatcatggaggtctccgaccgcgtgagcgtcctgcgcaagggtaagtacatcggcacggtcaacacgagcgagaccaccaagcaggagctttccaacatgatggtcggccgccccgtgcagctcgaggtcacgaaggacgaggccaagcctgcgggcgaggttttgaaggtcgaccacctctgcgtccattcccacgtgcagaagcgcaacgccgtgaacgacgtttcgttcaccgtccgcgcgggcgagatcgtctgcatcgccggtatcgacggcaatggtcagacggagcttgtctatggcctgacaggccttgacaagccgtcctccggcacgatcaccctctgcggcaaggatatctctcatgcctccatccgccaccgcggcgagcacatgagccacattcccgaagaccgccacaagcacggcctcgtgctcgacttcacactcgagcagaatatggtgctccagcgcttcaacgagccgcgctttgaaaaccacggctttatcaacaacaaggctgtgcgcgactatgccaactacctgatcgacaagttcgacgtgcgcagcggccagggcgcgattacgcgcgcgcgttccatgtccggcggcaaccagcagaaggccatcatcgctcgcgaggtcgaccgcgacaaggacctcatcgtcgccgtgcagcccacgcgcggccttgacgtcggcgccatcgaattcatccacagccagctcgtcgccgagcgcgaccgcggcaaggcgattttgctcgtctcgctcgagctggacgaggtcatgagcctctctgaccgcatcctcgtcatgtacgagggtgagatcgtcggcgagctcgacccgaagaaaaccaccgtcgaagagctcggcctttacatggccggcgccaagcgcatggcgaaggaggaggcggccgtatgaaaaaagaacacttcctgcaaagcgaaggctttaagaccgtcgcagcgtccgtcctctcgatcctgatcggcctcgccgtcggcagcatcgtcattttgatcgtcggtctcacgagcccgaacctctcgctctcctcggcgtgggacggcatccgcatcgtgttcggcggcctgttctccacgggacgcgacgcctccggcacgctgacgtggggtttcaacccgacgaatatcggcaacatgctcttccgtgccgcgccgctcatcatgacgggcctttccgtcggcatggcgtataaaacaggccttttcaacatcggcgcgccgggccagtatctcatcggtacgctcgtgtcgctctccatcgccctcggtcttccgtccgagacgatgtccaccacgctcatctggctgctcgccttcctcggcggcacgctcgcgggcgcgatctggggcgcgatccccggccttttcaaggccctgctcaacatcaacgaggtgctcgcctgcatcatgacgaactggatcgcggcgaacctcgtcacgtggctctttgatatcagcaactttaagaacgtcaccgagtccaccaagaccggctacatctacaagacgacctacaatggcgtcgccaccgcaaagatgggccttgacaagctcttcccgaactcccaggtcaacggcggcatcctcatcgccatcgtctttgcaatcgccgtttacgtgatgatgtccaagacgacgttcggctatcagctcaaagcctgcggctccaaccgtcatgccgcgcgctacgccggtatcgccgacaagcgtaacatcgtcatctccatggcgatcgcgggcggactgagcgcggcgggcgcttcgctctactatctctccggcaacacagagttcttctggtccacgtaccagtcgctccctgccatcggcttcaacggcatccctgttgcgatgctcgcctcctgtaaccccatcggcatcatcttcacggcgctgttcatgtcgatgctcgatatctcgggcctgcagctgacgaacctgacggcctataacgagtacatcacgaacgtcatcatcgccgtcatcgtgtatctgagcgctttctcgctggtcatcaagatgtggatcggcaagctcggcaaaaagaaggacgacggcgcggatgccaacgcggagcccgccccggcggcagcttccgcaccagccggtgcacaagcggaaacggagaaaggaggcgacgcgaaatgacattcctcattcagcagacgctcatttatgccgtccctctgatgatcgtggcgcttgcgggcgtgttcgccgagcgcagcggtatcatcaacctggcgctcgaaggtatcatggtcttcggcgcgttcatcggcgtctggttcgtgcgcattctgcagacgagcgacgccatcctctccctcaagcagagcggcaactgggtcgcgctgcagggcgtggagcttctcacgatgctggtcgcggcggccttcggcgcgctgttctcgctgcttctgagctttgcctctatcaacctgcgtgccgaccagaccatcggtggcacggcgctgaacctgatggcccccgcactggtgctgttcttcatccgcatcatcgccaaccagaatacgctgcagatgctcacgggcgacgcggcgagctggttcatgatcaaaaagtctacgctcggcatcgacaagaacaccgacctcggctttttcggcgagacgttcgtcaacaaggtctaccttgcgacctacgtctgcatcctgcttttcatcatcctgtcgatcctgctctataagacgcgcttcggcctgcgcctgcgcgcctgcggcgaaaatccccaggcggcggattcgctgggcatcaacgtctacaagatgcgctacgcgggcacgaccatttccggcgcgctcgcgggcatgggcggcttcgtctatgcgctgacaacggcaaactgcgcctcgaacggcgacgttgcgggcttcggcttcctcgcactggccgttatgatcttcggcaactggaagcccgtgaatatcgcggtctcctcgctgctgttcggcctcttcaagtgcatcgcggcaagctatgcgagcatcgacatcaacggcgacggcgtcttcatgttggcggagatcggcatcagcgcccatctctaccgcatgctgccgtatatcgtcacgctgctcgtgctggcgttcacgtccaagagctcccgcgcccccaaggccgagggcatcccctacgacaagggccagcggtaacgtacatcaaaaagcggtatggcaatgccataccgcttttttgcaaatgaaatctatggagagaactatggagatcagagaaattacgactcccgatgaaaagcggcgcattacgcgcttgattttagaatcgctgcccgactggtttggcattccagaggcgcgcgaggaatacatcgaaaagagtgttaagcagccgtttttcgccgcgttcgacggcgagaacgccgtcggcttcctttaccttgccgaaacggggagggatacagcggaactctatgtcatgggcgtgctgaaagaataccaccgccgcggcgtcggcaagatgctctttgccgcagcgaagcagcgggcgaaggagcttggctactcgtttttgcaggtcaagaccgtgcagatggggaagtaccctgagtacgacgcgacgaaccgcttctatctcgccctcggttttggcgagtttgaggtattcccgacgctctgggacgagtggaacccgtgtcaaatctacgtgatgagcctgaaataagaaaatgttggaactttttcccgctgttttgcgtctataaaagcagaaaaacaggggagggaagcatatgaccgtccgcgaaccgaaaaaacgctctaatttgcggctgaagctcggcggcgcgtattttagcgcgcagcgaaaactcagatggctttcgatgcggaagcattttgcgcgcgagcgcagcggggaagacttagcgtatcaggcgttttcccaccatacgccgctcatgcgaaagctcaaggacgtcgacatgcagctccagcgcaacaaggtgacgaatctccgcctcgcctgtgcgcggctcgacgggcttttgctgcgccccggtgaaacgatgagctactggtatctcatcggaaagccgacggcggggaaggggtatctgcccggcatgatcctgcgcaacggcgggtatctggccgcgacgggcggcgggctctgccagctctcaaacctcatctactggatgacgctgcacacgccgctcacggtcgtcgagcgccaccgccacggctacgacgtctttcccgacgcgaaccgcacgcagcccttcggcagcggtgcgacctgcttttacccctatcttgacctgatgatccgcaacgacacacaggacacctatcagatgcgcgtccgcgtcggcaaaacagaccttgagggcgagtggcgcgtgagcgccgagccgaccgagcgctatgcggtcgtcgagcgcagccacgagatgcgcgcgcagtactggggcggctacatccgccacaacgagctctaccggcagacgtttgatttgcagggcaagctgctcgcggagacgcctgtcgccgtgaacgacgcggtgatgatgtattcgccgtatctcgaagaaagcaaaaaggaaggctgacaaagtcaaccttccttttatcttattcagccgtttcgtccgcctcttcgggcgtatcctcttcctcgggctcttcccacggctgcatcgtggcgacgcagcggttgatgttcttgccctcggcatagaatttggcctcgtagtcggtcatcacgccgcgctgtccgttcgcgtgcagatcgcgtgtgacctcagagagttcgaagccaaactgcgggatctcctcgatcgaccactcaaacagcgggtcgttgtcggtcttgaaatgaatttggccgttgtccttgagcaccttgcggtagagcttcaagaaattgccgtgcgtcagccggcgcttggcctgccgcttgggcggccacgggtcgcagaagttgacatagatgcggtcgacctcgcctgcatcgaaaatttcgggcagctggttggcgtcgatgtcgatgaagaagacgttgtgcagctctgccttcgccgcgcgctccatcgcgacgaccatcgcgtcgggcaccttttcgaccgcgatgagcagcacgtcgggctccgccgcggccgtctcgacggtgaagcggcccttgccgcagccgagctccacgcggatctccttcgcctcgggcatcaagtcgtgccagcggcccttgcgctcgtaggggtccttgatctgatacgccccgcaccgctccatgcggggaagcaggtttttctttttgcgcattcgcatagaatgaacctcgttttcctataattaaagcctatcatatcgaaaattggtgcaagagacaagtcattttaaaaattttatacaagagttgctgcattgggagaaaagatcattaaaaatgcaacgtttcttgcaatggcaccggaaaagtgtgaaacttttttgaaaaaagtgatttttctcttgcaaatatgccttgccgcccatataatagggagcagttgaagaagacgggaggagacacacgatgtcttttgtcaaatatgaacccaagggcaacattgcctatctcatcattgaccgcgaaaaggcgctcaacgcgctcaattctcaggtgctcgccgatctcgatgctgcgctcgacgcggtggacttaagcgagatccgctgcctgatcgtccgcggcgcgggcgagaagtcctttgtcgccggcgcggacatcgcgcagatgaaggagctcagcaaggaggaggccgaggccttcggcaagcagggcaacgacgtcatgcgcaagctcgaagcgttccccatcccgacgatcgcggcggtgggcggctatgccctcggcggcggctgcgagctcgcgatgagctgcgatttccgcatctgctccgataccgccgtcttcggccagcccgagacaggccttggcatcacgccgggctttggcggcacacagcgccttgcccgcctcgtcggccccggcatggccaagcagatgatctacaccgcccgcaacatcaaggcggacgaggcctaccgcatcggccttgtcaacgcggtctatccgctttctgacctctacgccgcggcggaaaagctcgccggccagatcgctggcaacgcgcccatcgcggtgcgcgcgtccaagcaggcaatcaacgacggtcttcaggtcgacattgaccgcgccgtcgtgatcgaggagaaggccttcggctcctgcttccagagtgccgaccagcaggagggcatgggcgccttcctcgaaaagcgcaagcacgagccctttatcaacaagtgattccatagaattatctatttatattgtaggaggatacacacaatgaaagttgcagttttcggcgccggcaccatgggcagcggcatcgctcaggtcttcgcggccaagggccacaccgctctgatgtacgcttccagcgtcgcttccgctcagcgccacaaggataagctcgccgcttccctgcagaagcgcgtcgagaagggcaagatgaccgaagaggccaaggacgccatcctgaacaacatcctcgtcgaggagaagtctgccgcggcggacgccgacctcgtcatcgagtgcgtggcggagaacatggacaccaagcgtcagctcctcggcgagctcgacgagatgtgcaaggagagcaccgtcttcgcgaccaacacctcttctctgtctgtcaccgagatgggtctcggcctcaagcacgccgtcatcggcatgcacttcttcaaccccgtgcccagcatgaagctcgttgaggtcatccgcggcgccaacaccacgcaggagaccttcgacttcatctacaacctctccaaggagatcggcaaggagcctgtcgaggtcgctgaggctccgggcttcgtcgtcaacaagatcctgatcccgatgatcaacgaggccatcggcctggtcgagaccggcgttgcctctgtcgaggatatcgacaaggccatgatgctcggcgcgaaccaccccatgggccccctcgccctgggcgacttcatcggccttgacgtgtgcctcgccattatgaacgtcctctacagcgagaccggcgatccgaagtatcgtcccgctctgctgctcaagaagatggtccgcggcggccagctcggcaagaagtccggcaagggcttctacgattacagcaagaagtaatccgtccctaaaaggataaaaaggagaggcagtttacaaaaactgcctccccttttctcttttggaatggaaaggattcctgaaaatgacagaaaactgtcataaaaggaacggaaatgtcaaaaaggctttaatgaattcggcaaaaagcacgaattccaaaaaggaatgatagttccccttgcgaaaatgaaacgcacaggatataatgagagtcacggaactgatttgtgaaaaattagacaatccaattatttttatagtgaaggagcaaaagactatggatttccatctgtccaaagaacatctgctggtccgcaaaatgtatcgcgaatttgcagaaaatgaagtcaagcctttagctgaggaactcgatgaggaagagcgcttccccatggagaccgtcgaaaagatggccaagctcggcatgatgggtatttacttcccgaagcagtacggcggcgccggcggcgatgttctcagttatgccatgtgcgtggaggagctcgctaaggtttgcggcaccaccgctgttatcgtttctgcccacacctccctctgctgcgctcccattttcgagaacggcaccgaggagcagaagatgaagtatctgcctgaccttctgtccggccgcaagatcggcgcgttcggtctgaccgagcccggcgccggtaccgatgcctccggccagcagaccaccgctgtcaagaacgagaacggcgactacgtcctcaacggcagcaagtgcttcatcaccaacggtaacgttgcctccactttcgtcgtgttcgccatgaccgacaagagcaagggcaaccacggtatcaccgccttcatcgttgagaaggacttccccggcttctccaccggtaagcacgagaagaagatgggtatccgcggcagctctacctgcgacctcgtcttcgaagactgcgtcgtccccaaggagaacctgctcggtaaggaaggcgaaggcttcaagatcgccatgaagaccctcgacggcggccgtatcggtatcgcctcccaggctctcggtcttgccgaaggcgccatcaacgaggctgtcaagtacaccaaggagcgtatccagtttggtcgccgcctgagccagttccagaacacccagttccagctggccgacatgcacacccgcactcaggctgcccagtacctcgtttacgctgccgctatgaagaagcagaatcacgaggattactccatggacgctgccatggccaagctcttcgcggccgagaccgcttccgacgtcacccgccgcgctgttcagctcttcggcggctatggctacacccgtgagtatcccgttgagcgcatgatgcgcgatgccaagatcaccgagatctacgagggcacttccgaagtccagcgtatggtcgttgccaagtatcttggtgtgaactaaaaaaggaggtaaagatataatgaagattcttgtttgcgttaagcaggtccccgatacctccggtaaggttgccgtcaatcccgatggtaccctgaaccgcgcttccatgcagaccatcatcaaccccgatgatatgaacgccgttgaggccgctctcaagctcaaggatgagctgggctgcaaggtcaccgtcgtcaccatgggtcccccgccggcagaaggtatgctgcgcgagctgatggccatgggcgctgatgacggctatctcgtttccgcccgtgagttcggcggttccgatacttacgccacctcccagatccttgccgccgctctcgacaccatcggtctcgatgacgacgacatcgtcttctgcggccgtcaggctatcgatggtgataccgctcaggtcggtcctcagatcgctgagaagctgcacctgccccagatcacctacgccgccgatgtgaagaaggaaggcaacaccctgaccgtcaagcgcatgctcgaggacggctacatgaccatcaaggctcagactccgtgcctgatcacctgcatcaaggagctcaataccccgcgttatatgagcgtctccggtgtgtttgagtgctattccaagcccatgaaggtcctcgattacgaggcgctgaaggatcatgaactgatcgacgccacgaccatcggcctcaagggctccccgaccaacatcctgacctccttcacgcccccccagaagggcgccggtcagatgctcgagggcaacgacatggctacctgcgagaagctcgccggcatcctgctcgaaaaacacatcatttaaggaaaggagatcaatacgatgcgtaacgaagtgaaacttgctaatcccaactatgactcctccaagatcgaagagttcaagaacgtatgggtcttctgcgaacagcgtcagggccagatgatgtccacctcctatgagctgatctccgaaggccgcaagctggcggacgagctgggcgtgaagctctgcggtctgctggtcggcgacaatgtcggcgatctcgccgagagcattggcggctacggcgctgatgaggtcatcgtctgcgaccaccccctgctgaagaactacaccaccgacgcctatgccaaggtcatctgcgacgtcatctccgagatgaagcccgaggccttcctcatcggcgcgaccaacatcggccgtgacctcggcccccgctgcgcagcccgtctgcacaccggtctctgcgccgactgcacccacctcgacgttgacatgcccatctacaaggacttcctgcgcggcgcttccacgctgcccgaggccaagatcgacggcatggccaccgcgaaggtcatgggtaaggaccacgatgtctctcgcgacctgaagatgacccgtcccgcgttcggcggcaacctgatggctaccatcatctgcccgcgcttccgtccctccatggcgacggtccgtcccggcgttatgaagaaggctgcttacgacgaggcgaaggccaaggccgttaaggtcaccaagtacgacgtcaagctcgacgccgccgatctccagaccgaggtcgtcgaggtcgtcaaggctgccaagaagctcgtcgacctgatcggcgctgactacatcgtctccgtcggccgtggtatctccaaggacgtcgagggcggcatcaagctggccgaagagctggcggac

SEQ ID NO: 139 - DNA, 25835 bp, unidentified
  source 1..25835: mol_type = unassigned DNA
  misc_difference 8364: note = a, c, g, or t
  misc_difference 8365: note = a, c, g, or t
  misc_difference 8366: note = a, c, g, or t
  misc_difference 8367: note = a, c, g, or t
  misc_difference 8368: note = a, c, g, or t
  misc_difference 8369: note = a, c, g, or t
  misc_difference 8370: note = a, c, g, or t
  misc_difference 8371: note = a, c, g, or t
  misc_difference 8372: note = a, c, g, or t
  misc_difference 8373: note = a, c, g, or t
ttacagatgacggatctccgtcttttcaaggcaatttttcaaaagctgttccacatcaagcttctgttccgcagcctccaccacgttcaaagtggggcgggtgcgcgggtgcttcggcgtaaacaccgtgcagcagtcctcatacggctcaatggaaatatcatacgtgtcaatgcggtgcgcaagcgtcacgatttccgacttgtcgctgccgataagcggacggaaaaccggcatattcgccgcggcgtccgtgcaggcgatggcctgaatggtctggcttgccacctgcccaaggctctcacccgtgatgagtgcactgcattcgcgctcgcgtgcaatgcactcggcggcacgcatcataaagcggcgcataatcacggtcgcaagctcctccgggcagttgtctcgaatttgctcctgaatttcggtgaacggcacggtaatcatatccattctgcccgcgtattcgccgaccttcttcagcagcgccaccaccttttcatgtgcgcgctcgctcgtgtacggcgggctcgcaaagtgaatggccgtcagctccacgccgcgctttgccatcatccacgccgccaccgggctgtcgaggccgccgctgatgagaatggccgccttgccgcccgtacccaccggaatgccgcccgcgccgggcttcgtctcgccgtggatatacgccgctttctcgcggatttccacgcgcaccgtgatctccgggttatgcacgtctacggaaatttgcgggttcgcgcgcagcagcgccgcgcccacctcgcgggagatttccatggagccgagcgggaacttcttgtccgcacgcttcgattccaccttgaacgtcttaaagcccgcgagtgtgtcattgaggtattccggcgccatttttgtaatggcgtccatgtccttttcacacacgcaagcgcgcgcatagccaatgacgccgaaaatcttcgagatgcgctcctcggcctcgtcaatgtccgcgtcctcgtccttcggttcaatgtaaatggtggactgcatagagtacacctcaaagttgcccgcgcgcgcaatgcggcggcgaatgttctttaacagccggtcttcaaacgtgcggcgattcaatccctttaagacgatctcgccgagcttgaccagaatcacttcctgcatgacaaaattcctttccatctataaactcacgcttacgcgtgcgaaagcgtttggaggccctctttcaaggcgtccgcaaacgcgtccatttcttctgctgtgttttccgccgaaaggcttacgcgcagcgatgtttcaacgcgctccttcggcagctgcatcgcactcagaacgtggctcggttttgccttgccgcacgcagaaccgcttgaaacaaaaatgtttcgctccgccaaaaagtgcagcatcgtctccgcacgcacgcgccccgccgaaagattcacaatatacggcaacgcgttttcgggcgagttcaaaacaacctccggcatcgctttcagccgttcaatcaaatgcgcctgcaccgcttttacgtgtgtgagcgcctctttttccgtcatcatgtgcttcaccgcttcgccgaacgcacaaatttgcggtacgccctcggtgccggggcgcagatttttctcttgcccgccgccgaagctgtgcggcaaaatgcgtatgccgcttttcacgtacagcgcacccacgcccttcggcgcatgcaccttgtggcccgaaacactgatgaggtcaacaccgagctttttcggctggagcggaattttgcagaagccctgcaccgcatccgtatgaaacagcgccggggcctttttcctcttgatcatgcctgcaatgtctttcagtggcagcaaaacacctgtttcgttattcaccgccatcacgctgaccaaaatcgtcttcgcatcaatggccgcatcaaatttctctttcggaatatttccgtccgcctccggctgcacatacacgacctcaaagccctctttttcaagctgtgccatcgtattgagcaccgccggatgctcgatcgccgtcgtcacaatcttgttgcccgcgcgctttttcgcgtgcgccgcacccaaaatcgcaatgttgtcgctctctgtgccgccggacgtgaagtaaatctcccccggctgcgccgaaagtctctcggcgatgatctcccgcgccgcagccatctccttttccgccgcaaagcccttgctgtgcagcgaagaggggttgccgtagcattccgtcatcatgtaaagcgccttttccgccgcctcttttgaaacgcgcgtcgtcgcgctgttgtccaaataaatttcctgtgtcgtatccatcattatcccttacagttttcggtagccggtcgaaaaatcgaccacatttctaagcggctcacccgccagaaaacgctttaaattctccgccataatacgcacaatgcggtcgtgcgtctcctgcaaatggtatccgccggagatatgcggtgtgatgaccgcgttttccgtcttccacagcggatgatctgcgggcagcggctccgggtcggtcacatccacgcccgcgcccgcaagctttccgttttccagcgccgcgcacagcgcatctgtgtcgacgatcatcccgcggccgacgtttaataaaatcgcgccgtccttcatcttcgccatgcgctctgcgtcaaacatacccttcgttgccgtcgtgcccggcagcgtaatggccacgcagtccgcctgtggcaaatattcgtcaagcttatccgtatggatgagttcgtccacaaaatcgggcttatccgtacccgtgcggcgcacgccgatcacccttgcgcccagcgctttcgcacgcttcgcaaattccccaccgatgtcgccgaggccgagcaccagcaccgtcgagttccacgccgagcgcacctgcccgaggtcgcaccacttgcccgtgcgctgcacatcgcggtacaaatgcagtttttttaaaagttcaagccacaccgcgaccatgtattccgaaatcgcaaggccatacgcgcccgttgcatttgtcaaaacggtttccttcggcagacagccgtggatatacccgtccacgcccgcactgttcgtctgcaaccatttaagcttatcgccggtcgagatgagcttcgggctcacgttgccgaggattatatccgcgttctgcacgtcctcgcgctctgccttgccctctttataaataaacgtctcccccggcgcgacttcttcgagccacacgcgctgatagggcttcgcctccatcgcaactaaaatgttcacagtgtttcgatctcctctctccacaccgtattgcacgcatcgctcggcatgcggaaatcgccgcgcggcgaaagcgtcacagagcccaccttcgggccgtccggcaggcaggagcgcttaaactgctgttggaagaagcggcggtagaacgttttcagccactttttaatggtctcggcgtcatactgccccgcaaatgagcgcagcgccatcgcataaattttacgtggcgtaaacccaaagcgcaacatataatacaaatagtaatcatgcagttcatacggccccacaaggtcttccgtcttctgcgagatttcgccgtccttcggcggcaataattccgggctgaccggcgtgtccaaaatatcaagtaaaacgcggcgcagctcgtcgttgccgtgcatcgcctcataacgcacgaggtggcgcaccagtgtcttcgggatagacgcattcaccgcatacatcgacatgtggtcgccgttgtacgtcgcccagccgagcgcaagctcggaaaggtcgcccgtgccgatgacaatgccgccgtgctgattcgcaatgtccatcaaaagctgtgtgcgctcgcgcgcctgcgaattttcatacgtcacgtccagcacctcgggatcgtgctgaatgtccttaaagtgctgctccaccgccttcgcaatcggaatttcatcaaaatgcaccttgagctcttccgcaaggcactgcgcgttgctcttcgtgcgcgccgtcgtgccgaagcatggcatcgataccgtgcggatgcccgtgcgcggcaggccgagcatatcaaacgcgttcgccgtcacaagcaatgccaacgtggaatcgagaccgcccgaaagcccaatgaccgccgttttgcagccgatgtgcttcagtctcgtcgcgagacccgtcgcctgcattttgaggatcgtctcgcagcgtgcggaaaggtcggcgtcgtccttcggcacaaacgggtacgggtacgccgtgcgcgtcgtctcaaactcgggcaggtccatcgaagcgtcgatgatgtcgcacacaggctcgtcctgccacgtattcatgcggcggcgctcctgcacaaggcgctccacgtcgatgtcgccgtaggtgataccgttcgtaaacaaatcgctctcgttcagtaacgagccgttttcgcaaatcaaattgtgtcccgcaaagatcatgtccgtcgtgctttcgccaaagccgctgtccgcgtacacatacgctgcaagcagacgaccggagtgcatgcgcagcatgtcgcggcggtactgcgccttaccgataatttcatcgctgcacgaaagatttaataaaacggtcgcgccgccctttgcaagcgtcacgctcggcgggtctgccacccaaacatcctcgcagatctccacgcccacggtcacgtccggcgcaagctcaaacaccacgtcacggcagccgtaccagtcgcccgcatagcgcagcatgccgctttccggcgcgggggaaaaatggcgcagctcgtaaaattcggagtaattcggaatatgctgctttgccggcaggcccagcaaaacgccgcgactgaacaccgccgcgcagttatacagcgccccgccggacgggatcggcatacccaccgcgcacagaatatcgaggtcttccgtctcttcgatgaggtcaaacaggcacgccttcgcgctttccatcagctttctgtccttaaacaggtcgccgcaggtgtagcccgtcatcgcaagctccgggaacgcgatgaccgaagcgccgtttgcggccgcctcgcggatcattttcgccatctcgtttttgttgtacaggcagtccgccaccttcacgtgcggtgtagccgccgccacgcgcaccattccgtctatttttatgctcacaaataagctcctctcaagtgtcaccggaggtgacacaattatattcacttgcacaaattccccctgccgaaaaaagagcagggggaaactgtttttattctcattcgccggtttcggccgccgtcacaggctccggtgtgggctcctctgtgggggccgccgtcggttctgcgggcggcgcaggggtcggctccggcgtaggcgccgcagtcggcgcaggggtcgcagtgggcgcaggggtcgcggtgggcgctgccgttggggttgccgtaggtgtcgggctcggggaagacgtctccgtgcccgggccgatgcggtaaatggtgccgcttgggccgtagtaggaggaaggcagcgtctcggtgcggatgacctctccgtccttcacaaaatcgcgccaagcgctcgcctcatagccccagttgccgcttgtggaaagcaccttttcgccctttttaaggttctggtccaccacgtatttcacagtgctcagcggcgggatctcgctcgtcgtctgggaatacacattgatcgtatcccactctttcggatgcttgccgtagaactgcacatgcagcgtcacaccgtccatccaactcataatgtacaccggggtgtcaagatcattgcggaactggaagtcgatctcgccgtaactcaccgtcgcgtccagaccaatcggcacgtacgtagacggtgaagaatggcagtcgcgcagcgtgattgtcatacccgcacgcagcgcagcgccgtagatcgttgaagaagcctgacaaatgccgccgccgtacatctgcaccagcgcgccgccggaaaggccgcccgccggcaaaaagcccgtggaagcgtttgtggaatcgcccacaatgttttcataagagaatgtgtcgcccgggttcaaaaccgtgccgttcacgcgggaaagcgccagacccatgttgtggttgccgttttccgtattcgtcgagaccgtctcaaacgaggagatcatgccgaaatcttttctcaggtcgtccacggtcactttcgccgcggtctcctgcaaagcagcttccacttcgccgctcgtcttcttaaggaactgcgccttcacggcggcaagcgttccgtaaacgtccagctttttgccgttcacagcgtcctcaaacgcaaagtcgcccgcgtcaaagtcataagagcccacggtcgcgtccttagcctgcacgacgaaatcgccgagtctttgctttaattcattttcaaaattcttgagcgtcaggcaatacgtcatttcgtagtcgcccgcttttctcgatttcaaaagccgcgtcagcgtaatatccagcgtatccacaacggtcagctcgctgcccttggcggtcatttcggtgtcgccgcttttcaccgtgacgttgatattcgcatacggctttaacgccgctgctctgcacaccttttcggcttccgcgagcttcatgccggaaatgtcgatgccgtccatcgtggtaccttccgcaaacacggtcaggtcttccggctccggggtaggcgtcggcgccgccgtcgccgcagagtcggaagacgtcggcagcttatcgcagcccgcaaagcccagcatcaagacagccgccaaaactgcgccgaccgccgccgcgcgatattttttcgttttatgtctatacatgagatcgcctttctgaaaatcccggcagcttctcacagccgcttttctgtatcgtaccgacttacgttttgcagatattctctccttttcgccggcaaaataccggctgagaatattatacctgccgcatcttttcttgtaaagacatacgtttaaatatgtcttaaaagtttttgaacgcatgtaggttctccgcttactttaagtataccgcaaagccgcaaaaaagtctccagaaaaatgcaaattttccgcaaatttcactcttttttcggatttgatttcttaatttccgcacaatatatggaaattcacaaaaaaatgtgataaactggagcaaaggacagggggatctgaaaataagttttgatttttcagacacacccgatgaaaaggctattgaaaaggagcggtatcatgcgcattttgattctcacctgtgctaccggcggcggccacctgcgcgcggctgcggcacttgaaaaatacatacgcgaaaccaccacccacgaagtcattcaaatggacttcttaaaaagcatcggcaagctgctcgacaaaaccatttgcgacagctacctctttatggcaaagaagaccccgtctctcttcggccgcctctacaaaacgacaaataaagataatccccttgcggatttcgttccccgcacaacggagcttctggcgctccagctctatccgcgtttagcggaggtcgcgccggacgtcatcatcagcgtgcacccgttcgcaacagagatgatctccggtttaaaggagcgccgccgcatcacctgcccgcttatctgcctcatgacagactacggcgtgcacaaggcgtggattgccccgaatgtcgatgcctacgtcgtcgcctgcgacgacatggtgaacgacctgcgccgtctcggcattccgaaagagcatatctacccctacggcatcccggtgcacgacgtcttcttcgacaaggaagaccaggcgaagctcctcaccgaaatggacctcgagccggaagtgcccaccgtgctcttcatggccggcagcatgggcgtctccaacattgtagacctctaccgcggcctgtgctcctccccgctcgatttacagatcatcatcatcacgggcaataacaaaaagctctataagctctttgaaagcgaaattccgaactcgtcgaaaaagacaaagcttgtccagttcacaacggaagtagagcgctttatgcacgcgtccgacctcatcatcacaaagccgggcggcctcaccgtctcggaagcgctcgcatgcaacctgccgctcgccgtgttcgacgccattcccggtcaggaggaagataacgccaacttcctgcaaacgcacgatatgggcgtgcgcgtcacaaaggagaatttctccgctgtcgtgtcctcactcatcgagcataaagagcgtctgcgccgcatgcgcgaaagctgccgcacattcgataaatcccgcgcgaacgagaacatcgtcgcgctcnnnnnnnnnnacgacgctcttccgatctcgctcgccgtaaggcccgcaaaggaatttgcctcgtataacccgaacatctcattctccacggataaaggcgtgttcaacttccgcaccgccgccatcatcgtgcagaacggcaagctgctcgtcacaaaagacgacagcacagagcactactacctccccggcggccgcgtcaccatgcgtgaaaaggccgaggacgccctcacgcgcgagttaaaagaagagctgggtgtcaccgtcgcgccggagcgcgccgtgtggattgcccaaagcttcttcaccccgacaggcaaaaagcagcgttaccacgagctttgcacctacttcaccgtagacgcttccggcaccgatctcatcacccgcggctaccgtttcgacagcccgaatgaaccgagcgtccacttcgcgtggttcccgtttgaagagctgccgtatatcgatttaagaccggcgtttttgaaaaccgaagttcaaaacctgccggagcatacgcagtttattacgattggggattgacgcacgttcaccgcagcccgtcctttcacccaacaaacgcccctcgtttttatcttctttgacgattgattctttgacgattgattttttctccgcacttttcctataatcaagataaaaaacatcgtcctgaacaggaggtctaccatgaaaaaacgctcgctttctccttttgcgtactatgccgcaaaccgcgcattccccgtttttctgttgctcctgcttctgttcggattcaccgcctgctcggcggaaaaaggcgccaaagcgctcgattaccccgccatgttcggcgaaacgaagaacgaagtacttgcggcgctcgatgcggaaaacctcacctacaaggaagacgacctttatgccaacgcctacgttttagaccggaccgaaacgctcgaaaaccgtgatttttcggtctacctgcttttcgatctcaacaccgatacgctttacggctaccgcagggttctggtcgtcgaaaacccgaccgatgcggactgcaagctgcccgaaaagcttctcaacaccctcaccgcgcagtacggcgagccgaccacctaccccggccttgaaaaccgcatctccacgcacctcgaccgcctgagcaccgacgccgtcggttccggcgaggtctacaacgaatactggtcggtgtccgaaaattgcgacgtgtcactcggcgtcagcttcctccccgacggccgcctttttgtggacatcgtctgccaaaccccgcgaacgtaattttagtaaaacttcaaaaggacagcttccccggaagccgtccttttttcattctcattttatctcaaaccttatcccgcatctccgtcatacggttccagtagcgctttggcatgtgggtgcggcggcacaggtcgttccgtctgccctcaatgcccacggtgtcgtagaacgtgcgccacatggcgcggaatttctcctcctccggcgattccggcggcagctcgatgtgctccgcctgcaaaaattccggcgcgccgtctttatataataaagcaagcttatgcgtgcggtcgaagatcatgaaatcttcaccggaaaaacggttgataaaatgcggcgcgataacgggtaaaacgctgtttttcggctcaatctgcgcgataagaacgtcgccgtactccgcaaagcgcagaaaaccaaggtacaagtgcgcttcccgctcaaggaactgcaccgctttcgtgatcttatcgacggcaggctcggtcagtcgcccgcacacgccgcgcccgaccttgtaccctaaccgcatgaattccagcatacgcagttccttttcgggcatacaggtaaaaaacgcgcgctccaaaagatcctgcgcctccatgcccatttttttcggaatcgacacgcgcacacgctcggcacggcgcaggtcggtctcgatatacttcgcgccgaataaacacgtctggtcggcttcatcaacgggcaaaatcgcggcaggcgtttctttttccgcaaagctctcgaacacacaggaaagaaagccgttatatgtgccgtcgtagtaatacattacagttgtccggtcagacattttaccgcgtcctcctttgtggggttgaataataaaagctgctcgggaatttcgggctgtatgccgccttgcggcagcccgcggtcgcgcagaatgcccgccaaaaccgccggttcgtctgtgcgcaaacggcactgcattttgccgttgcaggtgataaaatacgaagcacgctttaagacgacaccgagctttttcagcccctcgtggtcgagcttcgcttgccgtctggcgcggatgatgcgctttgcactcaccacgccgatgcccggcacgcgcaataatttctcatacggcgcgcggttcacctccacggggaattcctccgggtggcgcaccgcccaactgcacttcgggtctaacatagggtcgaggtcgggcgttttttcgctcaataattcgtccgccgtgaagccgtaaaaccgcaaaagccaatcggcctgataaagcctgtgctcgcgcagaagcggcggcgcggtgtcgagcgcgggaagatttctgtcctgcacgaccggtatatacgcagagtaaaacacgcgttttaaagaatacttatggtaaagtccttcgctcagctgcaaaatacgtcggtcgttttccggcgttgcgccgatgatcatttgcgttgactgcccacccggtacgaagcgcggcgcatttttataccgtatgagatcgtgcgcgttttccttgatgccgtcgcgaatgcgcgacataggcagcaggatgttttccttcgatttctgcggcgcaaggcgctttagactgtcgtttgacggcagctcgatattgacgctcatacggtcggcaagcaggccgagctgctgcaaaagtgtctcgtccgcgccgggaatggctttgacgtgaatgtaaccgttgaagtgatactcgttacgcagaatatgcaatgtttcgagcattctttcgcaggtgatgtccggcgagccgaacacggcggagcttaaaaacagcccttcaatataattgcgacggtaaaagctgatggtcagatccgccagctcctgcgggcgaaacgtcgcgcggggcgtgtcgtttgagcggcggttgaggcaatacgtgcagtcataagcacatatgttcgtcattagcacctttaaaagggagatgcaccggccgtcacttgcaaagctgtggcagatgccgcacgcggcggcagagccgagctgcccctttacgcctgcgcggtttacgccgcttgaggtgcacgccgcgtcatattttgcggcatccgttaaaatgcgcagcttttccatggtgtccatttgtgtgttcatgctgttctccctatcttaaagcgcgacgcccttgaacgggttttcgacgtgtgtgcggcggttttccgcagcggactgaaagaggtctttgtgcattaccttgatgccgcgatcaatgatgtcgccaccgtatttgcagcgcagaaaatcgaccgtcgtttcgagcttttgggccttttgtccgcgcgcggcatcttcaaacagcgagcactgcgacataccgagcggcacgagcgacgacacacgcacgccgatgctgcggatggattcgcccgtgtggtgagcgcggaaaagaccgtaagcggcgtcgaaaatgcttttggaatccgccacggcggtgtccagcatcttctggcgctggtaggtctcgaggttatatttgcgcacggaaagctgcacgttgtagccgcaaaggcccttttcgcgcaatctttgtgcgacgctttcggagagcatgtagagctctgcgcgaatttcgccgtcgtcttttaggtcgtgcacggcggtggtgctgttgccgatgcttttgacctcctcgtgctcgttcacacggcgcacgggcgacctgtcttcgccgtttgcgtacatacttaattgctcgcccgccttgccgaatagcctttttaacagctttcggtcggcctttgcagcgtcgccgatggtgtagatgccgtattttctgagcgcttcctgcgtcgatttgccgacgaacaacaggtctgccgccggaagcggccacacgagctctttaaaattctcgcgcgtgaactccgttacggcatccggctttttatagtcgctgccgagctttgcgaaaattttgttgaacgacacgccgattgacaccgtgagcccgagctcatctttgacgcgcgcgcgaatttcctccgcaatctcgcggccgctgccgaacaagcggcggctgccggtcacgtcgagccagcactcgtctaagccgaagctttccaccatgtcggtgtactgcatgtagatctcctttgcaaggcgcgaatactttgcgtagcgctcaaaatgcggcgggacgaacttgatgccggggcatttgcgttccgcttcccacagggcttccgccgttttgacgcctttggccttcgcgagcatatttttcgcgaggacgatgccgtggcgacgctctttatcgccgccgaccgccatgggaatatctttcagcgacgggtcataaagcgtctccacagaggcataaaagttattcatatcgatgtgcagaatgacccgatccacggcttttgcctcctttcgacgcgttgcgaacatgcgttctctatacccttattatagaacatgcgttctgatttgtcaagcggtaaataccggaaaaagcgcgttttgaaaaagatgtccgcttgtgtcctgtgatgttctgcttctgaaaccgcagagatttatgcacaatttgttaccttagtgttaccctaagaacaaagtgtaaacttagtgtgaaagaagtctcggttttcttgaaaaaaagtttttcgcgcattatacttttaactgtgaaattttatttctaaccttatctctataccctcatttctaaggaagtgtttttatttgtttcttgaaaaattgagaagatttatgtacggccggtacggcacggacgaactgaaccttgttttgatgatcctcggtatcatcgtgatgttcctttcgcgcattttctggttctggccgctcgcaatgatttcttacgcgctttacatctatgcgctgttccgtatgttctcgcgcaacatccccgcgcggcaaaaagaatattattctttcttaaaggtatggacaccggcgcaaaaatggtttagaattaagaaaacggcttttcgcgagcgcaagcagtacaaatacttccgctgtccgggctgtcgccagcagctgcgcgcaccgcgcggacgcggtaaaattcttgtcacctgccagcgctgccacaagcagtttaaacaaaagacctgattagggcaaggagtttgaaaaccatgaaagttgcaattttaggcacctggcacgtccacaccaaagagtacaccacgggtgtactgaataacccgaatgcggaagtcgccgtcgtttgggacaacgacgcagagcgcggcaagaagttcgccgatgaaatgaacctgccgttcaacgcagacctcgacgctgtacttggcgacgagagcattgacagcgtggtcatctgcactgcgacctgcgaccacccggagatcatgatgaaggtgacggcggcgaagaagaacatcttcaccgagaaggtgctcaccatcgaccccaaggacgcagagaaggtcgccgaggctgtgaaggcttccggcaaggtatttacgatctcttatccgcaccgcacgttcccgacgctgcgcgcggtaaaagctttgatggacagcggcaagctgggccgtgtgacctacgcacgcgtgcgcaacgtacacaacggcagctccgcaaactggcttcccccgcatttctacgataaagcacagtgcggcggcggcgcaatgatagaccttggctcacacccgatgtacacgctttactggctgctgggagagccgaaatccattacctccacgttcacgcaggtgacgaaccgcggcgttgaggacaatgcggtctccgtcatcgagtttgcagacggcaagatcggcgtttccgagaccggctttgtctccgagtgcaacccgtacacgctggaagtgagcggcacggacggcgctgtgatggtacacggcgacagcgtacagtggggcggcaaggcgaccgaaggcaagtgggtagaccttgagctgccggaaaaggagccgctgccgatcgatcagtggatcgatgctgttgtaaacggcaagccgtctccgttcacgattgacgaggctgtgatgctgacccgtttgatggacggtgcttacaaggcatttgagaccggcgcaaaggcgacgttctgattttaattcttaaataaaaaactctgagcacccgccgcgcgcatttccgtgtgcggcgggtcatttttagggcgaagcctgcggtatcgccttaacgcgtattggaaaccggagggtcattgtggaaaaagaaaaccattctgcagaaaagaaaccgatgcgggaatacaccccgtgggactatgtaaagcccggcattgccattgccgcctttgcggtggggctgattttcgtgctgtttaagttcgatgcggtctcgaaggtgggcagcgtgctctttaacgcggtgagctcgtttattctgggcctttttatcgcgtacattttaaacgtgtttttgaatctgtttgagaacacggtgttcggaagactcacacgcagtgacaacaaggtgtggaaaaagctgaagcgcccggtatgcgtggcgctttcctatgcggtgatcgtgctcatcctcctcgccatcacgctgtatgtcgtgccggagattttcaagtctttagaacttatcggcgagacggcgcgcgtgaatattccggtgtatgtagaccagattgccaaatgggctgacgagctttccaagcagtttgacctcgatttttccacgatggtggattcgttgaataacttcaactggtcttcgattttatcgggcgcaacggagtttacgacgaactttttcagctcgcttgtgaacgtgaccgtgaatgtggcgagcggcattttcacgtttgtgctctccgttatcttctccgcgtacttcctgacgagcaaggagagcctgctgctttccttaaagcgtgtctcctattccctgctgccgaaaaaggtggtggcaactctggcagacattgcggtaacctcgaacaacgtgttttcttcctttgtgcgcggccagctgacggagtgtatcattttaggctgcctgtgcttcatctgcatgtcgcttatcgggtttgactacgcgctgctcatctcgtgcattgtgacgatcactgcgttgataccgattctcggcgcgtacatcggttgcggcatcggcgcgtttttactgctgatcgtaaaccccatggatgctgtatggttcgtcatcttcttcatctgccttcagcagtttgagggcaacctcatttacccgaaggtcgtgggctcgaccattggtctgccgggtgtgtgggtgatgaccgccgtgacgatcttcagcaatttgttcggcattttgggcattattctcggcacaccgatcgcagcggttctatacacggtgatgcgccgcgtgacaacgaaccgccttgcggcgcgcgggctttcaaacgctgatttagaaccgggcaaatacccatatctggaaaactctcactacgcggcggggtattctaagggccgcccgctgtgcgcccccgttttggaacgcgcggcaaagaaaaaggaacagggtaaaaagccgctgttcccgaagtttaaaacgagcaagaaaaagtgatttttcggcgctgtacgggaacccgtacggcgctttttatatgcaaaaaggcatacggcaaagcgtttttcgcttaccgtatgccttttgttttgcggaaattaaagcgctgcgatgacttccacttcgacgaggacgttcttcggcaaggtcttgacggcaacgcaggagcgtgccggcttttcggtgaaatacttgccgtagacagcgttgaacgcggcgaaatcgcccatatcggcgaggaagcaggtagtcttcacggcgttttcaaacgtggtaccggcttcttcgaggacggcggcgaggttcttcatgacctgctctgcctgctcggtgatgtctgcaccgtggatgtcacccgttgcggggtcgatcggaatctgaccggaggtgaagagcatattgccgcaaacgatggcctgcgaatacgggccgatggctgcgggggctttctttgtatcgattttcttcagcatgatataacttcctttcgtcacacggcatcacgccgcgtttatattcatcatagcgatttttggcgttttcgtcaagttttgcttttttactcggcgagggcgtagaatgcttcgctgtatttttcggaatcgtccgccatgatgagcaggacaaggtcgccgacgctttccacgcgcacgtcgttcgggttgacatccacgcagatccacttggcggggttcgcgctgcggcggatctccgctttcagctcgtcgatgtcggtaccgtccttgacacgcatgaggcaaacggaaaacgcgatggcgttgataaacggctcgctcgcgacggcttcttcaaaatcgagattttcgacgccgaagtagtacgcagactggtctttcggaatctcgaccgtgccgacgctgtttttgagaaaatcgcgctgctcgtcatcgacatctacggtgtcatacaggcggtctataatctccggcagcgtgcccgagatggttttgccgctgtctgttgtgctgtttccgctggcgcaggcggcgcaggcgaaaagcagcgtgagcacgagcaggagcgccgtaagctttttgggttttctcatggtaaatttcctttccggttttaaaatcgaaggggaagtttagtattttgtggcgtagtagtcgatggcttcatcgatggtgccgtcaaacacgatctttccgtttttcatcacgacaccgcgggtgcagaacgctttggcaatctccggcgaatgggtgacgaacagaagcgtgatgtcgccctgcatgatctccttcacctttttggtgcacttatcgcggaacgcgcggtcgccgacggacagcgcctcatcgacgatgaggatttccgggttgatgttgacgcagatggaaaaaccgaggcgcgctttcataccgctggagtacgtgcgcacaggctggtcgatgtattcttcgagctccgcaaaatcaatgatggcaggctcgagctttgcgatgtcttcatcgttaaggcccaaaatgcggcccttgagataaatgttttcgcggccggtaaattcctggtcaaagccgcttgtgagctccagaagcgcgctgacgatgccgttgacgtaaatttcgccgcttgtggggaacgtgacgccggtgatcattttaagcatggtggatttgcccgcgccgttgcgtcctaaaatggcgacggcttcgccgcgctcaacggtgaggttcatatcgacgacggcgtgctttgttttgtgcggcacgcttttgaaaaacagccccaaaaggcgacggcggctgcttgtatacagtctgtacgttttgcagacatttttaaaacggacggcaatgttgttttgttcgctcatgcttttgccctccttacagtacgtccgccatttcactgcgggtgcggcggtagctccagatgccgagtgcgtaaatgacaacgagccagacggcgaagtacaaaaggcgtttcggctggtcaaagaaccacgtgtggtaaatgaagcagttgcggtagccgttgcacaggaacgtgacgggattcagcatcaaaagcttatgtgcgaggcccttgtgcatggtatcgacctggaaaagcacgccggaaagccagaacaccgctgtaacgaacgatttgacgaggtttgagaaatcggtgctgatggcggcgatgggcgcggcaaacatagcccagccggtgaagaacaggaaattgcacagcatgtaaaacggaagctgcacaaggtagatggtcaattcgttgccggtgataacgaagatgaagatggtgatcaccatcaagatgaggtgcacagagaatttggagatgctggtaaacgtcggaatggtggagaccgggtatttcatcttggtgacgagatagcggtttcgcaaaatacactcggtgccaagcgtgagcatttcgctcatataaaaccacggcacgatgccgctgatgagccacagcacgaacgggtagccctcgatatcgccgccgcggcgcaggccgatggcaaatgcgaaccagtaaacgaaaatcgtgacaagcggcttgatgatggcccaagaccaaccgagtgcggacgcacggtatgtgcggcgcaggtcggagcccgcaagcttaaagatctgttttcggtaatcaatgtgatcccgaacgatggtgacgatggtttcacccaccgaaggtctggtggatttgatttcaaaagatgaggccatacaggccgcacctcctttcccgcgcagcgcgcgtacctaaaaaggcattccgaaaatatggtgaataggataggcttactgcccggccttcttccagtccgcaggcagtatcgcttttgctattatacacgttttgcaggaaaaatcaaccgttttcgacacgcggcgcggcgatgcacacggcatccttgacacagcggatgacggtatcgatgccgcctgcggcgtattcgccgtctattgaccaatcaaagcccgctgcggcatgcaggcggaacgtgctcgcggaagcgaaatcgatgtgcttgtccgaaaaatcgttgtttttgagcgccagaatgaggcggtgcaggtcagggagcgtttccggcttgcgaatgagaagcatctcgagcttgccgtcgttcatatcgacgctgttttcatcgtatttcagcatgccgccgatggaaagcgagttgctgaacgcgccgaaaatgtacgcgccctcgaaaaatttgccgtctgccgtgacggtgaggggcgtggcgtcgagcgcgtggaggtccttcatgccctctaagacatacgcgaagtggcccaaaaggcgcttcatggtacgcggcgtggcgtaggagcactttgtaaataagccgaacgacgcgacataggaaaaatagccgtcgccgaatttgccggcatcaatgaggcggtcttctgtttccgtaaagctcttatagggatctaaaagatgcttttgaatgccgagcgtctgggcaaaatcgtttgtggtaccggcgggcagatatgtgatgggcgtgcgcagcgcgcggtgcagcatgccgtttaagacggcgtttaatgtgccgtcgccgccgagcacgacgacgcgggcatagtcgttttctgcgagctttgcggtgtagccgcttccgttttccgtttcggtcgtttcaaagcggtcaacggcggcgccgttttccttcagccacgcttcaagcttatcggcggtatgctcgccgccgatgcggcccgaaacgggattgacgatcattaaaatgtgcgcgccgcgtaccggctcgtattccaaatttttatccatttctctcaccctttacgcacaaatttattcataaacattatacgcaaatacgggggaaaaacggtgaacaaaatttgaatttaggacacacaaacatagaaaaaacgccgccatacgggaaaaagtcgtacagcggcgcttatgtgtctattcggtttaaaatcagcccttgagctctacgcggcggattttgccgctgatggtcttcggcagctcgtcgcggaactcaacgatacgcgggtatttgtacggtgcggtgttcgtcttgacgtaggtctgaatctcttttttcagcgcttctgtgccctgcgtgccctttgtgagcacgatggacgccttgacgacctgcccgcgaatgggatccggagcgctggtgacggcacattcgagcacatacggcagctccatgatgacggattcgatctcgaacggcccgatgcggtaaccggacgacttgatgacatcgtctgttctgccgacatagaagaagtagccgtcttcgtcgcgccatgcggtgtcgccggtgtgatacacgccgccgctccacgcttcgcgggtcttctcttcgtcgcggtaatagcccatgaagaggccgcagggcgtgtgcttatcggtacggatgacgatctcgcccgtttcgccgaccggcgcaggcgtgccgtccggcagaatgaggtcgacatcgtaaagcgggctcgggatgcccatggagccgcttttcggcacggagccgaccgggttgtaaatggaaagcgtggtctccgtctggccgaagccctcataaatggaaaggccggtggcgcgcttccattgctcgtagacttcggggttcagggcttcgcctgccgtggtgctgtactcgatggaggaaaggtcatatttggagagatcttccttaatgaagaagcggtacatagtgggcggcgcgcagaacgtggtgatgttgtactgcttgaacataggcaagatgtcgtgtgcatcgaacttatcaaaatcataggtaaaaatgggcgcttcacacatccactggccgtagagcttgccccacagcgccttgccccagccggtatccgaaatggtgaagtgcagcccctccgggttgacgttgtgccagtatttggcagtgatgtagtgtccgagcgcgtatttatagttgtgctccgcgatcttcgggtagcccgtggtgccggaggtgaagaacatgagcatggggtcactgccgcaggcggtgtcctctgtacgctcaaacacatcgctctgcttttcaacctcggcgtcaaaatcgagccagccctcgcgtgcgccgtttgccatcatcaaaaattcgacggtgccgcagtttttggcggcgcgcagggcttcatctgcgacctgaccgtccggcgtgcagacgagcgcgcgcacgcctgcggccttgaagcggtaatcgaggtcgtgctccattaaaaggttcgtcgccgggatgacgacggcgccgagtttatgcagcgccaaaatggcgaaccagaactggtagtggcgctttaagatgagcatgactctatcgccgcgcttaatgccgagggacttgaagtagtttgccgtcttattcgacatgcgcttcatatcattaaacgtgaagcgcttttcctcgtggtgcttggagacccagagcatcgcaagcttatccggctctttttccgccattttatcgacgatgtcgaacgcgaagttaaacttttcctcgttcatgaaatcgatggattttaagatgccgttttcgtcaagctcggtgtgcacgaacgggcttgcgaccgtttcgtggtcggcacggtcctgtttggccttgatgagcgcctcgaacgtgtccttttcgggctttttctccttctgcgggcgcatgacgacggcgtagagggtacattcctcgccgccgacggcgatcataccgtggggcgtgccgctgttgtagtaaatggaatcaccctcgccgagttcttcgatgtgcgagccgatctgcacgcgcattttgcccttgatgacgatgtccatttcctgcccctgatgggtggaaagcttgatcgcaaccttctgctccgcctcgttatacggcatggtgacaaaaaagggctctgccgttttgcccttaaagagcggggcaagatttaaatacttaaagccctgacggcgcgtaatgggcaggccctcgccgcggcgggtgacggtatatgtggaaagtcgcgggcttgtgcccttgatgagatcggtggggtcgataccgaagcgctctgcacatttaaaaataaacgtgaagctgaaatcatgctcgccgctttcaaagccgcggtattcctccagcgtgacgccggtgcgctgcgccatttcttcttcggaaaggccgatgatctcgcgcatggtgcgaatgcgctccgccacctctgcgagctgtgctttcaggtctgttttttccgttacgggggtttgtgcttcatttgccaatttcttcattcctttcgttttggtatggctatatcgatagttttgttgtttttcatgcaaaaaactccgtctcaaatcgctttgagacggagttgatccgcggtaccactcaaattgcctgaaaaggccactcacgggctcccatgaagccctatgcactgacgcagcatggcgcggaaagccctactcgggttcactttggggctttccgctcggaagggattgtgacagggcttttcgtatcggcttacacccgccgccgactctctgaaacgggaaagcccgcactgtcttcgtcatcgcttttatattttctctgtattatatgaggtatatctgaaaagacaaaacttgtttttagatatattcttatcttatctggttttcatttcaatgtcaattgttttttcaaaaatttcaaaaagcttcacacttttgcggtctcacgcacttcgcgcataacttactccttcaaaacgtgaaataaataataaaagccggataaatacaggcattgcagcccgcattttatccggctttctgtttcgtgtgaacgggtcgccctccgataaacatttaaccgtttatctttgaactaccttattttaataaaatgaaaatatcaatgacactttacgcgcgatgtgcggcttctacggcgtcagcggcgttatcgagaaggccgtcacccatgagctcgatggcaccgcgatcgcacagggaggcgatctgcgagtcaagcgggagcttatcgagcaccttgaggtcgtactttgccgcgacctcgtcgatgtggctttcgccgtaaaccttgaacggctcaccgcagcacgggcacttgacatagctgtaattttcgatgaggccgagcacgggcacgttcatcatttttgccatttcgaccgctttggagacgatcatggagacgagctcctgcggggaggtaacgatgatgatgccgtcgagcggaatggactggaacaccgtgagcggtgcgtcgccggttccggggggcaggtcaacaaacatgtaatcgacttcattccagatgacgtcgctccagaactgcttgatgacaccggcgatgaccgggccgcgccagacgaccggggaggtctcatccggcagaagctcgttgatgctcatggtctcgatgccagtctttgtgttgaccgggaacaggccgtcatcgctgcccatggccttttcgtggatgccgaagcacttcgggatagacggaccagtgatgtcggcgtcgagaatggcggttttaaagccgcggcgctgcatggtaacagccaacatagaggtgacaaggcttttacctacgccgcctttgccgctgacaacgccgatgacctttttgacattgctcatcttattcatgggcgcaagaaagctttccggactctggcgggaaggacattcctcgccgcagctggagcagtcgtgcgtacaattttcgctcattgctgatacttcctctcaaaaataatgtcttttttcgtttgtgcggtaagctattccaccgcatcaaacaggatatttcggtctttttattctaccctgttctttcgcttttgtcaagattttgacaagccatggaactgcacagttaagctattcgtgcgtatcgttcgcaacggtgggcgttaaaaacgacagaagaaacgcgagcgccaaaatgccgcaggaaataaacatggtttttgggaatgaaaaattttcccgtacctcggttttcgatttcaagatacgggaaattttaatttcaggcttcgtcaaataatttttcaaagcgaacagcggcggtgtgcgggtctttcatgccctcaaacacgttttccgcgttgaacttttctttgaggtaatgatcggcctccagcgtgaaccagcctttgtaaccgatctctttgagcgcggcggcgatgggcgcgaaatcaatggacatggagaacgggatctggtgggaatcgtgccaacggtcgttatcgtgaatgtgaagcgcctgcaggcggtggcccagcgcacggatcatgttcgccgcgcctgaaccggagccgcgcatttccgcgtggccgatatcgaggcatgcgacgagatacgggtcatttacggcgtcgatatgctcgatgaagctctctgaggtggcgcatgccgcaaagcaggactcgtctttcgcatcatcccagttccacatgttttctgtggcaatcttcacgccgcagtccttcgcaaacggcaacagttcaaggtacatttcggcattttctgcggcggatttgtcgttatccgggtgaatgatacagatcttgccgccggcttctgccgtgcattcaatcgcgcgcttgaaatacgagcgaatctccgggcaggatgtcgggaacggcgcgtgcgactggttgcaggtgatgccgttatcgaggccgatctgcttcagcttgcgcgcaaacgcgagataattttccccggcaagcggatgtgttgtggggcggactgcgccgagtcgccaatcgtaatcgcacatggcaaacatggaaaaatcccaggcgtcaaacccggcttttgcgacatattccacggctttttcttcgccgaccagaacggacgcggtttcgatttgtgtggatgttctcatgaaaactcctcccttttatcgccattatagagccgaaaaaggggcttgtcaagccagtctttcggcgtttggtttgtggaaaaagccgaaagcactgtacaaaacgacacaaaaacgaccgcccgatttagaaccgagcagccgttcatagagtttgcttaataattttccgcgtggacctcaaaatagctctgcggatggttgcagaccggacatacctccggcgctttgacgccgacgcagatatgaccgcagttgcggcactcccacacttttacctcgctcttttcaaaaacatgtgcagtctctaaatttttgagcagcgcacggtagcgctcttcgtggtgcttttcgatctcgccaaccattctgaattttgcggcaagctccgggaaaccttcctcttcggcggtttttgcaaaaccctcatacatatcggtccactcgtagttttcgccgtccgcagcggccccgagatttgctgttgtatcgccgatgcccatgagctccttgaaccacatttttgcgtgttctttttcgttatcggctgtcttcaggaagagtgcagctatctgctcgtagccctcttttttcgcgacagatgcgaaaaaggtgtacttatttctcgcccgcgactcgccggagaatgcctcttgcagatttttctcggttttggtgcctgtatacttgtttgccat

SEQ ID NO: 140 - DNA, 19741 bp, unidentified
  source 1..19741: mol_type = unassigned DNA
atgaaagtagtaattctggctggcggccttggcacgcgcatcagcgaagaaagcgtctacaagcccaagccgatgatcgaaatcggcaacatgcccatcctgtggcatatcatgaaggaatattcctactacggctttcacgattttgtcatctgcgcgggctacaagcagcacatgatcaaggagtggttcgcggattacttcctgcataccagcgatattacgtttgattttacccgcggccagaacgagatgatcgtccacaaccaccacaccgagccgtggaaggtcaccgttgtggacaccggcctcaacacgatgaccggtgggcgcatcaaacgcattcgtccctacatcggcaatgagaccttcatgatgacctacggtgacggcgtctgcgatgtggacattgccaagctggtggcattccaccgcgagaacggcaagatcgccacgctgaccgccgttcagcaggagcagcagaagggtgttctggatattgccgaggataattctgtccgttctttccgtgaaaagaaggccagcgacggcgcgcttatcaacgcgggctatatggtgctggagccgcagattttcgactatctggacggcgacgcctgcgtctttgagcagaagccgctgcagaagctggccgaggagggtcagctgatgagctatatccacaagggcttctggcagtgcatggacaccgcccgcgagaagcaggtcctggagaaaatgcttgccaccggcaacgcgccctggaagaagtgggaggattgatgatggtacattacgatcctgaattttaccgcggcaagcgggtgttcgtcaccggtcacaccggcttcaagggcagctggctctgcaagatgctgctgatggccggggccgaggtcacgggctacagcctgcagccgccgacgcagccgaaccttttctccatcgccggcgtcgagggcaagatgcacagcgtcatcggcgacatccgcgactttgacgcgctgaaggccgcttttgacgcggcgcagcccgacattgtgctgcacctggccgcgcagcccatcgtgcgcgacagctacaaggacccgcgctacacctatgagacgaacgttatgggtacggtcaacctgctggaatgtgtgcggctggcccagcagcagggcagagcgccccgctcggtgctgaacgtcaccaccgacaaggtctaccacaacaacgagtgggcctggggctaccgcgagaacgagccgctggacggtttcgacccctactccaacagcaagagctgctcggagttggcgacgcactcctacatcaacagcttttttgccgataagaccgtggccgtctcgacggcccgcgcgggcaatgtcatcggcggcggcgactttgccaatgaccgcatcatccccgactgcgtccgcgccatggccgcgggccgtaagatcggcgtgcgcaacccctactcgacccgcccgtaccagcatgtgctggagccgctggcggcctacctgctaatcgcccagcgccagtacgaggacagccgctttgcgggctactataacgtaggccccgacgactgcgactgcgtcaccaccggcacgctggtggatctgttctgccgggcctggggcggcgacgccgcctgggagaatcaggccgaggccaatgccccgcacgaggccaacttcctgaagctggactgcagcaagctgaaaacgaccttcggctggacgccgcgctggcacatggccgagtgcatggaaaagaccgtcgccttcagcaagatctggcttgccaacggcgatgtcccggcggagatggaaaaggaaattaacagcttcttggaggggcagaaatgacaaaggaacagaggagtataacaagcgcttttgtcatttcggttttggtaggtggagcctatctggtttcctggctggcgcatgtatggggtggtcagccgtggcccatcggcagcaacatggtcaactatgccgtagttctagtactgttcggcgtttcgcttttgctgttcggcaacctttttgcccgcattctgccgcaagaacgtggctttgtgcgggcttgtgacgcgcgtctgcagggtcgcggcgcggcagcggcccttgtggtatctgcgctggtgacagccgcctaccttatttattacgcgaacattggggtgtccaaggaatttgcggggccttcctattcgccgtcctccctgatggcgccgcagatggtgccgctgtattacctgcttacggtgctgttttttgtggcggcaatctatctgctgctgacgggtaaggactgcccgcagtggatggcctggggcggctacggcctttcggcagtgatgtacttcttgggcgtatggatcgtcaatacgtttgagggagacccgtaccacggtgaggcgtatttggaaagcatctacaacgtggctgacagcatcccctatgaggagttgacgacaggcatctacggccactacggactgttctttctgctgccgatgaagatcttcggtgcaaaggctgtcgttattcaattcctgatcgcgctggtcggcgttgtgacggatctggccatgctgtactgcatccatcacctgataaaaaagaactgggtacgcctgttgatggcactggttgtgccggtcattccgtttgcatacagacggacgaattactggcagctgcagcctcaccgtttggtattcccgatgttgctggcggcctatatgctgttctgtttgcgaaaaaagcagtcgaaaaaaacggctcggttctggggcggctggcttctgtgcatgctggcagtgctgtggagcaccgagagtggtctgttctgtatcatcggctggtgcgcgggctgcatcgtccgctggtggcagcaggagccatggtacgcccgcggccagtgggaacgctatggtgcgctgctgctgggcgctgtgttggcggtgctgggggccattggcctgacaaatttgtataacctggcctgcggcggagcaccgatcttcaaggtgtttttttacccgctgtacagcagcaattatatggatggttccatcggctacccgcttgagctaggcgtgcgcccatgggtgtttgtgctgctgcttatgctggccgtgctggcatggtcgctgttccagacaaccgctatcggaagaatagccaaaacggagaacattgccccatttgcggcctgcctgtcggtgctggggctggtatcgttcagctactatgcaaaccgttctgcctggatgaatctggagatctgcctgccggaggcactgctctgcctgtgcttcccgctgcaggcgctgacggacggggaggggctacgcaagaagctgggcggcctgtactgcacggcggcacagtctgtgggactggccgtgctgctggtgctctgcgtgcttacggcacagctgcccggcggcgtgatgaatacagtgatcctgcaggagcgcggtgcgttcagcacacgcggcatctatgcggaggtggagaatttctctgccaatataccggacaacacctttgcggttggccgcgatgtggggatcatctaccatgcagcaggctgggacaactacggacattatgtggatgctgcggattacggcgtggcagataccgaaaaattactccctcatattctggcagagttgaaggcccagccgagctttgtcgtggatgacatactgggggtctatctggggcagaatggctacacgcccgacatgctcggataccagctgcagacgaccttcacatcggctggcggcacgaacccaattacctattactactacgaaaagcaataaaaaaggagagcaaaacctatggcatggaagaacgaggcagaagcccgcgagcagatcaaggcgatggtcgccgagtattatcacgacttcaaggagaaaaagaccccctatcaggagggtgatcgcatcacctacgcagcccgcgtctttgacgagaaggagatgtgcgctctgaccgatgccacgctggacttctggctgacgacgggccgctttgccgaccagttcgaaaaggaatttgccaagtggatcggcgttaagttcgcccatctggtcaacagcggttcctccgccaacctgatcgccttcatggcgctgaccgcccccgagctaggtgaccgccagatcaggaagggcgacgagatcatcaccgtggcctgcggcttccccaccaccgtgaccccggccatccagtacggcgcggtgcccgtgtttgtggatgtgaccgtgccccagtacaacatcgacgtcaccaagctcgaggccgccctctcccccaagacgaaggctgtcatgatcgcccacacactgggcaatccgtttgacctgtccgccgtcaaggcgttctgtgacgcccacaacctgtggctggtcgaggacaactgcgacgcgctgggcacccagtacaccatcaacggcgagacccgctttaccggtacctggggcgacatcggcacgtccagcttctacccgccgcaccacatgacaatgggcgagggcggctgcgtttacaccaacaacccgctgctgaaccgcctgatcctctccttccgcgactggggccgcgactgcatctgcccctccggccaggataacttctgcggccaccgctttgacggtcagttcggcgagctgcccaagggctacgaccacaagtacgtctacagccactttggctataacctcaaggtcaccgatatgcaggccgccatcggctgcgagcagctgaagaagttccccaccttcatcgagcgccgccgccacaactgggaccgtctgcgcgccgcgctggaacccgccgccgacaagctgatcctgccggagccggctgccaacagccgcccgtcctggttcggcttcctgatctctgtcaagccggagagtggtctgaaccgcaacgccgtgacccgctatgtggagagccacaacgtgcagacccgtctgctgttcagcggcaacctcatcaagcacccctgctttgaccagatccgcggcaccgacgcctaccgcgtggcgggcgagctgaccaacaccgactttatcatgaacaacaccttctgggtcggcgtttaccccggcatgaccgacgagatgatcgactacatggccaagacaattatcgaggctgtgaatcagtaaaattttgacaacgaggtacagacccctatgatgcagcaaaaggtgaaaacgacccgcgcacccagactgcggttggacaaaaacaggcggctgacgcctatgcagatctactgctgggcaacggtggcctgtctggcggtgctgctgcttgccctgctggccagccgcggtacgctgctgcatcgattcttcttttatgatgtcaccgataccggtatggactttttccatagtattgagtatatgcgtggacgtatgccctacggacagttcgatacgctgtacccgccgcttgcaaatctgtttttctatgtgttgtatttgcttgtgccaaagacacaatcagctacgtggacggaatcgtatatctcgtctctcaacatgaggggaacagaacgggatttgcgtttacagcaagcgacgatgatgctgtttgtcgtctttgttatcgtggtggtcttaggaattgtatcgatgacagaacgcctgacgcgcagctgcggggggcggaaaaagctgctggcattctgtgcagtgttcagctatggggtactgtacggcttggaacgcggcaatattctgctgctgtgctggccgttaatggcattttttatcctgtaccgcaattcagaaaaaccacttttgcgggagctggcctgtctggcactggcgattgccgccggtttcaagctgtacccggcgtttctgggcgtgctgctgctgcgcgataaaaactatctggccgcggtgcgcacggtgctgtacggtgttgtctgcctgtgcttcccgctgttcttcttcaatgaaggattgtttggcctcacactgtggttccgtgtactgtttgattttagcggcagcagaggtgaaccgtggatcggcaatggtttctccaacattttggcagaggccggacatgcggtggacaagctgctgggcacgcagctgggctatggcagctacgcactgctgggcattgtgctggcagcggtgctgctggtgtgcagcttttttatggataaggagtggaaacgcattacagcaatcattctggcgatgctgatgttccagccccagtatgattatgtatggtgcctgtttttgattccgctgttcctgtttatggagcaggagcgtgagctgcgcagggacaacgtgctgccctatctggccttgatggtgccggtgctgccgctgccgctgtttcggcgggaccagatggagccgtcctttgtaccgcgcaacacgatttgtcatgtcatgctgctgctgctcattgtctggtgctttgtccaggcagtgcagggggtgcgtgtacgctgtgcggaaaaaccggtcaagccggcacacggacacccggcagccacggtgctgctggccgtttgtgtggcggtggccggtgtgggcggccagcagctgtggcagcgcacccacaactggggctttgactatggctacaacggccgactggatgccgaggacatccagcagaaggacgtgcaggacagcgacggcaacccgatagaggtaacatggagcggccgcggtgcgtatattatgatttacaaccacgcgccatttacgcaaaggatggtggtcacgttccagacaggctacggcatggatttgaagcgcgcctatacgatgacgtttgaagcaccgaatctggaagatgctgatggtacaaccggaaagcagaagcagacgaatattaagattgaccatgaggggcagaccgtgtgctacacggtagatgtggcccccggccagacccaaattgatgtgagctatgacggcccgatggcggtctatgatgcttcttcgcgcaaaaacggtaccttcacggtgacaaacctagtggtggccagtgagggcgctgtggaggaaaccgaataacggaaggaaacatatactatgcagaaattgctggccctgctgggcgcaaaaaataaagaggaatttgtggagctgttcaagcagttcgtcaagttcggcctggtgggcgtaagcaatacggctgtgtccatggcggtctactatatcttcctgtggatcagcccggacctgtatatggtcggcagcattctgggcacgattctgagcattgccaacgcctttttctggaatgataaatttgtctttaccggcaacgccaatgactggcgcagcaagctcaagcggctgggtaagacctatgtcagttacggcggcacatcgattttgtccaacgtgctgctctggatcgaagttgcattcttcagtgtcagcaagtccattgcgcccatcgttaatctgttagtgacgatcccgctgaactttgttatcaacaagctgtggacatttaaggaaaagtgagaacaagcacgatgcaattagtaatggaaaaaccacatacgaataagcgccagaacgcgcgaggctgggtattggctgcactgctttgtgtggtgattctggcctattcctcaatttatttcgccaacacgatgcccattacggaaggctggaatgtaaactatgcagagctggtattgcacgggaaatttccataccgcgatttttactattacctgccgccactgaacatcctgattgatgtgatgctctggaagctgtcgtttggcagcctgttcatttaccgtgcgtggtggctggtacagcggattgctatttatgagttgatgtttcggctgctctgccggtatttcaatagatatgccgcctttgcagcgtgtgccttctctgcgattctgtgcacggcctctgtctacgatttattcggtgattataaccagacgattccgtttttgtctgtgttgctgctctattgtgttctgggatttgcagaggcggcagataagaaagccgccgggaaatacctgtttgctgccggcgctatgctggggctgctctttctgaacaagcagacgatttttgcagctgcgggggttatttatctgctggctttgagtgtctactgctggaagaaaaaagacaaaggctttctgcaatattgtgcggcagtcatacttggctttttgctggtgttcgtcgtggccatgggaatccttgccgtcaatggcgcgttgcttccgttctttcagcaggtctttatgcacacgggaggcaaaggcagtccgcttgccattttgctgaaaatctttacgggctggacaatcaatgcgccggtatttttactgatggtggggtgtgtagctgccataacactggcgcagaaaaacgagagtcagacagcaggacggatgctcttgctgctggtcataggcggcggctatgttttggaaaggcaggctgcgaacgactttatcgaagtgctcgttggtacgaaaagcgtccaagccgttgtcatcggtggagggttgctactgttgctggcgtacagccaaaagcgcagaagcggcagcaagataatgcacgatgtattttacggtctgtgtgccgcctatgtggtgactattctggttacggcccgttatgcgtcattaggcgaagataacgggagcttattggaagcaatctatgaatcaggcacgctgtttaagagtgtgactggtacgctgtatacgatcatcagctttttggatctatatctgattgcccgctcccttatgaaaataaaagcggatggcaatgacggctatgcacgtgagcacttttggatggcctgtgcggcattttctacgatatatgcagccagtatggcatcggcatcagaaatttcctaccatgggattatgttggctatgccgtttgttctgtgtgttgggctgaacagcgtatttacagataaagttacggaaaaatcggtcaaaatcggtacgattgcgctgtgcacagtactttcgatggcttgtattgcacagaaggtcgtatgttcctattcttggtggggctgtgaacaggcagagtatgacaaaaaaatctacgccaccggcatccccgcgctgcgaggcttccgtttttctgcggaggacgacaagatgttgaaagacatcacacagctgattcttgaaaacacaacagaagatacaacgatttttggctatccctatgtaaagctctttaatattctgacaaaccgctatacaatggatacgtttgttccggttctgttctatgacgtggtagacgaccagtacgttttgcaggaggacgagctgctacaggaaaatctgcctgacattgtaatctggaaggatgatgttccaaactgcaagaaggttcacgaagaaagttaccgcaatggtgagaaattgaagcagcgcgagctggaaaagaattttggacgactgctgggcacacgctacaccctgttgggcgtgtatggtgaggaaagaaccggtaagatcaaggtgtacaagctggcagacgagacagactggggtagcttcaccttggaaggaaagggaaccgaggaagagccgtatctgattcagtcggcggaggatttgcaggcgttcagcaattatgtcaaccgcggcatgagctttgcagatcagtatgttgaacagaccgctgacattgatatggacggtaaaaaatttacgcccattggtgcattcagcggggaaagctatttttacggcacctacaatggcaagggacatattatccgcaatctgagcattcagggcaaggctacagaggatgtcggtctgtttggacgtctcgaaggggctgtttacaatctggggcttgaagcgggcagcctgactggcgactgtgttggagcaattgccagctatgcagtcaacccggaggcagagattatgaactgctttacggatgtgaatgtcacgagctcgcgcgctggtggcattaccgataacttcgctggtagtgttgtaaactgtgttagtgccggtgcgctgactggtggcgaaaacgcggatgcaatcgcctataatagctcaattatggtagagaatgtttatcagctgacgggtcaaaagacaagcctgcttgatagacccgctattcaagaaaagcgtgtcagctatgccgacgaagatgttttcaacagtgatttcctggtgaagcgtctgaatgccgcagtaagagaaaagaataaagcaaacagcgagagcggcgcagaagaagcgattacgcttgtcgaatggacaaagggaacggacggccacccggtattggttcctgaaaattgactgaatggaaaaggagcaacccaatgaaacagcgtttagcggattatgtggcggactttctggcggcgcgcggcgtgacggatgttttctccgtcgtgggcggcggcgctatgcacctgaatgatgcgctgggccataacccccggctgcatgtgacctacaaccaccatgagcaggcctgcgccattgcggcggaagcctacgcccggctggaaaataagatcgcggcggtctgcgtgaccaccggccccggcggcaccaacgcgctgaccggcgtcgtgggcggctggctggactccatccccatgttcatcgtctccggccaggtgcgctatgacaccacggcccggtacgccttgcagtacaccggcacgccgctgcgcgccatgggcgaccaggagtacgacatcaccaagtccgtccagtacatgacgaagttcgccgccatgctggaggaccccaaggacattcgctacctgctggaaaaggcgtggcatctggctacaacgggccgccccggcccggtctggctggacatcccggtcaacttccagggcggctacatcgagactgacgagctgcgcggctacgaccccgccgaggatgacgcccagctgcccccgccggtggacgacaccacgatccggacgattctggaaaaaatcaagaacgccaaacggccagtgttccacgcgggctatggcatccgcctgtccggcgggtatgcggcgttccgctccgtggcggaaaagctcaacatccccatcgtcacctactggaacgccgtggacctcatcgaggatgacaatccgctgtactgcggacgcgccggcaacatgggtgaccgcccgggcaactgggctattcaaaacgcagacttgattctggccgtaggtacgcgcatttctatccgccaggtcggctacaactggaagacctgggcccgcgcggcagaggtcatcatggtggacattgaccaggccgagctgaaaaagccgaccctgcacgtcgaaatgccagtctgggccgacgcgaaggactttttgaccaagctggataaggtcgccgaggcccccgtgaacgcgggcggcgagtggctggccacctgccagcgctggaaacgtgactaccccgccgtgttgccccgccagtgggaggaaaacggcgagaccgccaacgtctacgcctttgtgcgctatttaagcagtcgcctgccggagaacagcctgaccgcggtctccaacggtgcgtgctgtgtcgtcggtaaccaggcgtatgtcatccagaagggcagccggatggcaaacaacagtgccattgccagcatgggctacggtctgcccgcagccattggcacctgcatcggcggcggacgccgccagacgatctgcctcgagggcgacggctccatcatgatgaacctgcaggaactgcagaccattctgacgaacaagctgcctatcaaaatcttcctcatcaacaacaacggttaccactctatccgcctgacgcagaacaaccttttcaaggagcactgcaaggtcggcatcggccccgagagcggcgacctgtccttcccggagtttgaaaagctcgcaaaggcgtttggctacccctactacagcgcccacagcaacgccgagatgaagcaggccgtggacacggtgctggcactggacggcccggctttctgcgagattttcaccgacacgaaacaggtctgggagcccaagagcagcaccaagcgcctgcccgacggcacgctggtcagccccccgttggaggacttggcccccttcctgccgcgtgaggagctggaaaagcagatgttcatcccgctgatgccggaagtgtaaggaagtgcgtgattcaaaaatggcaagcattcaaagacaaatccacaccgccatcatcaccggtcctacgggggcaatcgggatggcgctgtgtgcaaagctgctggcggagggtgtgacggtctacgcggtcacccacccgggcagtgcgcgggcggcgctgctgccgcaggacgcgcggctgcatgtggtgccctgtgatgcggcggagctggccgcgctgccggagctgatcccggaaaaggccgatgcgttcttccactttgcgtgggcgcacacgatcggcccgggccgcaacgacatgccggcgcagatcgagaacatccgctacaccattgcggcctgccgcgccgcggcgcagctgggctgccaggtctttatcggggctggcagccaggccgagtatggccgcgtggagggtgtgctgaccgcgcagaccccctgcttcccggagaacggctacggcatggccaagctgtgcgccggccagatgagccgcgtcgagtgccagaggctgggcgtggcccacatctggacgcgcattttgagcgtctacggcccgcacgacggtccggccacgatgatcagcggaaccatccgtaagctgctgcacggcgagaaacccgctctgaccgcgggcatccagcagtgggactacctgtacgccgccgacgcggcagctgcgttctacgcgctggccgtcagcggacaggacggcagggtctacccgctgggcagcggcacggcccgcccgctgaaggactacatcgaggcgctgcgcgacgccatcgacccggtgctgccgctgggcttgggggaggtcccctacggcccgctgcaggtcatgcacctgcaggcggacacgtcggccttacaggaggacaccggctggcggcccgcgaccccgtttgaagaaggaatccgcgaaaccattgagtgggtaaggaaagagacaaaatgagtgagaaaaagacgatttcggtaatgatcccctgctacaacgaggagcagaatgcccgccccatctatgaggctgtgcgcgatgagctggtcaagagctgcccgaactacgactatgagattttgttcatcgacaataagagcgaggacggcacccgtgccatcatccggcagatctgcgccgaggacaagcacgtcaaggccatcttcaacgtcaagaacttcggccagttcaacagcccgtactacggcatgatccacacctccggcgattgcacgatcacgatgtgcgccgacttccaggaccctgtggagatgatccccaggtttgtggccgagtgggaaaagggctacaaaatcgtcattggccgcaagacccagagcaaggaaaacccggtcatgtactggctgcgcggctgctactacaagctcatcaagaagatgagcagctgcgagcagatcgagcagttcaccggctttggcctgtacgacaagagctttatccagacgctgcgcaacctgaaggacccgacgcccttcatccgcggcattgtggccgagctgggccccgagcgcaaggaaatcgagtacacccagccccagcgccgcgcgggcaagacccacaacaactggtacagcctgtacgacgccgctatgctgagctttaccagctacaccaaggccggtatgcgcattgcaacgttcgcgggcttcctggtggcggggctgagctttctggtcggcctgttctatctgattgctaagctgctgttctggcagagcttccgcgccgggtacgcgccgacgatgatcgccatcttctttatgggcggtattcagctggcgttcctgggctttttgggtgagtacgtcatggctatgaacactcgcatcatgaaccgcccgctcgttgtggaggaagaacgcctcaactttgggccggacgaccagtgaccggcatgaagcaggagtttggttatttcctgaaaaacgcgaaattccgcgcggcgctggggctgaccctgctgctcagctacggctatgccatcgccacgacacgggtcagcattgactcgctggaaggggaccgctacatcggcacgggcggcgttatgctgtccaccggacggttcggcatgaacctctgggccgcggtgctgggctacggcagggccgagccgagttatgcctttggcattgacctgctggcggcgctgctgctggcgctggcggcggtgagcttctgtgcgctgctgcgcaaggccgcacaggatcgcatcagcatgttcggctatggactgtttgcctgcctgtttgtctcctacccgctgatgaatgaaatttgggagtacagcggcgcgaatgtctgcgtctgcggcggctatttgctggatgccgctgcgctgaatctgctgtgggacgcgcgccagcccggcgtgccgtggcgcggcagggctctgcgcatgggcgcggcggcgctctgcctgatggtggtctgctcgtcctatgagtcactggcggcggtgtttgtgctggctgtctttgcgcttttaacgctggagcagctgttggccgccgagcgcccgcggcttgcggcggtcctgaccgagggactgtggtacgcggcggcgctggtcggcgggctctgcctgcgcgtgctggtgacgtcgggcatccatcttgtgctgccgcaggctgcggccaacggcgccaccgaaattttgtgggcgttctacccatttgtctatcttgcaaagctgcttgtcaagagcattctgattaactacgcactgcgcggctgcttctacctgcccattgctgaattggcggtggcggcgcttgtatttatcgtactggttatcgcgcttgctgtgcgcaaaaagcggcctttgctgctgctcaccggtgcgggaatcctgctctcactggtgctgctgtcgtttgtgcaggggaagtgctcgccctaccgcacctgtcaggtgtttgcgctgtttgtggcgctggcggggctggccgtgtatgagctgctgcgccgcgctgcggcccggcgggctgtgctgctgggcagcgtgcagctgctggcggtgctgctctgtctgcaccaggccatgtacctgaaccatctgctggccgtcgattaccagcgttccgagcaggaggccgctgtggtgcgcactctgggcaccgagcttgtgcgcgactacggcaccgacaagcccgtggtgctggtgggccgttacacgctgggggagaatatcacccggtacacgacggctgacccgatgcagcacccgctgtaccgctttttccgtgagcacacgagctgggagagcggcgacaccgtcaagtacgtcgagaccaactgcaactcggtgctggactggtcggtcacggccttctccgaggtggacgacgtctacggccaggcagcggagcacctgttccgctactatggctttgctttggacatgacccacagcgctgccctgcatgagcaggcgcagacctacgccgacgcccacgacctgccgggatacccccgggcgggggcgattgtcgattgcggggactatgtgctggtaaatctgcaataagaataccgcggaaaagtttgcgcttctccgcggtttttgctttctttctgtattttgccgatgttttcagccggtcacagtctcaaagggcttcgtcaggtgcccgttcctgtcggcctcgcaggcgcggcgggcctacttcaaaaactccaccaaaaacgccactgtcgtctcccgcagcgctttgtccagcgcggcggcggtggcggcgtcctcggatagatagttgtggttcccttcggcaaacggctccagcacgaccctgccgtcgggcaggctctcgacggcggcgatcgtctcggcctgggtcgtgtcgctcaaaatgccctcatggccggtgtaggtcaaaagcgtcggcagggcgctctcccgcagggcggcgttcgggtcggaatcgcgcatctcggtgaacagcgttccgctgacatcgacgccccaggtgctgatgctgccgctcgcctcggcctcagcggccagcgcttccacggcggaaaagtcgtcgatgttcaaaaactccatgccgcgcaggcccgcgccgttggcggggctccacagcgccagcgccgtgatgccgcccctgcgctgcgggtagaggctggccagccgtccgcccatgctatggcccaccagcgcggtgcggcctgtgccgtaggtctgctgcatgtaggtgatggcgctctcgacgtcgtcggtcatgttggacagcgtgtaggccgtgaacggctcggtgctgttgccgcagccgggaaaatccagccgcaccgtcgcaatgccctgggcggccagatcggccggtaaagccgtggcagagcacgacgagcggcagctccgccccgcgggccagcttgccgggcagctgtaccgtggcgtaaatgtccccgcgcgtgccgggtatggtgacgtcctgcgctttcggtgcgggcgtcagcagaaaaagcgatgccgccacgcagagcgccagcgcggcaatgcagcctgcaagggtataaaaagcgcgtttatgcgtttgtttgtgcatagaattacctccgtaatgcctctattaaagcctatgcggggcaaaaagtcaagacgcacagaatacacacaaaaaaacaggtgacaaacccggggcggatgtggtatactaaagattacaaattggttaaaaagtcagacccggggcgcaggcgcagccttgccccggcttttgtcctgttttaccggaggtgcttgactacgaattctatagcgaaccgtatgccccgcctgctggcgatgctgtttgtgctgctggggctgttctgcgcggcggcactgcccgcccatgcggaggactacgacacggtgctgaaccgcctgtcccgcctgcaggcgctggcgcgggagtactcggccggtcaggccgacacgcccgacccgatcgagctgacgctggcctacacccgcacgggggagtacaactccacgatctggcagctgaccgccggtgtgcgcgacgccgggtttgagagctgcgtcaacagcagcgaccccgagctggcgtcgctgcagaatatgaacaccgtcgtcctgcccaacggagagagcatcgactttgggcacctgctggcgtcgatgaaccttgtctacaacggcatacccatcacgggcagctggggcggcgactgtgaggagctggccaggcagtattacggccaggccggcgatgccgcgggctacgcagaggcgatgcgcgcttcctttaatatagacgatgacggcacgctgagccgcttcagcaacggggacctgcgggcggacctcgactctgtcgtcgtcggctccaaggtaacaaaggacaccgacctggccgaggcgctgcgcagctactacgcaaatctgaccgagtatgaccgcgtcaaggagttcatctcgctgagcttcggcacggtggatacctcgagcaaggcctttgcggacgccgtgtacagcgctctgctggaggattccggtatgcagctgctgttctacatgaacggtatgtggaccgtcaagggctggcagatcaaggacgactacgcccccgccgtgcgcggcgcaacggacctgtttgccgagtacctggccaacgcggtcaaccacgagaagatcaagagcgagacgaatgaccgtctggttgccatgggcgggcaggcactggccgacgcgctggaggcgttgggcgacaccgacgccgcccaggccgcactgaccgccgccgaggagatggccaataacgcccaatcgacggtttcctccggttcggatgtggtctccgccgcgcgggagaatttgcagacaaactttaacgtgaaggtcttccagctgattttgctgattgcggcagggctggcagcgttcatgctggtgttcagcatggtgatgtttgtggtgcaccgaaaagaaaattgagtgtggactgcgtgccgctctcttgtgggaaagagagcggcacgctttttttggttgggcgcggggcaggcggggagaccgctttttctgttcacaccccgttcacattccgtatattcaccccgagttatccacggcgtataacggttatccaccgtggaaatgttgaaaactccgtggaaagcgtggaaaactctgccgcccggacccgttcaaaagcggaaaaccgggaaaatctacgtagaaaaaacgtttattttccacattttccacagcggcgctgttgaaaaccgtggaaagccggggaaaacgcgaattgcgctttttgcaacacaaaatacacattttgtaaataagggcttgcactcgccgcgcgacagcgctataataaacctaatcatcacccgcactgctgtgcggcggtgcgcttgaatataaaagggagagtgcgaaattatgttggacattaaaatcaccaaaacgacccatccgaaggaaaagccgcaggacgagtcgaagctcggcttcggcaagaagttcagcgaccacatgttcctgatggactataccgcgggcgagggctggcatgacgcccgcatcgtcccctatggcccgtgggagatggacccggctaccaccgtgttccactacgcacaggaaatttttgagggcatgaaggcctaccgcaccgcagacggcaagatccagctgttccgccccgactgcaacgcgaaccgttttaacgattccgcggaccgtctcggcatgccccccatcccgccggaggacttcgtgcaggctgtcaaggcgctggtcgatgtggaccgcgactgggtgccccactccgacggtgcgtccctgtacatccgcccgttctgcatcgctaccgatgtgggcctgggcgttcatgccgccaagcattaccgctttgccatcatctgcgcgccctccggtgcctactacgctgagggtctcgaccccgtccgcatctatgttgaggatgagtacatccgcgccgccccgggcctgaccggctttacgaagtgcggcggcaactacgccgcgtccatcaaggccggcgagctggccgaggagcgcggcttctcccaggtgctgtggctggacggcgttgagaagaagtacgtcgaggaagtcggctccatgaacatcatgttcaagatcgacggcgagatctacactgccccctgcgtgggcaccgttctgcccggcgttacccgccgctccatcatcgagctgctgaagggctggggctacaaggtgcatgaggagcgtgtcgccattgccgacatcatgaaggctgccgacgagggcaagctggaggaagtctttggcaccggcacggctgccgttgtctcccccgtcaaggagctggattgggagggcaaggttgcccacatcagcggcggccacatcggcgagctgacccagaagctgtatgacacgctgaccggcatccagtggggcaagctgcccgacaccaagggctggatcgttcctgtggaataa

SEQ ID NO: 141 - DNA, 7198 bp, unidentified
  source 1..7198: mol_type = unassigned DNA
tcaccgcttttgcgccgtaacgcaaagccagccctttttatttttgtggctttggatctgacaaaatcctgctttttccagatactttttcagtgcagtatccgtatagatggtcatgccatcgatgatctgcgtccatttgtcgtcttttgtcgtttcgccgtttgcttcgttacagatgaaaaagattccgccgggcttcagcacccgataaatctctctgaaattctgcgcaagttccggccagaagtagaccgtttcaaaggcggtcaccacatcaaactgctccgcttcaaacggcagttctgccacacttgccttttgcacggtacaccgtcctgccgcaatggcaccagcattgacctttcgcgctttttccacgctgacggctgagtagtcgatgccctgcaccttgccgttggggcacagtttcaacagcgttttaatgttcgctccaccgccgcagccgcagtccagcaccatggcatccggggcaggctgtaaaaagcgcagcccccattctgccattgcgctgtgtccaaagttcatcatagcaaccatgatcttcccgccaaagcctacgggctttcgggtgttttcaaaaaaggacataacgccaccctctttctatttaccgttcacaatgcaatgctttttaccagatgcgcccactgcaccggatgacaggccagcaattcctcgtgctgcaagttaggtaaagctaacttgcagtcttataaaaagccgcttctcagcggtccttctgccaaaataatacgccctgctgttgcctctgtcaagaagtttaggcattttcggagattccgaaaaagatttcgccttcgagggctccatccgtcaccccagtgccacatccagcaccatcatcacgctgaagcccaccgcaaaaaataccgtgccaacgttggagtgctgcccctgcgacatttccgggatcagttcctccaccaccacatacagcatggctccggcggcaaagctgagcagatagggcaacgcgggcaccacgatgcctgccgccagaatcgtcagcactgccccgatgggttctacgatgccggacagcacgccaccccagaatgcccggccttttttcattccttccgcccgcagtggcatggagatgatggcaccctccgggaagttctggatagcaatgccaagggaaagtgccagcgccccggcggcggtgatctgagccgttccggcaaggtaaccggcatagaccacgcccaccgccatgccctccgggatgttgtgcagcgtcaccgccagaaccatcatggtggtgcgctggagctggctttttggcccttcggcctgcaaactgttctggtgcagatgcgggatgagatggtccagcagcagcaaaaacaggatacccagccagaaacccaccgccgccgggaaaaacgccagcctgcccagatctgcggcctgctccatagccgggatcagcaagctccataccgatgccgccaccatcactccggcggcaaagccggtgagggcgcgctggatgccgtcacacagagagtttttcaaaaagaacacacagcccgccccaagacttgtgcccagaaaggggatcaaaatcccccagaatgcgtcttgtatcatgtagtacctccttgtggttaaatgaaactaaccgtgcaaacagtatactgcgctccggcaaaaaggtcaagggctttgcggtatagaggatgcagatcgtttcctgcaccaaaaaatttacctctgcaaacttgccggtttctacttgacaacgcccggtgggagtgctatttttactttgtaaatttgttttgcctaaccatctgaggggctttacccctgcatttttttgcatcgattgttaggctaagctaactgttttttcaaaactgagatagaggtgtgttaccatgagattgaaaaaagtatttgcaggtgcacttgcggccgctatgctggtatgcgctgtggcagtcccggccttcgctgcggaagaggtggaacaggaaaactgcctgacctccagctatgtccagatgaacatcccctacgccgacttctacaaggctgccggtgtggacaacgcatctgagatcgacgctgtgaccagcgccaccaagaacaagacccgtgcaggcaaccttgccggcggttcctaccacgtcaacgcagatggcaccgacatcaccggcgtttccttcccggtcaaggtgctgaccccgtgggcgctgaagaacgcaaagcaggtcaccgatgccgacagctacgacattaccgttaccctgaagggcaaggaatccaccaccacctacaccggcgcagatgccttgtttgagaacgagagctacgcttactacaagctcagtgagacacctgcctactacattaccgcatggtataacctgctgagcggcaagtgggagtttggcaaggtccacgccaccgagaccaccgtagagggcaccactgtgaagctgaataccaacggtcaccacaccacctacgagatgaagctctccggttttgatctggactacaaggccaacaaggtctacggcgtagttctgaccaccgccgatggcagtgagtacggcctgcatcatgtgaccaacatctggcatggtaccaagctgggcttcaatgccgatgatccttactttgcatccatcatcggcaagacgattactcagatcaccttctacgccgccgacggcgtgtatgtcctgccggtcaatgtggcgctgtgaatacacgggaaactgcctaatttattgtaaaatataacacaaaagggcaaggtctcctgcatgcaggcggctttgcccttttttattgcagatggagcccaatcgcatggtcaacagtttttacgtctgcaatacggaatcaatattgccggcattactctgcaaatcacaaaaggatccatccaacagcgttttggcgatgctggcaggctccacgcccaatgcatggctgcctctgccacggtggccgaggactcgttcagcacaatgacatggtctcccagacctttttcttccagatctgcttttgctttttcaaaggacattttcccacttctccgctcttattcggtaatggcccagacccgtgcaggcaggccggttgcaccttcaatgcggggataagaaacaatgaccaccgcgccggcaggctgtactttatccagatttgcaagcacttccacctgcagcttgtcgttgtccagaacatagcgctcgcaggcaagatcacccttttcctccgccaccgcagaggaatcggtatccagcgtttcgtggccgttggcggcggcgttgcgcaccttgtagatatactccaatgcttccagcgaccagccgggggcattttctttgccctctgcatcgatgccggacagcgcatccatatccggccacttcttgtaccagtcgctgcgcagagccaccagcgcaccatccgggatggggccgtactttgcttcataggccttgatgtcctccaccgtcacagcgtagcgggggtctttcttggcctgctcagagatatcaatgaccaccagcgggaaaatcaggtcattcacatcgtacttttcggacagtgctttgcccttgatgaagtgacccgggaagtcgatatgggtaccaaactgtccggggaatttgaaggtctggatcaggcattccagttccggcttgccccagtcccacacggtctttgccagctccacagagccttccgggataccggaccagtaggggctttcgttgttcagcgagtgagaaagttccacccagcgatattttttagcgtctttcagtgcgttccacagtttataatcagccattgtcggttctccttttattgtgacgatgtatattcgggtgcttctcccagacaacggcatcttcctgttttttctcagtctgtctgccgggaatttgtctgggagcagcgcattcgcccgggcagcctgtgccgggcatctgctgtatgtttcatctgcctgtgctcccttccttgtgttggggatagtataaacccattttcgcaccatgtcaataggtttattctttcaaagacaaatctgccttctcgtcagccggatgcccactgccggagcccccttaattcatacgtcctgcttcttttccagtgcttcaaagtgataccggggcttccctttgctctttttgccgtactcgatggcttctttcgggcaatagcagatgcacgccatgcagtgggtgcagtttttgccccagaccggtttgccgttttccagacggatgttgttcagcgggcacagctccacgcacttaccgcagccaatgcaggcatccgttgcccggaaggcgtccgcttttacaaaaaagcgatagaacaccggatttaccggaccgctcataaagcggtcgtagaggttctctctcggtggaggaaattcctgtccggctttgagccgggtcagcaccttctgaagtgcaggctctgcctgttccacgatgctccgtgcctgctccttctggggtgcattaaacatggcaatgtagttttccggcatgatgatctgggctgtgcccatgtactgcagccgcttttgcgccgcaagctgccggttatagcctgccgcattgccaatttcgctgccgcaatccatcacaaaccagatgcgctgtgccccggtcagtgcggtcttgcccagccactccgacaccacccgggggatgcgccatgcgtaggtaggcgtcaccagcaccacatcccgtccggtctgcaccgtggcggtattccctgccttgatgcaggcgttcaggtcgtaaagcggcatctccaacccttcggcaatgcgccgcgccagataccggctgttgccggttcccgtaaaataaagtaccatggctgctccttcgttttttgtgtggttttcagttgcctgtctgcccggcaaactggaatttgacactttgtatttattgagaatactcttgataccattttgcaaagcgtgatttattgaaaataatgaatttatatagttctccatttttcatattaactgttgcaattggaaagactatccacttccaagagatttcttttatttcctgcatcggcaaaactaaatttctgtattttttgccaactgtaagcttgtttgtcttgtaagtaagcgactgactgtcgaggtacagacctcctccaactatgccattgtgacacaaactgcaaacaaaagatttcatagaaacatccctccattaaattccaagttgtcgttcttagtgtcccatggtttccgcacacaaaaagccccctgcgcaaggtgcgtgcttacacctcgcccgcaaacttcatgccccagctcatgcgggtgtcgtacatcaggcgggtcagggcaaggctgtcctgcggggtgtagcggtcgctgccggtacgcccctgcttcacgcagcggcttgcttcccggatctcatactcaaagccgttgatatccaccgggcagcggatgacctccggctctttgccctccacttccagcgtcatggtctcagcgtgctggaaatccggcagaaagatgctgcccttggtgccaaggatgcgggcattgcgctccagctcctgcccgatggtctggaccgactccgccttgcagccgccggggtaggtcagcgcaaggcggctgtaatcgtcggtgccgtactcgttgatgtgcacctctttggtttccaccttctccgggtcctgcccggtgagaatgcgcagaaagcccagattgtagataccgatatccagcagcgcaccgccgcccagaccggaatcaaacttgcggtccttccgggcaccggaggcaacaaagccgtactgacaggtgatctgcttcagttccccgatggtgccagccgcaaggatctcgcgcaggcggtcgtacagcggcagcagccaaatccagaacgcctccatgagaaagaggtgcttttcctctgccagacggtacagctgctgcgcctgctccgggctgatggtaaagggcttttcgcacaaaacgtgcttgccctgctccagacagagcttgcagttttcgtaatgcagggtgttgggggtggcaacgtagatagcctccacctccgggtcggcggcaagggcttcgtaggagtcatagcagcggggaatgccgtactgctgcgcaaacgcctgtgcgctttccatgtgccgtgaccccacggcaacaagctgctctccttctgcgcccatctgttccaccgtagacgcaaactttttggcaatggtgccggtcgctaaaattccccacttcataacggtacctcccggtttattactttggattcgttgcgttcagtataccatggttttcccttgcggaaaagatagtgaaaagcaaaaatgcccccggagggcttattccaactctccggggacagattctatgcaccggtatctttcatcttgttccaaacattctcatccattataatagagatagaaagaaggtgccaacatgaaacatcgcattgtgacggctgcgcagatgaaggaaattgaacaagccggggatgcccacggtctgccctacccgcaaatgatggaaaacgccgggctggcggcttacgctgaactgcaaaagcagttcccgcatcccggcaggctgctggtggtctgcggaaagggcaacaacggcggcgatgggttcgtgatcgcccgtgccgctgcaaaagacggctggaatgtgaccgttcttctggccgagggcgagccgaaaacttctgacgctatccgcaattttgagcgtctgcactccctgccggtgcacatctgcactgacggttctgtactggaaacccagagctttgctgccgttgtggatgccctctacggcaccggattccatggtgaactgcggccttccggccttgctacctgcggactgatacgccatctgcacaagggcggtgcctttgtgctggccgtggacctgcccagcggcatcaatacggacaccggcgaggttgccgacggtgctgcccatgcagatttgaccgtaaccttcgacagctataaaccgctgcatatcgcaaaaatctctgcgccgctgtgcggaaagatcgtctgtgccgacattggcattcgggacgaatggcacccggagttttga

SEQ ID NO: 142 - DNA, 5387 bp, unidentified
  source 1..5387: mol_type = unassigned DNA
ttagttcacaccaagatacttggcaacgaccatacgctggacttcggaagtgccctcgtagatctcggtgatcttggcatcgcgcatcatgcgctcaacgggatactcacgggtgtagccatagccgccgaagagctgaacagcgcggcgggtgacgtcggaagcggtctcggccgcgaagagcttggccatggcagcgtccatggagtaatcctcgtgattctgcttcttcatagcggcagcgtaaacgaggtactgggcagcctgagtgcgggtgtgcatgtcggccagctggaactgggtgttctggaactggctcaggcggcgaccaaactggatacgctccttggtgtacttgacagcctcgttgatggcgccttcggcaagaccgagagcctgggaggcgataccgatacggccgccgtcgagggtcttcatggcgatcttgaagccttcgccttccttaccgagcaggttctccttggggacgacgcagtcttcgaagacgaggtcgcaggtagagctgccgcggatacccatcttcttctcgtgcttaccggtggagaagccggggaagtccttctcaacgatgaaggcggtgataccgtggttgcccttgctcttgtcggtcatggcgaacacgacgaaagtggaggcaacgttaccgttggtgatgaagcacttgctgccgttgaggacgtagtcgccgttctcgttcttgacagcggtggtctgctggccggaggcgtcggtaccggcgccgggctcggtcagaccgaacgcgccgatcttgcggccggacagaaggtcaggcagatacttcatcttctgctcctcggtgccgttctcgaaaatgggagcgcagcagagggaggtgtgggcggaaacgataacagcggtggtgccgcaaaccttagcgagctcctccacgcacatggcataactgagaacatcgccgccggcgccgccgtactgcttcgggaagtaaatacccatcatgccgagcttggccatcttttcgacggtctccatggggaagcgctcttcctcatcgagttcctcagctaaaggcttgacttcattttctgcaaattcgcgatacattttgcggaccagcagatgttctttggacagatggaaatccatagtcttttgctccttcactataaaaataattggattgtctaatttttcacaaatcagttccgtgactctcattatatcctgtgcgtttcattttcgcaaggggaactatcattcctttttggaattcgtgcttttcgccgaattcattaaagtctttttgacatttccgttccttttatgacagttttctgtcattttcaggaatcctttccattccaaaagagaaaaagggaggcagtttttgtaaactgcctctcctttttatccttttagggacggattacttcttgctgtaatcgtagaagcccttgccggacttcttgccgagctggccgccgcggaccatcttcttgagcagcagagcgggacgatacttcggatcgccggtctcgctgtagaggacgttcataatggcgaggcacacgtcaaggccgatgaagtcgcccagggcgagggggcccatggggtggttcgcaccgagcatcatggccttgtcgatatcctcgacagaggcaacgccggtctcgaccaggccgatggcctcgttgatcatcgggatcaggatcttgttgacgacgaagcccggagcctcagcgacctcgacaggctccttgccgatctccttggagaggttgtagatgaagtcgaaggtctcctgcgtggtgttggcgccgcggatgacctcaacgagcttcatgctgggcacggggttgaagaagtgcatgccgatgacggcgtgcttgaggccgagacccatctcggtgacagacagagaagaggtgttggtcgcgaagacggcgctctccttgcacatctcgtcgagctcgccgaggagctgacgcttggtgtccatgttctccgccacgcactcgatgacgaggtcggcgtccgccgcggcagacttctcctcgacgaggatgttgttcaggatggcgtccttggcctcttcggtcatcttgcccttctcgacgcgcttctgcagggaagcggcgagcttatccttgtggcgctgagcggaagcgacgctggaagcgtacatcagagcggtgtggcccttggccgcgaagacctgagcgatgccgctgcccatggtgccggcgccgaaaactgcaactttcattgtgtgtatcctcctacaatataaatagataattctatggaatcacttgttgataaagggctcgtgcttgcgcttttcgaggaaggcgcccatgccctcctgctggtcggcgctctggaagcaggagccgaaggccttctcctcgatcacgacggcgcggtcaatatcgacctgaagaccgtcgttgatggcctgcttggacgcgcgcaccgcgatgggcgcgttgccagcgatctggccggcgagcttttccgccgcggcgtagaggtcagaaagcggatagaccgcgttgacaaggccgatgcggtaggcctcgtccgccttgatgttgcgggcggtgtagatcatctgcttggccatgccggggccgacgaggcgggcaaggcgctgtgtgccgccaaagcccggcgtgatgccaaggcctgtctcgggctggccgaagacggcggtatcggagcagatgcggaaatcgcagctcatcgcgagctcgcagccgccgccgagggcatagccgcccaccgccgcgatcgtcgggatggggaacgcttcgagcttgcgcatgacgtcgttgccctgcttgccgaaggcctcggcctcctccttgctgagctccttcatctgcgcgatgtccgcgccggcgacaaaggacttctcgcccgcgccgcggacgatcaggcagcggatctcgcttaagtccaccgcgtcgagcgcggcatcgagatcggcgagcacctgagaattgagcgcgttgagcgccttttcgcggtcaatgatgagataggcaatgttgcccttgggttcatatttgacaaaagacatcgtgtgtctcctcctgtcttcttcaactgccccctattatatgggcggcaaggcatatttgcaagagaaaaatcacttttttcaaaaaagtttcacacttttccggtctcactgcaagaaacgctgcatttttaatgatcttttctcccaatgcagcaactcttgtataaaatttttaaaatgacttgtctcttgcaccaattttcgatatgataggctttaattataggaaaacgaggttcattctatgcgaatgcgcaaaaagaaaaacctgcttccccgcatggagcggtgcggggcgtatcagatcaaggacccctacgagcgcaagggccgctggcacgacttgatgcccgaggcgaaggagatccgcgtggaactcggctgcggcaagggccgcttcaccgtcgagacggccgcggcggagcccgacgtgctgctcatcgcggtcgaaaaggtgccagacgcgatggtcgtcgcgatggagcgcgcggcgaaggcagagctgcacaacgtcttcttcatcgacatcgacgccaaccagctgcctgagatttttaatcagggtgaggtcgaccgcatctatgtcaacttctgcgacccgtggcctcccaagcggcaggccaagcgccggctgacgcacggcaatttcttgaagctctaccgcaaggtgctcaaggacaacggccaaattcatttcaagaccgacaacgacccgctgtttgagtggtcaatcgaggagatcccgcagtttggcttcgaactctctgaggtcacacgcgatctgcatgcgaacggacagtgcggcgtgatgaccgactacgaggccaaattctatgccgagggcaagaacatcaaccgctgcgtcgccacgatgcagccgtgggaagagcccgaggaagaggatacgcccgaagaggcggacgaaacggctgaataaaaggaaggctttcagccttcctttttgctttcttccagatacggcgaatacatcatcaccgcgtcgttcacggcgacaggcgtctccgcgagcagcttgccctgcaaatcaaacgtctgccggtagagctcgttgtggcggatgtagccgccccagtactgcgcgcgcatctcgtggttgcgctcgacgacctcatagcgctcggtcggctcggcgctcacgcgccactcgccctcaaggtctgttttgccgacgcggacacgcatctgataggtgtcctgtgtgtcgttgcggatcatcaggtcaagataggggtaaaagcaggtcgcaccgctgccgaagggctgcgtgcggttcgcgtcgggaaagacgtcgtagccgtggcggtggcgctcgacgaccgtgagcggcgtgtgcagcgtcatccagtagatgaggtttgagagctggcagagcccgccgcccgtcgcggccagatacccgccgttgcgcaggatcatgccgggcagataccccttccccgccgtcggctttccgatgagataccagtagctcatcgtttcaccggggcgcagcaaaagcccgtcgagccgcgcacaggcgaggcggagattcgtcaccttgttgcgctggagctgcatgtcgacgtccttgagctttcgcatgagcggcgtatggtgggaaaccgcctgatatgctaagtcttccctgctgcgctcgcgcgcaaaatgcttccgcatcgaaagccatctgagttttcgctgcgcgctaaaatacgcgccgccgagcttcagccgcaaattagagcgttttttcggttcgcggacggtcatatgcttccctcccctgtttttctgcttttatagacgcaaaacggcgggaaaaagttccaacattttctcatttcaggctcatcacgtagatttgacacgggttccactcgtcccagagcgtcgggaatacctcaaactcgccaaaaccgagggcgagatagaagcggttcgtcgcgtcgtactcagggtacttccccaactgcacggtcttgacctgcaaaaacgagtagccaagctccttcgcccgctgcttcgctgcggcaaagagcatcttgccgacgccgcggcggtggtattctttcagcacgcccatgacatagagttccgccgtatccctccccgtttcggcaaggtaaaggaagccgacggcgttctcgccgtcaaacgcggcaaaaaacggctgctttgcgcttttctcgatgtattcctcgcgcgcctctggaatgccaaaccagtcgggcagcgattctaaaatcaagcgcgcgatgcgctgcttctcctctgccgctgtgatctctctaacttccat

SEQ ID NO: 143 - DNA, 15303 bp, unidentified
  source 1..15303: mol_type = unassigned DNA
atgttcaacaaacaccctaaaggtctgattgccgcatcttttgctaatttgggcgagcgtttcggcttttataccatgatggccattcttgtactttttctgcaagccaagttcggactggatggaaaagaggcaggtttgatctactcaacattttatttttctatttacattctagcattgataggtggtattattgccgacagaacccgtaattacaaaggtaccatctttgccggtattgttttgatggcggtaggttacttgatgctggccatcccgtctcctacaccggttgccaataagaccttgtttctggtgattacttgtgcagccttgtttgtcattgctttcggaaatggtcttttcaagggaaatcttcaagcgctcgtagggcagatgtacgacaatcctcagtactccagcatgcgcgattccggtttctccttattctatatgttcatcaatgtaggtgccatctttgccccgtttgccgcagtaggcgtgcgtaactggtggttgtccacattcggctacaattatgatgccgacctgcctgccctttgccacggacatctggcaggaacgctgactcccgaggctgtggacacttatagcgcattggcagccaaagccactatttccggaacacccgtaacggatatgacggtatttgccaatgaatatctgaacgtgttcaccactggtttccattatgcattcggtgtagctatcctggctatggttctctctttggtaattttcgtcatcaacagaaagaaattccccgatcccagcaagaaggttgctgcaaaagcgggcgatgccactgcagtggagatgaatgcacaagaggtaagacagcgcatgtatgcattgtttgccgtattcggtgtggtaattttcttctggttctcgttccatcagaatgggttgacactgacgtattttgccaaggaatatacagatttgaatttattcggcatggctatttcagctgagctgttccagtctttgaacccgattttcgttgtatctctgacaccggtcatcatggctgtctttgcagcacagcgtgccaagggtaaagagccttccactccgcggaagattgccatcggtatgggtattgctgccaccggcttccttataatggctatcggttcttatgtaagcaacttgccgatgcacaaggatataatcgctttgggtacctctccggtgaaggtgactccgctgttgctgatggttacctatctgatattgactgttgccgaattgtacatttctccgttgggcatttcattcgtgtccaaggtggctcctcccaaatatcagggtatcatgcagggcggttggctcggcgctactgccattggtaatcagttgctcgttatcggtgctatcctttacgaaagtattcctatctggatgacgtggacggtatttgtagtagcgtgctgcatttcgatgttcaccatgctgttcatgctgaaatggcttgaaaaggtggcgaagtaatcggaaacgaaagataaaactaaaggctgcgcaatgttcgtaatgaactgcgcagcctttagtttttggagggcttttaatgccggggctcagatttccagtcccatgatgtagtcattcatgtaatatccgtttcctatcgggaaatccccttcacggagtttccgcattcccatatgttcgtaaaactgcagtgccttgttgttacggttcacattcaattccatcagacaagggccgggatgcacttccttgatgtacttgatggcttcgcgaaagaggaaactgccgcaatgtgcaccctggtaataggggagcacataaatcttttgcaggtggaataaattttctccttgctgctgtacggacacatagcccgccgcttcacattcttcgtaggccaggaagtagacgtgaccttcctcttccatttgcttgcggatattgtccaatgaatacatccattccatcatgtagtcggtctgttcgggagtaaggatatccttatacgtgacagggaatatctgctgcgcaagtttctgaatcagtgcgcagtctgctgtcgttgcttttcttatggtaaacatatcggttgtatttatactgtttggggtgtaaagttaagccttttttgtgaaacaatcgttatctttgcagaccgttaccgaactaactaattttgattttaaaaattatggcatttacgagcaacattatgattgtccgccacagattactgaaggaactggtaaagctgtggaataacaacgaacttgtggataaaatagaccggctgcccatcgagctgagtccgaagaggtccaagcacgcgggacgctgctgtgtgcacaaagagcgcgcggtgtggaagtacaagtcattgccgcttctgggactcgatatggaggacgagacggatgagctgacccccttgtcggagtacgctgcccgtgcactggacagagcggaaaatggcaggccgaaagacaatatcatgtgtgtgattgacgaagcttgttcggcatgtgtgcagattaactacgagattacgaacctctgccgcggatgtacggcacgcagttgccaggtaaattgtcccaagaaggcagtgcacgtcaaggagagcgggcaggcatggattgaccatgatgcgtgtatcagttgcggcatctgccataagagttgtccctaccatgccattgtttatattcccgtaccttgtgaggaagcttgtcccgtgaaagccatcagtaaggatgagaaggggatagagcatattgacgaaagcaaatgtatctattgcggaaagtgtctcaatgcatgtccattcggagcaattttcgaaatatcgcaggtgttcgacgtgttgcacagaatccgcaagggtgagcaggtggtggctatcgtggctccgtccatcctggggcagttcaagacgactattgaacaagtatatggcgcattgaaacaggtcggttttacggatgtcatcgaggtggctcagggagcgatggataccgtcagcaacgaggcgcacgagctgattgagaagctggaggagggtcagaagtttatgacgacttcctgctgtccgtcttatatagagttggtgaacaagcatattcctgccatgaagccttacgtgtcgggcaccggttcgccgatgtattatgctgcccgcattgctaaagagaagtatccggatgcgaaggtggtcttcataggtccttgcgttgccaagcgcaaagaggcgcagcgcgacgaggcggtggactttatcatgactttcgaggaggtggcttccgtgcttgccgggctggatattcagatggagcaggcaaagccctattccatgagtttcacttccgtgcgcgaggcgcatggttttgcgcaggcaggaggcgtgatgggtgccgtgaaagcctatctgaaggaagaggcagataaaatcaatgccgtacaagtggctaatctggataagaaggctatcggtgcgttgcgtgcttacgccaagtcgggcaaggctccggggcaatttattgaagtgatggcttgcgagggtggttgtattaccgggccatgttcgcataatgaaataactgccggaaagcgccagctgacgcaggagttggcaaagagaaaagagacgtattagccctttgtccgtttatatgaagcatttgattgacaaattgcggagcaatcgcaggctggatgccgaagagtataaagccttgcttctttgtcgggacacagaacttgcagcctacctgcaggagcttgcccgggaagaagcgcttgcctgctttggcaataaaatcttcattcgcggactgattgagataaccaaccgttgccgcaataactgctactattgcggcatacggaaggagaaccggaacatagtccgttatgagctggcgcaggaggagattctttcgtgttgccatgaaggctatcggttgggtttccgtacctttgtgctgcaagggggcgaagcgccggcggtgaaggatgaggggatggtggagacagttgccgccatccggcaatccttcccggattgtgccattaccttatccttgggcgagaaatcgcgggaagcctacgaacgtttcttcctggcaggtgccaaccgctatctgttgcggcacgaaacctgcaacgaagggcattatcaccggcttcatcctgcggagatgtccctttcccatcggttgcaatgcttggactggctgaaagagataggctatcaagtgggaaccggaatcatggtgggcagtccttaccagacggtggaccatttggtagaagacattctcttcatcgaacggtttcagccggagatgataggcatgggaccttttcttccgcatcacgatactccgttttcctcttttccgccgggagatatggagttgacgttgaagttgctttctatcttccggttgatgcatcccgcggcactgatacctgctaccactgccctggccacacttgctccggacggacgggaacggggaatattggctggcgccaatgtcgtgatgcctaatctttcgccttctcatcagcgggcgaagtactccctctatgataacaaagcttctgcgggtgccgaagcggcagaaggtttgctaaaattggaggaacaactgaaagggataggctacgaggtatcaaaagagagaggagattatgagaatggagaattgaccgttgataattgataattttcaaatcttcattctttattttaattaccaattatcaatttacgaagtgtataacataaagtcaagacaagcggaagaattcatcaatcaccaggagatattggatacattggagtatgcgcaggcaaaccgcaacaaccgtccgctcatcgaaagtttgattgacaaggctgctttgtgccaggggctttcccatcgggaggcggccctgctgctggaatgtgacgagccggaactggtgcagcgcatctatcatctggcacgtgaaatcaaacggaaattctatggcaaccgcattgtgatgtttgccccgctttacctttccaactattgcgtgaacggttgcgtctattgcccgtatcatgccaagaaccgtaccatcccccgcaagaaactctcgcaagaggagatacgccgcgaggttatcgccttgcaggacatggggcataaacgcctggcgctggaagccggagaagaccctcgaaacaaccctatcgactatatcttagagtctatccgcaccatctacagcattcatcacaagaatggggccatccgccgggtgaatgtcaacatagccgccactacagtggagaactaccggctgctgaaggaggctggcatcggcacttatatcctttttcaggagacttacagcaaagagcattacgaagccttgcatcccacgggaccgaaaagtaattatgcctaccacaccgaagcgatggaccgtgctatggagggtggcatcgacgacgtaggtatcggcgtattgttcggtctgaacacctatcgttatgacttcgtaggactgctgatgcatgccgaacatctggaagctacctttggcgtgggtccgcataccatcagcgtgccgcgtatctgtccggcagatgatatttcgaccgaggattttcccgatgccatctcggatgagatgttctgccgtattgtggcggttacccgcattgcggtgccttatacgggaatgattatttccacccgtgagtcggaagccgtacgccgtcgggtgctcgaactgggcgtttcgcagataagcggcggttcgcgcaccagcgtgggaggctatgccgtgccggaagccaaagaggaagattcctcccaattcgatgtgagcgaccggcgcacgctggatgaagtggtgagttggctgctcgacctggggcatatccccagcttctgcaccgcctgctatcgcgagggacgtaccggagaccgcttcatgtcgctcgtcaagcgcggacagatagcaaactgctgccagcccaatgcactgatgacattaaaagaatatctggaggactatgcctcctccgaaaccaaggagaagggcatacagctgattcgtgaggagatggagcatatcccgaaccccaagatacgggcgatagccgaacgtaatcttcaggagataggggaggggaaaagagactttagattttagatttcggatttatgaataatacacctcgttccaaccgcctgcacattgccgtctttggacgacggaacagcggaaagtccagccttgtcaatgccttgaccgggcaagacacggcattggtatccgcaacgcccggcactactaccgatcccgtaaccaaagccatggaagtatatcctttgggcccgtgcctctttatcgatacccccggttttgatgacgacgaaggcgaactgggcggtatgcgcgtggagcgtaccttaaagacggtggagaaagcggacatcgccctcttgctttatgaagctgacggaacgctggaacagcaatggctaaagctactggctgcgcgcgaaatccccgtgatactgatactgaataaagccgattcccgtcaagacaccgcttccgtggtgcttcggattgaaaaggaatgcgggcaggctcccgttgtggtcagtgccaaagagggtaccggcattcaaggcattttcgatgctattctcgaaaagcttcccgagaattttggtgagcagactatcacgggcaattgggtaagtgaaggagatgtcgtcctgctggtgatgccccaggatatacaagcccccaaaggtcgtctcattcttccgcaagtgcagaccatccgcgaactgttggataaaaagtgcttagtgatgagctgcaccaccgacaagctgcaagcctccctgcaagcccttgcccgtccgcctaagctgataatcaccgattcacaagtattccccatcgtctatcaacaaaagcctgccgaaagtagtcttacttccttctcggttctttttgccggctacaaaggagatatcaatgccttcgtggagggagctgccgctatccatagcctgaccccccaatcgcgtgtactgatagccgaagcttgcacccacgccccgctgaccgaggacatcggtaccgtcaaaattccccgcctgctacgaaagcgcatcggcgaggaattgcagatagactttgtatctggaaatgactttcccaaagacttgtcccgatatgatttaattatccattgcggcgcttgcatgttcaaccggaagtacgttctcaatcgtatagcccatgcccgcgcacagcacatccccataaccaactacggagtagcaattgcgagtctgaccggtatattggataaaattgttatctatcggtaaatatccctttccctctctgttcacgttactgatgttatagagtagcgtgaactacttttcttgttaataatgtttaatatatggtactttgtaatgcaaggtactgatataatacatatatttgtgccatacaaggaacaacaatagaatgaataaggacactcattactctattgcgcagcaaaatagtaaatcgtaaattgtcaaatagtaaataccattatggatgtaaacaatgtaaagtcgcaaatgcgcaagggcatgcttgaatattgcatcatgctgctgcttcacaaagagccggcttatgcttcggatatcattcagaagttgaaagaagccagactgattgtggtggaaggtacactttatccgttgctcacccgtttgaagaacgacgaccttttggggtatgaatggattgagtctacacaaggtcctccccgtaaatattaccggttgacggaaaaaggagaagtctttctcggtgaactggaaacatcctggaaagagttgaacgatacggtgaatcacatcagcaattcttgaaatgcccacagagaatatgctgcattcgccgaatggtaaatagtaaatcgtaaatagtcaaattgtaaataaatagtgtgttatgaaaaagacattaactgtaaatttaggtggaaccgttttcaatattgatgatgacgcataccgtcttttggataattatctgagtaatctcaagatgcacttccgcaaggaagtcggtgccgacgagattgtagatgatattgaacgccgtatttccgaactctttgccgagaaattgtcggccggttcgcaagtaatcacgatagccgatgtggaagaggtgattgcccgcatgggaaagccggaagatatggaggcggaaggagagagtgctagtgccgattccggcagcacgagtgccgggggcggctatggtgccggtgcttggaacagcaataccgcttatggcactacacgccgtcgtctataccgcaatccggatgacaaaatgctgggtggtgtcatcagtggaatggctgcctacctgggatgggatgtaactttacttcgactgttactgcttgtcatcttgatttgtggggtagggacattgataccggtctatatcgtgtgttggctggttataccggaagcccgcacagcggccgagaagttgagtatgcgtggcgaggccgttacggtggagaatatcggaaagacggtgacggacggttttgagaaggttgccaatggggtgaatgattatatgaggtcggacaaaccccgtactttcttgcagaagttgggagatgcattggtgatgattgtcggctggttcttgaaaatctgtctggtgatatttgccattatctgcagtccggtattgtttgtatttggagtggtatttgtggcgttgttgtttgctgcgatagcggtggctgttggtggcggtgcggctctcatttcctttttcccgatggctgatgtggtactgcctacttctccgttgtctgccattgtgatgtacattgcaggaatcttgctggtaggaattcctttggtcagtcttgtatgggccatcttcagtcagatattcaaatggcagccgatgaattccggtttgaagtggacgctggttattctttggattgtaagtgcggcttgcttcggaatctgttttgcagtgcaaggggctactttcccggaattgggtatctttaacttctgagaatagtaatttcttttttaattgatatcgtgtttgtaggaatctgatttctataaacacgatattttttatttcaatgtaattatttgttatacagtggaatatttcgtttggaaaaggtgttttttaaacgttcgtttaatgaacgcaaagataacgtgtatttttgaatctcgcaaaatgtttaataaaaatattctataaatttctttttagtgagtataatactttgtcagtaagcctattgcattgtatttctctaacttcttccttttactaatttttaagtaatcttccctctttagttttcttaaatattgacgttcaaaaaacgaacgtctattgaacgctttttgcttgcaatagattcgtttacagcattttacctgacaggtaatgaatgactgcaaaaaatctgttgacaagaagggcataaagcttgtcgtattctacataaagtgtccgcaagtaattgaatttcaagtgtatgcaagaggttcaaagccccaggagaacacccttgtctgaacaaaagcataaaaatgggaatagagaaagaggtcgaaatctggtatgctatgcgtgccacctaccgcagagaaccagatgccatgcatctgctcaagaaagaaaatttgggctgtttcattcctatgcaatacaagatatgtataaaaaaagggaaaaaagtccgtgctctggttccggtcgttcataatctgctttttgtccatgcccgtccttccgatgtgcagcgtgtaaaatctcaagtcacttatctgcaatatatcaccgatacccgcagtgggcagaagattattgtcccagacggtcagatgcagcgtttcattgccgtatccggcacttacgatgatcatcttctttattttcaaccggatgaattgaacttgtccaaaggcaccaaagtccggattaccggcggtgaatttgaggggcaagagggtgtgtttctgaaggtgaaaggcgcacgtgaccgtcgcgtggttatcgaaatacaaggtgtcatagctgttgccatggccactatccatcccgatcttatagaagtaatcggctgaactttaatttttaattcttaattctataattgcttatgtctctttccgaagaagcaatcactcttcagcgtgctgcgcacgaactgatgtatttgggtatggacggcagtcccgtctatagcgatgacttgtcacggcggaacggtgaggtctaccgtcttaccatggctttataccggtcgggtgtaaaaggcactaccatcgaagagcaggcaaatgtctgtcttgcccttcttatgggttacagcgcctcttttgtggaccatggcgaaaagcagcagcatgtccaggaagtgctggactgttgttgggatgtgctcgacgcccttcccgcttccttactgaagctccgtctgcttaccgcctgctacggtgaagtgttcgacgagtctttggccgacgaaggccgttccatcatcgcctcctgggattccttatcacttactcccgaacagcaggaagcggttgatgaatttcagaatgtgacagacaatccctatccatgggaatatatcgatgaataaaacttttcatataatgcttaacaataaatccgtattgattaccggaggaacgggttccttcggaaagaagtttgtggaaaccattctccgtgattatccgcaagtaaagaaaattattatttactcccgcgatgagctgaagcaatttgagctgaaacagaaatatcccggtcataagtatccgcaactgcgtttctttatcggtgatgtccgtgacctcgaacgcctgacgcgggcttgcgaaggagtggacgtgattatccatgcagccgccatcaagcaggtggataccgctgaatacaatcccgaagagtgcatcaaaaccaatgtacacggtgcgcagaatgtgataaaggctgctcttgccaccggtgtacagcatgtggtggccctttctactgacaaggcttgtgcccccattaatctttatggcgccaccaagctcacttccgacaagctgtttactgccgccaacaatatcagcggttccaaggacatcaggttctccgtagtccgttatggcaatgtgatgggttcccgcggttccgtaatccctttctttatcaacaagcgtgacaacggggcgaaggaacttcccataaccgatatgcgcatgacccgtttcaacatttcactggaagccggtgtcgctttggtcatgtatgccatcggacatcacctgggtggtgaaatctttattcctaagattccttcctatcatatccaggacgtggctaccgccattgcacccaatctgccgcaggtggaagtgggcatccgtccgggagagaaactgcacgaggagatgattactgtaaccgatgctcttgatacaatcgatttgggcagatattatgtcattcttccttccgtatctttcaagcacagtcgcgaagagttcatcagacatcacaatgcagtacccgttcccgacggtttccactacagcagtgacaacaatacggagtgggagacagtagagactatgcgcgagaatataaagaaatacgttgaccctaatttcgaggtgaaatgataagcaagcctattccatacggtcgtcagcatatcacagatgaggacatccgggcagtcatcgataccctgaaaagcgattacctgacacaaggtcccaaaatcagggaatttgaaacgaaatttgccgaatatgtaggtgcacaatatgccgtagcggtgaacaatgctacttcggggcttcatcttgcagctaccgcactgaatgtaaagccgggtgacaaggtgattgtcactcccatgacctttgctgccagtgccaactgcattcgctattgtggcggcgaggtggtattctgtgatattgacaaggatacttacctcatggatatccgtaaactcgaagccatgcttaaagcttctcctcgcggtacttacaaaggtattgttccggttgattttgcaggctatcctttggatctggaagagttcagaaagcttgccgacgagtacggcttgtggattatcgaggatgcctgtcatgctcccggtggctatttcatgaacagtaaaggcaagaaacaacattgtggcaacggttgttttgccgactgtgccgtattctctttccatcccgtgaaacatatcgctacgggtgagggaggcatggtgaccaccaacagcaaggagctctatgacaagctttgtctttaccgtacgcatggcattacgaaagaccctgctttattgcacgagcatcatggtggctggtattacgagatgcaggagttaggctacaattaccgtctgactgattttcaggctgccttgggtatttctcagctggagcgtgcgaaagcaggtcttgaccgccgccatgaaatcgtgagacgctataatgaagcgttttccggaatagatggtatcaagactccgttcaatgctgccgatgtctatcatgcttatcacctttatatcattcaagtagctgaccgcttgggcctttataattatctgcacgagaacaatgtctatgcgcaggttcattatgctccgcttcatctgatgccttactatcagcagtggggaaataggaaaggcgatttacctatagtagaagagtattacgaacattgtctgagtcttccgatgtatcccacgctgacggacgaggaacaggagtatgtgattaaaaaggttatagaatttgtagcgaaatgaattgcgtaaacaagcttgttctcggtaccgtacagttcggacttgactatggaataaataatcagtttgggcaggtacaccaagatgaggtcgggcagatattgaggtgggcaaagaaaagcggaattaatacgtttgatacctcctctgcctatggaagtagtgagagcgttttaggaaggtctctttctgaaaataatcttcagtttcagattatttccaaatatccccagtctaaagaaaatgttgctaccgtattcgcttcttctatagagaagctccatcaacagaagttatatggttatcttgttcatcattttgagttctatcaatcccatcctcaattatgggaagagatgaagcaactcaaagcagagggaaaagtagaaaaaattggtttttcgctttatgatatcaatcaactgcaatatttgttagataatagagtagagtttgatattttacaatttccttataatctcttcgatcggcagttcgatgtttatctttctcaacttaagcagtctggggtagagatacatactcgttctgtatttttgcagggacttttttttaaggatctgggtagccttagtgggcagatggaaccattgaaaccttatttattgcagattagattctattgtgcagtgcattctatcaccattgaacaatgtgcattaagttttgtgcttcgaaacccctttattgatggtgtattgataggggttgataatataagtcagttgcagaacaatatcaatgtggccatctgtacgaaagaggttgaggagttggctaaacagataactgtgaaagaaacttatttgttgaatccttctaattggttataatatgaatgttttagactttttctctttggagaataaagtagccattgtcactggcggctacggttatttgggaaaagcttttgtacagtctcttaatgaagcaggggcaaaagttgttgtggccggtagagatgaacaaaagtttaaattggcttttcccattgtttccaatatctatttctgccctttggatatttcgaacacagagagcatcaaaaaatgctttgctgatgtgaataaaacatatggtagtattgatattttggtgaataatgcagtatatctgtccggtcaatatcctgaagaagttagtgacaaggatttggcttattcatttgatggtattataggtagtgtttacaagtgtatacgcgaagtaattccttatatgagagaacaaaagtctggaaatattgtgaacatcgcttctatgtacggtgtggtggttcctgactttaaggtttacgacggtgattgcaacccaaattttaatcctcctcaatacggagcctccaaagccggagtcattcaactgaccaaattctttggtgaatatctaataggtgataatattcgtgtaaatgccatttctccaggaccttttccttcgccttctgtacaaaagaatgaagagtttgtaagtcgtttggcaggtaaaaatccttcccggcgcattggcaatcctgaggatttaaaaggtgcattgctttttttggcatcagatgcatccaaatatgtagtgggacagaatattcaagtagatggagggtggacaatatggtgaatacactttgtattgtgcaagcgcgtttgacttcatcaagactgccagagaaggtattgatggagttgggaaacagtgggctttcaattctcgaacatgttaatatgcgtctcaataagtccttgaaaatagataaggttgtatttgctataccagacacacctttgaatgataaactggccgattttttggaaaataagaagatagaatattgtcgaggtagtgaaaatgatgttttagggcgcttctatcattgtgcagagaaatataaccctgaattgattgtcagggccacttgcgataatccgtgtgttgattggcatttggctgatgaaatgatagaaaactggggtgatgcggattatatgtattgtaaagaaactccattgggtacttctgtagaggtatttacaaagcatgctttaaatgaagcttatcaccatgctaaaacccctgaagaaagagagcatgtttgcccttacatagctcgtaatgaaaaaaatatttgcaaacaatatccttataataagcttagttatcgtttgactgttgatgaggaagccgattttttgctgatgaatgaaatctataagcagctttacaagaatgctcctattgagaataagatgatttatgaatacttggagaaacatcaagaactattggggattaatagtaaggtaaaacaaaagtttctctga

SEQ ID NO: 144 - DNA, 13017 bp, unidentified
  source 1..13017: mol_type = unassigned DNA
atgactttaaaaaagaacgatattgtaaaccttacaataacttcggcaactgccgagggcagcggagtcggaagaacagatgacggcattgccgtttttgtacagggttctgcaatcggtgacgaactcaaggtgcgtatattaaaggttaagaaaacctacgctttcggcaaaatcgaagaaattctcgttccgtccaaggcgagaattactcccgactgcgaaaactttatgaagtgcggcggttgcacatggcgacatatttcttatgaagaagaatgcaaaataaaacagcagagagttgaggatgccgtaacacgcatcggcggtcttgataatgttgttttcaagccgataatttcgtcggataatatcacaagataccgcaacaaggcgcagtatcctgtcggtcttgaccgtgacggaaatgttgtgacgggcttttattcattccacagccaccgcataatcaattgtaccgactgtattttacagcccgaaatttttgcaagggtaattgaaattacaaaagattttatcgcaaaaactaacacggaaatttatgatgaaacaacaggcaagggcagacttcgccacatttatatcagaatcggcgaggcttcgggcgagcttatggtgtgctatgttgtcaacgcaaacggtcttaaacaggaagatttactcgtgaaaatgctcaaatccgaacttccgcagttaaaaagtgtgattattaattctaacagagaaaaaaccaatgttgttctcggcagaaaaaacagaacaatctacggaagtgaccatattaccgacacactttgcggattgcagtttaaaatttcaccgttttcgttctggcagatcaacagaaaacaggctgaaaagctttacggcaaagccaaagaatatgcaaatcttaaatctgacgaaattctgcttgatttatactgcggaacgggtacaataggtcttacaatggcggattcctgtaaacagcttatcggtgcggagattgttgaagatgccgtgaaagatgcaaatgaaaatgcaaaagcaaacggcattgaaaatgcacgattcatctgcggagatgcctcagacgccgcatttcagcttgaaaaagagggtttaaaacccgactgcgtaatccttgacccaccgagaaaaggttgcggcgaagagcttgtaaagacaatttcaagaatgtcgccgagccgtgtagtctatgtatcctgtgacccggcaaccctcgcaagagatttaaaattcttcacagaaaacggctacacccccaaagaaatcaccccctgcgatatgttctccggaacctcccatgtagagagcgtggctctgttgactaaagtacaggagtaaaagtgtgaaaattattaaatttgaagaaatctatcgtgatgatatgatttttacggttttacaggcaaaagatgctttgggtagaaaacctactataaatcctgaccttcttgatattaaggcaaactatcttgattgcaatgatatgttttggcttgcaatagatgaaaatgacagggtagtcggatgtattggatgttcaagaattactgatacagatcaggcatttttgcataggctttatataaaaccgtcattaaaacgaaagggaatcggctcaaagttacttaatacggcagagttatggatgcgtgaaaacggtattgctgtttcaaaagtacatttggggacaccaaaagagcagtggtttgaatcttatgctttttatccgaaacacggatatatagaatatgaaccaaggtatatgatgaaggttctgtaattaatgaaagtcaaaagtaacatatttattatgattattgagtagtgcaacaaataaaatgaaatatgtttggggtttggggtacgatattgaattgacttatttaaaaagaaaaagtgacaccgatggtgatgctttttgatggaggtgcacaaaatggcaaagaagaaaaatgaaataagtattcgctcaagtgctgcggaatatctcacatatgttgcttctgtgggaaatcaggcagatagctttgaaatgcgttatgaggacgaaaatatatggctcacacagaaaatgatggcaacgctgtatgatgtttctgtgcctgcaatcaatcaacatctaaaaaaaatctttgaagacggcgaattagtcgaggattcagttattaagaaatacttaacaactgccgacgacgggaagaattatcaaacaaaacattataatcttcaggcaattattgcagttggatttaaagttaataatgaacgagcagttcgattccgtaaatgggcaggtcaaattgtaaaagattataccattcagggctggacaatggatgtagaccgtctgaagaagggcacgatgttcacagatgaatattttgaccgtcagttagaatacattcgtgaaattcgcctgtctgagcgaaaattctaccaaaaggttacagacctttatgcaacagctttcgactatgataaagatgcaaaaaccacaagactctttttcaaaactgtgcagaacaaaatgcactatgctacgcacagacatactgctgcggaactgattgttgaacgagcggatgcggaaaaggaacatatgggactaacctcttgggaaaatgctcctgatggtaaaatagtgaaaagcgatgtatctgtagcaaaaaactatcttactgaaaaagaattgtcttttttggaacgcattgtatcgctgtatctcgattatgcagagttacaagccgaacgtcatattcctatgagtatggaggattgggcgaaaagacttgacggtttcctcgaatttaacggtactgaaattctcacaggagcaggaaagataagtgcagagcaggcaaaacttcacgcagaaacggaatttgagaaatatcgcatcattcaggacagattgtttatgtctgactatgacagatatttacttgaactggaagaaaagatgaaagaagagtaaatggaaattttaatgttttgcgagaaattataaaagcgtctcattgcatgagtctgtttattgagatatgattggcttggaggtgatacattatggcaaatgaagataaaaaggattttaatgctatgcttatggatagcaaggatatgcctaaatttcaaataatcacagatgaaaagagtattaaaaaatatggtggagataaaatgtattttgcaccgccaatcgactatgacaaagtaatgaaaaaaattccgtatggtaaagtgattactgtcggaaaaatacgagaatactttgcagagttaagcagtgccgattttacagagcctatcacagccggaatttttgtttcaatagttgcatgggcgagttatcagcgcacagaggataaaaccccttattggagaacattaaaagcgaatggagaattaaatgcaaagtatcctggaggaattgaggcacaaaagaaaatgcttgaaactgagggacatactgtagtgcaaaaaggaaaaactaatatcaagtattatgttaaggattatgaaaaagcattatttacattgaaatagataatgcgaaaacttcagtttcacggacatatccccacaaacggcagaaccacgaaaaaggctgtggatgtattcccttgaaccaaaaatcagccaagaaattcatcgtattcagatgagccatgtagagagcgtggcattgattgaaaggaattaacaaaataatatagaaaaggaattaaaatgcaaaatactcttaaaattaaacgaacaaaaacagctttggcatttaatcttgcgattatcgcttgtgagattgccgcaataattatcgtgtttttcaaattaggctgctatccgcttgtatattacactgaggacagcaacctgtttgcacttgttgcctgtgcggttatggcaggctttcaggtgcgatatctcaaaagcggaaaagaaattccgcactcggttcaaatgttcaaatatatggcggcggctgtgctttcggtaacatttatcgtagttcttgccgtgctttccccgatgcgtggagagggcataaacggttggctctatatgctttttaacaaagacttcacctttttacatactttgtgtccgattcttacaattttatcgtttgtgctttttgaaaaagaacctcaccttaacacaaaatcagctttcacggctacaatccctacattaatatatgcgattctgcttattatacttaacatagtcggtgcatttgacggtccatacccgtttttgcgtgtgatgaatcaaccgttgtatatgtcatttgtttggttcatcgttatagtaggcggtgcgtttttccttgcactcttacttcaaaaacttaattcaacaggaaaaaaagtaaatagcagacagtaaacagatgaaaatttcagattggagtgatttttatgaaataccgcaagttggtggagaatgctaaaaagccaaacggcttttggggcaaaatgatgattaaggctatgaataaaggacattcaagcctcacctcatggggacttgaacatatgaatattgaacgcaccgcaactgtacttgacataggttgcggcggcggaaaaaccgttgaccgactttgctcaattgttgccaacggcaaggtttacggaatcgactattcagaactctcggtaaaatcctccgaaaaactcaattcaaaaaatatactctgcaacaaagcgaaaattcttcaggcatccgtatcagatatgccttttgatgacaatacattcgataatatcacggcagttgaaacctactacttctggcctgataaggaaaatgatgtgaaagaagttttccgtgttctcaaacagggcggaacggttatgctgctttttgaaatgctcagaacagacgatgatccgttcaagtgggaaaaggttgaaaatatgttgaatatcaagtcggtaactccgcaggaaatcagagccgtacttgaatctgcaggctttgaacacataaacacatacactaaggaaggtacaacatggctttgtgccacagcacaaaaaccgaaggatgatgaaaactaatgaaggctttgattacaggtgcaagttcgggcataggtaaagaaatcgcccgatatcttgcagaactcggttatgaccttattcttgtgtcacgctcaacagataagcttaacaagctgaaagaggaactttcaaatgtgaatgtcagggtaattacgcttgatttttcacgagaaagtgacagcctggatttgtatgagcatattaagaatgaaaatgaacagattgattttcttgtcaacaacgcaggctttggagcatacggaaaatttttggatgttccgcttgaaagagagcttgaactcattcacacaaatgtttcaacggttcacattctcacaaagctttttcttaaagatatggcggagagaaacagcggatatattctcaatgtaggttcagccgcaggatttcttgcaggcccgacatttgcaagctactatgcttcaaagaattatgttgtccgtcttactcaggcaattcatgaggaaatgcgtagggataataaaaatgtcaaggtttccgtactttgcccgggtcccgtaaaaaccaacttcaataatgttgcggatgtaaaattctgcataagaggacttgacccgaagtttgttgcaaggtatgccgttgacatgaccatgaagggcaaaatgattatcacacccggctttgaaatgaaagcggtgtcgtttttcagacattttgcacccgaaaaacttctcacaagaatttcttataatgtgcagatgaagaaaaacggtataaaataattatcatatagaaataggggaggtgacacattgagaataaaattcgttgacaaggcgataaaactttacaaaagaataacaggcagatttgaaccgataacaagcaaatgcgttcacgataatatttttgcaattgccggacagtcggcattctttattatattatcggctgtgccgctctcaatgttctttgtgtcacttttgcaaaacctgcacattccgattaattttgtttatcacggactcagcagtgtgttttcgtcaaaaattgccgatgacttaacatactttctgacctctgcctatgaaagtgctgtaggaatttctcttgtaacgcttgtagtcactctgtggtcggcggcacagggaatccatgcaatcacaaacggtcttaacagaatttatgatgcttacgaaaacagaaactggttctttttaagaataagagcaatgttctacacaattgcattgtttgtaattttgcttgcgtcacttgtacttattgtcctcggttcaacaattaacgatttcctttcaccgcatctaaaatcgttgccggacataatcggaataatctatcatctcagatatatacttatctttatgtttctcacggtattgtttgcgctgatttacaggaactttccgaacatctcacgcagcgagcataaggaatacggctttaagtcacagttgcccggtgcgtttctctgcacggtttcgtggtatgtgctttcgttcggtatttcggtttatgtgtcggatttcaacggattttccgtgtacggaggtcttacaagaattgccgttattatgatttggttttactttcttatggtttgtcttatggtttgtgcggaaattaattatgtctatcatgacaggataaaagtgtttaccgttgcaaaatttaaaagaaaggtaaaaaccaaaggttcagagcttaatcaaataagaaaagaaagaaaaaataataagtcaaataaaagtaaataaatcaaaataaaacacttccgttcggtgatactaccaatggaggtgttttttatgaaaagaaaattttctaaaaaggtgatttcaatattgctcgtatttgcaatgctcattggcggagcgtgcttttcatgcacaagtgcagcggcgtttgaccttgactatatcagcgaggacggaatgaagctcggttacagtataatcaagggctattccaaaatgtcgatgaaaaaaggtcagtacaaggacgggaaaattgccgtttactgtggacttgatgtgaataatctatatgttatgggttcgctcggttggttctatatgacaaacggtgttgatctcgaccgtgcaatgacggataacgattacgcaatggagatgattgcaaagcttgactcacaccttcaaggtgcaggcataacaaatgacagggcaaaagaaaagaaagccgagattttaaagaatgcaaagtatgtttatcaatgctttgacacattgggactttacattgttgatgttgataaaaacagagccgatgaactcatgaacgacagcggtattgattttgtgcttgacggcggttgcgttcccaaaaatatgaaagacctcaacattgacggaaaaacagatgaaaaggatgctgagcttattcagaagtatcttatcaaagacctcacctttgacgattatgacgaaaatcagtatgctctttttgtttgcgatatcaacggtgataaaacccccgatatccgtgatgcgacagaaatcctaaaaaagtgacaattgtcataatttgtgcaaagtgaatatgattttaactgcgacagctgcaattttagctgtcgcttttgatttgtgacagcaatgtgaaactttgaataattatttgtaatttctcttgacattcaaaatgaaggtgctataattactgatacaaattgttttgtatcgaactattctatatagaacaatatctcataagtgtgatttcggaggtgaaataatgtgtgatgacaaaagcgtaaaaagctgtaagtgcaacaaacgctttaatgattcaatcggtcacgaaatcaaggtgcttaatcaggttttgcagagaaagttaatctattccgccaaggataagggtgtggataagctgactcttatgcacggctggattattgcatatctctatgatcatcgtgatgaagatgtttatcaaaaagatattgaaaacgcattttcaattgcccgttcaaccgttacaagtattcttaaacttatggaaaagaaaaattacataacgagggagagcgttgaaagtgatgcaaggctcaaaaaacttgtcttgaccgaaacaggtattgaacttcattacaaaatcgaaaatatgataaccaaaaacgaaactttgcttgacagtctgctgacaaaagaagaaaagaaacaatttctttttcttataaataaaattctcagcggacttgaaaatgcaaattaaaacggaaggagataagtatgataaaaactttggcaaaaaatatcaaaggtttcgtcaaagaatccgttctgactccgttctttatgatactcgaagtaattgttgaaacaattattccgtttcttatgtcatcaatgattgacgacggtatcaacaagggcgatatgcagcacatattcataacgggcggttatatgggtgcacttgcactcacgggcttgtttgcaggtatgatgggcggtatctacggtgcaaaagcttcggcaggctttgcaagaaacctcagacgctcaatgtttgcaaatatccagtcattctcgtttgccaacattgaccgttactcaaccgcaggacttgttacacgtatgacaacggatgtaacaaatcttcagaatgcatatcagatgcttttaagaatgtgtttcagagcgcctgtatcgctcatctgtgcaatggcaatgacattcatcatcaatgcaaggcttgcctgtatttatctcattgcaacaattttactttctgttgttcttgcctttattatgaaggcaacatacaagtatttcagtcaggtttttgaaaagtacgatgaactcaacgcaagcgttcaggaaaatgtaacttcaatcagagttgtaaaggctttcgttcgtgaaaaacacgaagttggcaagttccgcaaggcagccgacaatgtttacagactttttgttaaggctgaaaatgccatggtaacagtatcaccgattatgatggttacttcatacgcatcaatcatccttgtaagctggtttggcgcaaatatgatcgtaagcagtgagcttacaacaggtgaacttacaagtatgctcacatattgtatgaacattcttatgaatcttcttatggtggcaatggtgtttgtaatgctcacaatgagccttgcaagcggcaagcgtgttgcaggtgtgcttaatgaaaaatcaacgcttgcaaatcccgaaaaccctgtttacgaggttaaggacggaagcattgagtttgacaatgtttcattctcatacaacacaaaagccgaaaaaccgattctcaacgatatcaacctaaaaatcaaatcaggcgaaacaatcggtattatcggcggtacgggttcttcaaaaacaagccttgtaaaccttattgcaagactttatgatgtaaccgaaggttctgttaaggtcggtggaaaagatgttcgtgactatgatatcgaaactctgcgtgacaaggtttcggttgtgctccagtcgaatgttcttttcagcggtacaatccttgacaacctcagatggggcaacgaaaatgctacagaggaagaatgcgtcaatgcctgcaagcttgcctgtgcagatgcgtttatcgaaagcttccccgataagtacaacacaaaaatcgaacagggcggtactaatgtttcgggcggtcagaaacagcgtctttgcattgcaagagctttgctgaaaaatccgaaaattcttattcttgatgattcgacaagtgcagttgataccgcaacagacgcaagtatccgcaaggcattcagcgagaatatccccgatactacaaagcttattatttcacagcgtgtatcaagcgtttcacacgcagacaagattattgtaatggatgacggtgagataagcgcagtgggtactcacgaagaacttatcaaaaacagtccgatttacaatgaaatttatgttgcccagacaagcggcaacggtgattttgatgcgaaaggagagctgtaattatgccgggaccaatgggaagaagaaaccgaggacctgcacaaaaggttgaaaattcaggtcaggttcttaaaagactattcggtattatcttcaaaaaatataaatttcagatgattattgttttcgtctgcatcctcatcagcgtacttgcaaatgttcagggttcattgtttattcagaatcttattgacgattacatcactccgatgattcagagcggcagccgtgacttcggaccgatgctcggagcaattttaagagttgcaatcttctatgcaatcggtgcggcgtcggcgtttatctacgcaaaaattatggtttatgtaacacagggtacaatgcgtgatttgcgttgtcagatatttgaacatatggaaagccttccgataaaatactttgacacacaccctcacggcgatatcatgagcgtttacacaaacgatattgacaccctccgtcagatgatcagccagagtattcctcagcttttcaacagcggaattacaatcatagccgttcttgtcagtatgtttacactcagtgttcctcttacaattcttacacttgtaatggttggcttaatgctttttgtaacaaaacagcttgcgtcacgaagcggaaggttttttgcaaaacagcaggcagacctcggtgcgactaacggttacattgaggaaatgatgaacggtcagaaggttgtaaaagtatttaaccatgaaaaaaagagcattgaagaattcaatgagcttaatgacaggcttttcaacagttcatacaatgcaaacaagtttgcaaatatccttatgccgattaacgcacaaatcggtaacatcagctatgtactttgtgcaatcgtaggctgtatctttgctctcaacaatttcctcggatttacaatcggtaaactcgtaagcttcctcacatttaacaagagctttacccagcctatcaatcaggtcagccagcagtttaactcaattgttatggcgcttgcaggtgcagaccgtatctttaaacttcttgacgaagagcctgaggttgatgacggatatgtaacacttgttaatgtacgcaaagagggcgacaggcttgttgaaactgagaaaaaaacaggtatgtgggcttggaagtatactcacagcataacaggcgaaacagagtatcgtgaactcaagggtgcgcttgttatggacgatgttgacttcggttatacagatgataaaatcgttcttcacaatattgatttgtacgcagaacccggtcagaagattgcgtttgtcggttcaacaggtgcaggcaaaacaacaatcacaaaccttattaaccgattctatgatattcaggacggtaaaatccgttatgacggaatcaatatcaacaaaatcaaaaaaggcgaccttcgccgttcactcggtatagttttacaggatacgcacctgtttacggataccgtaatggaaaatatccgttacggcagacttgacgcaacagacgaagaggttatcgcagcggcaaagcttgccaacgcagacagctttatcagaaaacttcctgacggctacaacaccctgctcaaaggtgacggtggcaatctcagtcagggacagcgccagatgcttgcgattgcaagagccgctgttgcagatccgcccgcacttatccttgatgaggctacaagttcaattgatacccgtaccgaaaagatggttcaggacagcatggataagcttatgcacggcagaacaacctttgttattgcccacagactttcaacaatcaagaattcagattgtattatggttcttgaaaagggcagaatcatcgagcgtggttcacacgaacggcttcttgaacaaaagggcagatactatcagctttatacaggcaaaaccgcataatgataatcgaaaggggagagtcgcaaaggctctcctttttctgtccttgaaatattgacttgtttattgtacaataagactcggaattgtgaggtgttaaaaattaattcaaaattaatattaaagcttactgcattgtttgcggtaatctgccttgcactttgttcgtgttcaatcaatatcaatgtgaacggttccgattcggaaagcaaaacaactgtttcagaaatcggaacattatcggttcattaccttgatgtcggacagggtgacagcatatttattgaactgccaaatcaaaagtgtatgctgattgatgcaggcgaaaatatgtacggcaaaagtattaccgaatatatcaataatctcggatacacaaatattgattatctcgttgcaactcaccctcatgccgaccatatcggttcaatggcttatgttgtaaagcataataatatcggcgaaatctatatgcctaaggttacaaccacaaccaagacctatgagaatctgctcacggcaattgcagacaagggacttaaagtcaagtcagccaaagcgggtatgaatattattgatggcaacgatttcagcataaatattcttgctcccgtaacaattgacgaggataatctgaacaattgctctgtaattctaaaaataacttataaaaacgacagctttctgttcctcggggatgccgaaaagaaagagcttgaaactgttacggcagatatgagagcagaagttcttaaagtaggtcatcacggaagcagaacttcaacaacaaaagcgttgcttgaaaaggtaaatccaaaatatgcggttatttcactcggcaaggataacagctacggacatccgcacaaaagcacattaaagttgcttgatgaattcggagttgaaacatacagaaccgatgaaaacggaacagttgtcatttcaaccgagggttcaggtgtgacaatcaaaacgcgacaaacttcaatgaaaagggatgaataa

SEQ ID NO: 145 - DNA, 24625 bp, unidentified
  source 1..24625: mol_type = unassigned DNA
ttatacaaccgtcacaacacctatttcaacttgattattgattctggggatgaatacggtgttgctcagacctgcgcagacaatcatttttgtgccgtcaaggtcaaattcgcctttgtcatatttcggaaaaagtccctgattcggagcgattactccgccgatgaacggtaattgaatctgtcctccgtgggtgtgaccgcagacgattaagtctatgtcggttttctttgcgtcctcggcaatgtattcgggctggtggtgcagaagaattgtgaaattgttctttgctttttcggcaaattcttcccacagcgttcttgacggaacatcgtcatcgggagtgtagaactcataataagggtagtcgctcattccgccgataagcacacttttgccgtttttggtgaattttatgtattcattatcgagcaatacagcgcctgttgaatttgtttcgcttttaaaatccgttccgaatttggcggcattgtcacgctcatggttgccgagacagcagtatgtgggtgcaatttttgaaagcttttcaagcacatctttcatctttgttgtgtcgggatcgccacggttgaccatatctccgcaaactgcaataaaatcgggattttgttcctttacaagctctgcaaggtctgcgttcttttctccgtattccttgttgtgcaaatccgtgatgacaacaaatttcagctttgcgtcgttcttagcattgtttacacagtaatttgtgattgcaattgtgttgtcacagtaaacgccccatattacgagagtcacaaacagcataagtattattgctccgaggattatcgaaaattttttcattcaatttaccgcccatattaagtatggtattattttaggctcgttttgtgtggttgtcaacaaatgtgtgtcgaacaagtctgattattactgttccttgtgctttgattgtcggattttaagttgatttaggaattgctttgtttgacattccttttgcactgttgtataataaatcataattgtatttatatgttactcgggaaatttacacaaagttaaacagaagaggtatgggttatgaagaagattaatttgcgtaagatgttgctggctctcgcagatgtgtttattatcgttgtcagcggtattcttgcaaattatattctcttgcttgtcggctacataggtgctgcttcaagcaaaggcttgttgagctatattgttattgatcttgtcatgtgtctgtttacgctttatataagcggaacatattcaaaattgtggcgatactttaacgcaaaggactatatggtgtgcggaattgccgtcttttcggggtttacgctcggctttgtaatctcgttgtttttgcagattccgcagagaaagattttttgtatagtacatttcgcaatagcccttgtcggaattcttgcattccgttttgttttcagaagggcttttcttgaccttaccgaggcaggaagggcagagggcggagagcgcacccttattgtgggcgcaggcaatgccggcagaatgattgttcgtgaaattcacaatgcgaaagagcagggtgatgttaataatccttcaaaaagcatcattccggtatgctttgtcgatgatgatttgaaaaagctgaatcagaagatcgaaggaatccccgttgtcggaacctgtcccgaaattgttaaaatatgtgatgaataccgcatagacaatatcattgttgcacttccgtcatgtgaggaagatgagaagaggaagattcttgactactgttccgcaacagagtgcaaaatcaagattatcccttatctcggtgagcttttgtttgatgacgggcatacacagcttatttcacaggcaaaggaaatcaagattgaggatcttctcggcagaaaacccattgagtttgaccgaaaggagattcatgaccttatcaacggaaagatttgtcttgttacaggcggcggcggttcaatcggcagtgagcttgtaagacagattgcaaagaatgatccgaaacaaatcatcattgttgatatctacgaaaacaacgcatatgacattcagcaggagcttgtgcttgaatacggcacaaagcttaaccttgtaacgcttatttcatcggttcgtgattacgacaaaatggagcttatcttcaagacatatcgccccgaactcgtattccacgctgccgctcacaagcatgttccgcttatggaaaccgttcccgaggaggctgtaaagaacaacatcttcggcacattcaatgttgcaacccttgcagaaaagtacaaggcaaagaagtttgttatgatttcaaccgacaaggctgttaatccgacaaatgttatgggcgcaacaaagcgtgcgtgcgagatgattattcagtacaaggcgcagcacagcaccgataccgaatttgtaacaacaagattcggtaatgttctcggctcaaacggctcggttattccgctgtttcgccgtgagattgaaaacggtgctcccgttactgtaacacatcccgatattatcagatattttatgactattcccgaggctgtttcgcttgttcttgaggcaggtgcaatggcaaagggcggtgagatttttgttcttgatatgggtgctcccgtcaagattacaacccttgccgagaaccttatcagaatgtacggtaaggttccgtacaaagatgttccgattattttcacgggacttcgtccgggtgaaaagctttttgaggagcttcttatggacgaagaaggtcttaagtcaacacagaacaagaaaattttcataggaaatcaaattaaaatagacgaaacagatatgctgtcaaagcttgaggttctcaaaaaaaccgcagaaaacaatgacagtgaaaagacagttgaacttttggcagaacttgtacctactttttgccacaaggtcaatgattaaccgaaaaggagaaattttatgtgcggtattgtaggttatgtaggacctaaggattgcagtgaggtgcttgttaatgctctcacaaagcttgaatacagaggctatgactcggcaggtattgcggtttttgataacggggaaatcaagaccgtaaagaccaagggtaagcttcaggacttaaaggataagcttgcagaggtcggcactccgaaaggtcatgtcggcataggtcacacccgttgggcaacccacggcgagccttcggatgtaaactcacatccacacagcggtacaagggttacaatcgttcacaacggtattattgaaaactatatggaacttaaagacttcctcatctcaaagggaagaacttttttaagcgacacagatacagaggttgttgctcagctcctcgactataaatacaacggaaatcctcttgaaacaattgacagtgtaatggctgagcttaagggttcgtttgcactcggaattatgttcaaggatttccccgacagagtttttgcggttcgccgtgaaagtcctcttatcgtaggcgttgcagagggcgagtgctttattgcgtccgatgttcctgcaattcttcagtacacaagggattattatcttcttgaccatgatgaaatcgtaacactttcacctgacggtgtttcgttcgttgacgaacaccttgatccgattgaaaaggagcttcagacagccgactgggatatggaggctgccgaaaagggcggttatccgcactttatgattaaggaaatcaacgaacagcccgaggctatcagaacaacgattatgccgagaatcaaagagggacttccgttccttgaggagtgcggcatcacaacggaaacaatcaagaatttcaaaaatatcacaatcgttgcctgcggtactgccatgcatgcaggtatggtcggcaagtatgttattgaggatctcgcaagagttcccgtaaatgttgacattgcgtccgagttccgttacagaaatccgattgtaggcgagggcgaccttgtaatcattatttcacagtcgggcgaaacagccgacagccttgccgcaatgcgtcttgcaaagcagaagggtgcaaaaactcttgcaatcgtaaacgcaaagggcagttcaattgcccgtgaggcggatatgctcatctacacacttgcaggtcccgaaatttccgttccgtcaacaaaggcatacatcacacagctttccgttatgtatctctttgcctttgagcttgctcttgcaaaggaaacaatcagcacagccgagtgcaagcgacttgtttcggctcttacaaaaatgcctgaggcagttcagtatgtaattgacaactgcgaggatatctgcaagttcgttgccacaaagcttgttgcaaccgacagcttgctttacataggcagaggtcttgactatgccctttcaatggagggttcgctcaagctcaaagaggtttcgtacattcactcagaaagctacgccgcaggcgagttaaagcacggcacaatttcgcttattgacgaggatgttcccgttatcgccgttgcaactcagacaggtattatccccaagacaatcagcaatgttgttgaggttaagtcaagaggtgcaaaagttattcttgtttgtacagacgcctgtgcaagagaactcaaggacggtgttgcggattatgttatcgaaattccgcatacagacgagcttcttatgccgattacagcggttgttccgctccagattcttgcttattacacatcaatcaacagaggtattgatcccgataagccaaagaaccttgctaagtcggttactgtagaataaacggcagtcttgtttttaattgaaaattgaaaattgaaaatgtaaaatttcggttggcggtgtgccaccgcagtcaattcgagaagatagtcagataaagaaattgcattgatgcccgatacggcattgatgcaatttttgttttatatgaaagtgaatgtttatttatataattttaatttgtacaaatctttgcgtggttatctgcaggcggataatatccgtacatacagttttgcaacaacttccgtatataacaaaaatatacaaaaacagtcgggcgacaatgttttgcattcttgcgaattgtcttcccgaccataattttccattttccattttcaattttcaattttatgcacgctcaggcgtaatatgttctttaatatcataccgcattcacgaatagggtactcttgttttcaaatttaagcggtaaaaaccttgtatttttttgacagattatgtataattaattagatatacattctaaaaagcagtattgatgaatctaatttagtttcgggggaatatacggacatgatgaaaactgtttttaaaagagctgtaacgcttgcaatttgtgccgtaacggtattttgcggtatttttgcctgttcgggcgcaacaaaagattacgagattccgcagattgacgatatgacgctttcaatgcctgacggtatgagcgctgttacaagggacagtaaaagcacagataaatatttttccgttttcggtcttgattatgacacaacaatgaaaacctttcagaacggaaatatctatcttcagggtatggataatatgtcatcggttattctgaccgtgacaatgacaaaaaatgagagcagcgagaatgttggcaactatgctcagctttcttcaagcgagctttcaaatatacgcaacaattttcttaattccgacgagtatcggagctgtactcccgaccaaaaagaaaaagctgtgtggcttgtgtttgacgcaactgctcagagcagtaagggcgatgtgaaaacctttgttgccaacacggtttatgacggtatgaacattaatatcacaatgcaaagaacagagggtgatgttacaaccgttgactacgatactttttccaaagttgtatcttcggtaaaattcagcgacctgccgttttcaaagggatttattccgtacataatcatcggcggcggtgttgttatccttattttgattgtactcatcataatttttgccgtgagaatcagaaagcataaaaaggctaagaagaataacgctattcttgaggagcttgcagtcaagtataaactcggtgaaaagggtacggactacgacattgacaattttgacgattctcccgaaaagcccgataaacgctcaaagaaaaagcagaaatatgcggaagaggttgaagaagaaccggctttgtcgggcagaagatatgctcctgagccgataatcgaaaatatggaagaaccggaagaaattacaagtgagtattcaaactttggttatgacacggatgacgccaaggaaaaagaaattgacgagataatcaactccgcaaaggcttacaagagtgagcttgagcgtgaggcatataaaaacaactacggttacgaggaaaacagcacggaggacgaaaaaaaaaaggagcctaccgcagcagatacctcagagactgaacccgaaaaaattgacgaaaacgaaaaagataacgcagaaacacctgaaaaacacgaggacataagctcttcgtcaggtcctacactcgttatccccgaacccgaacacgatctttttgaaacaagcgagcctgacgatatcgaccgtgaggacgatgccgatgttgaagaaaccgaggaggtttccgaacaaaagcatccgcttgaaaaaaaggttgacaagtacgcaaacatcattttcggcagtgacgatcccgaggagaaaaccggggaagaggttgatgatgaggagcttgtaagggcaaaggctaagaaaaacaagtttgacagcggttatgacttttttgacgaagctcccaaaaagtcaatgggggttatcaaaagctcagacctcagagatgccgaggacgttgatgttatcggcgaggttgaaagaaaagcagaaaccgtaaagcagaacgctcttgaaaaagagaataataaagaaaccgagggcgaaccgaccgataaacggtcaacggaagaggttcttgccaatgtaggcaaaaacatcggtaacgctctcaggggctttgcaggcggagttaagaattttggcattcactgcggatatttctgcaagaatgtttcaataatgataaagcgtaagcgtgcgattgccaaacgcaaaaaggcagaggaagagagaagagagagagaaagacaaaaggcagagcgtgcaagaatgcgtgccgaaagaggcgagagtgacggacttgttcaggttcacagcagaaccgaccgccgcccccagcagaatcgccaccctgcaaacagaaacaagagaagataatttcttttcttaacggaggaaaaacatggaaatgctaattaaaaacgcagtggttgtttcccctgccgacaagcttaacgaaaaaacagatattctcataaaggacggtgtgattgccgaaatcggcagcggcattacatcagacggagagattattgacgcagacggtctttgtgccgttccgggatttgttgatatgcatgtgcatcttcgtgatcccggtcagactcacaaagaggatattatcacgggatgcaaggcggctgccgcaggcggtgttacaagcctgcttgcaatgcctaacaccaatcccacaaccgacagccccgaaattgtaaagtatattcttgacaaggctaaagatgccgacagccgtgtttatgttgcggcaagcgttaccaaggggcttaaaagcgaagaacccacagacattgacgctgtgaaaagtgcaggtgcaatagcacttaccgatgatggcagacctgttgaaaacacaaagtatttgagtgacgcaatgaaaaaagctccaaagctcggcatgacaattgtcgcacattgcgaggacttgttccttgccgacggcggtaaaattaacgagggcgaggtttcggaaaagctcggagtcaagggaatccctgccggtgccgaggactgcggaactgcaagagaaattgcacttgccgccgctcttaatgagcctattcatatctgccatgtcagcaccaaaacaagcgttgcacttatccgtgatgccaaaaggagaggtgttaaggtgaccgccgaaaccgctccgcattatgtttcgctcacggacagggagcttttaagaggtgacgctgattacagaatgaatccgcctctcagaactcaggctgatgttgacgagattatcaacgggctttgtgacggtacgcttgatgccatagcaaccgaccacgcaccgcacacacccgaggaaaaggctgattttgtaaaagcccccaacggttcaatcggcatggaaacctcgtttgcggtctgcaacacatacctggttaagacaggcagaatgacgctttcacagcttgttgagaagatgagtgttaatcctgcaaggattttgaaaatcaacgcaggcacactttcagtcggtgcaaatgccgatgttgttcttataaatcccgatgaagaatggacagttgatgccggtaaacttcacggcaaaagcaaaaacaccccgtttaaaggcagaaccctcacaggtaaagtcaaaaagacaatcctcggcggtaaggtagtttttgaagattgagtttgttttaattgtagatgttgatacgattaaaattgtgcaaacggtagctgtactacgctcgggcataaatgttttttatttgtcaaactgtctgcacgaattggggacggcggctcgccgtgttcgctcaccaaataaatttaatttaatataaactttaacataaaggagtaaaattatggcacagaaaggcgacctcctgtcggtaagacaggacatcagagtagtagacgcaacaatccgtgacggcggtctttgtaacgatttcagatttgacgacaaatttatcaaggctctttacaatgcaaatgttaaagccggtgttgattatatggaattcggctacaaggcatcaaaggaaatctttaacgaagaagatttcggtaagtggaaattctgtaacgatgcagatatcagaaaaattgtaggcgacaacaaggctcctcttaaaatcgctgttatggctgatgtcggcagaacagattttaagaaggatattatcgcaaagaaggacagcccgattgacctcatcagaattgcaacatacatcaacgcaattcctgcggctgttgaaatgattgaggacgctgcaaagaagggctacgaaacaacaatcaatattatggctgtttcaaaggcaagaaccgaggatattacagcggctcttgaaactctcggcaaaactcccgtaaacgctttctacattgttgacagctacggcgcactctatcccgaggagtcaagacgacttgcagacctttactgctcaattgctgacaagtatggcaagtcggtcggtattcacgctcacaacaaccagcagcttgcttttgccaacacaattgaggctatgactcagggcgtcagctaccttgacgcaaccgttgacggcatgggcagaggcgcaggcaactgtgcgcttgaacttcttctcggtttcctcaagaacccgaagtatcaggttgctcctattctcaaaatcattgaggagtacacccacaagtttaaggctgagggcgttaagtggggttacgatattccgtaccttctcacaggtcagtacaacacacatccccgtcctgcaattcagttcgtaaaagaggacagacaggattattacaagttctcaaatgaactttatgatattatcaacagctaattaaatttgtagcggcgttcattgaacgccaatcgaaccgattgcaaaatcggttcgaccatacaaacgatttgaattaaagtaattaaccacgatataacaatacatttgttgtttattcgttttggtttcacaaccaaaacgattggcggtcattgaccgccgctacggttaagcaatgacattgtttaaatcaaaatatgaacgaacaaattgtttttacattacaaaaaatgaggagaatcactatggcatttgacagacttatcgaaaatattgtaaaaatgcagaatcctacggttgcaggtcttgatccaaagcttgactatgttcctgaatcaatcaaaacaaaatgctttgaaaagtacggcaagacgcttgagggtgcggctgctgcactttttgaattcaacaaggcgcttattgacgcactttatgatattgttcctgccgtaaagccacaggctgcatattatgaaatgtacggctggcagggcgttaaggctctttgtgacacaatcgcttatgcaaagtcaaagggtatgttcgttatcacagacggcaagcgtaacgatatcggcacaactatggaggcatatgctacggcacacctcggccatacagatgttgcaggcgaaagtattgacgcattcggtgcagacgcactcactgtaaacggttacctcggaacagacggtatcaagccgcttgcaaaaatttgcgattcggacgacaagggcatttttgttcttgtaaaaacttcaaacccaagctcgggcgaacttcaggatatgaagcttgaaacaaatgagagcgtttatgagcatatgggcaagatgtgcgaaggctggggcgaagaccttatgggtaagtacggctattcggcagtaggcgcagttgtgggtgcaacatatcccgaacagctcggtgaaatgagagcaaaacttccgcacacatttttccttgttcccggttacggtgctcagggcggcggtgccgatgatgttaaaaacgcatttgacgaaaacggtctcggtgcaattatcaactcaagccgcggcattatgtgtgcatggaaaaagcaggggcttacagaagacgactttgccgttgccgctcgtaaagaggctgagcgtatgagggatgaaatcgttggctgtatcggcaaaattaagcttggctgattaatttgcacaacagaatcacgaaatttttcgttttttatgctttagtgctatgaatttattgactttagcgtgctaaaagcgtataattaaaacgtatttatttttacaactatatttttaaattttttttaaaaagggagatatcagaaatggcaagagtatataatttttcggcaggtccttcaatgctgcctgagtctgtgcttaaaaaagcagcggcagaaatgctcgattatgagggcagcggtcagagcgttatggaaatgtcacaccgctcaaaaatttacggtacaatcattgagggtgccgaggctcttttgagagaggttatgaacattcctgacaactacaaggttcttttccttcagggcggtgcgtcaacacagtttgcggctatccctatgaaccttatgacaaagagcggtaaggctgattatgttattacaggtcagtgggctaaaaaggctcatgcagaggctgcccgttacggtcaggctaatgttgttgcttcatcggctgacaagaccttcacatacattccaaagcttgatccttcaacattcacaaaggacgctgactatttctacatttgcatgaacaacacaatttacggtactgtttatcatgagcttcccgacacaggtgatgttccgctcgttgcagatatttcttcctgtattctttcaagaccgattgatgtttcaaaattcggcgttctctatgcaggcgcacagaagaacatggctccggcaggtcttacggttgttatcgttcgtgaggatcttatcggtcacgctatggatatcactcctacaatgcttaactggaaaactcacgctgacaacggttcaatgttcaacacaccgccttgctacacaatctacattgcaaagcttgttcttgagtggattaagaacgaggttggcggtcttgataagatgtatgaaatcaacaagaagaaggctgaccttctctacggtttcctcgattcttcagagcttttcaagggtactgttgttcccgaggatcgttcgcttatgaatgttccgttcgttacaggtgacgctgaccttgacgctaaattcgttaaagaggctactgaaaacggtcttgttaatatcaagggtcatcgcacagtcggcggtatgagagcttcaatttacaacgctatgccttatgagggcgttgaaaaactcgttgagtttatgaagaagttcgaggctgaaaacaagtaattattgaatattataattattgaatattatgatataacgggcgaacgctgttcgcctgttattgtaaattcttaaaataaaaaattaaaaaggattgattttgatgtataacattcttacattaaacaaaatcgccgctatcggcacaagccgtctcggtgataactataaatacggtgacgatgttcagaaccctgacgcagttcttgtaagaagtgccgcaatgcacgatatggaatttgccgataaccttcttgcaattgcaagagcaggcgcaggcacaaacaatattccgaaggataagtgcagcgagcagggcattgttgttttcaatactccgggtgctaacgcaaacgctgttaaggagcttgttatcgcaggacttcttctttcaaatcgtaaggttattgagggttatgaatgggcaaagactctcaagggcaacggtgcagctgtcggtaagatggttgaaaagggcaagagtcagttcgtcggtcccgaaatcaagggcaagaccctcggtgttatcggtcttggagcaatcggtattcttgttgcaaatgccgctgttgctctcggtatgaatgtaatcggctttgacccgtttatgtctgtgggcaacgctctcaagcttgctcctactgttaagctcatgaagagcgcagaagatgttatggtaaattgcgactacctcacaatccatgttccgcttactgacgacacaagagatatggttgatgccgatatgattgccaagatgaaagacggtgttcgtattctcaatttcagccgtgacggtcttgttaattcaacagcagttcttgaggctgttaagagcggcaaggttgccaagtatgttacagacttcggaacagacgatatcctcggtgaagagaatattatttgcctcccacacctcggtgcatcaactcccgaaagtgaagaaaattgtgctgttatggcttgtgatcaggttaaggagtacctcgagaacggtaacatcatcaactctgtaaactatcctgcaatttcacttgcaagaacaaatgctgacgatacccgtttctgcgttgctcacaagaatgttcccgagcttctcaagaaggttctcacacagatcagcggcaatgttgaaaatatgctttcaaagagccgtggcgactatgcttacacaattattgatgtagcaggcgcaggtgcagatgaccttgcaaaaatcgcagcagttgacggcgtaatcagagttcgtgcaatctgatttcgattaaaatttaatcgttgaaaatttaatctatgaaaaaagtccgaacacgcaaaatgttcggactttttgtttgtgtgaatccaaatatgtagcggcgttcagtgaacgccaatcgaaacaattgcaaaatcggttcgactgtatttcaaaatattggtgtatggttgatttggctttgcagccaaatcaaatggcgatcactgatcgccgctacgtatcgctatatattaaacttttaccagatggtatttttttgcattggcaattataaatgttacggaaattgcaacggcacacaattctgcaacgggcaatgccgaccacacaccgtttatgcctataaacatcggcaaaatcagcattgcggcacactcgaaaacaagcgttcttgcaactgaaatcacggctgaaatcttgccgttgttgagtgcggtgaaaagtcccgatgcgaaaatattcattccgcacaacagataatttattgcaaaaattctgaatccgctgagtgcaatctgctgaattttttcgtcgcctgccgagaaaattccgacaagcggttctgcaaaaaattcagatgccgtaatcattgcaaccgaaattatcagcgtgatttttatgcataatttgaacagcttttgcagtttttcgtgattttgtgcgccgtagttaaagctgatgacgggtgaaactcccgaagtgaatccaaacgaaaccgcagtgaaaataaagtgaatgtacaaaatagcacttatagccgcaacgccttttgcgcctgcaaagtgcatcatctgaatgttgaacagcgctgttgtcacggctgttgaaagatttgtcacagcctctgacgagccgtttgccattgcaaagaggatttcactgaccttgaattcaggcttgccaaagtgcagcgtctgctttttgttgaaaaagagcaaaagcggaattgcacccacagccattccgataatggtgccgagtcctgcaccgattattccaaaatcccacactgccataaaaagaatgtcaagcacaatgtttgtgcaacccgacagtatcgagaaaacaagcatgatatgtggcttgtctgctgttacaaggtacgattggttgagcatttgccagcacattacaaagccgtacggaatcataacgctgccgtagtcaatgcagtaggggagaatcttttcgtttgagccgaacatcatgtacataggttcggcaaaaattgtgaacagcacagcaatgataacagaaatgaccgttgccgtgattgcaacaccggacataagtcggtttgcttcctcctgtttgccttctcccattttctttgcgattatagcatttgagcctgttgaaaacattaagcccacagccataaatacgagcgtgaacggatatacaatattgattgcggataatgcgtcacttccgacacagttcgcaacaacgattccgtcaacaaccgtgtaaagtgacataaaaaccatcataagaacggttggcaaagtgaatttcagaatcgtttttgctttgataggttttgcataaattgatgttgccataaaatttccttaccctcaaatttatatttttcacagaccattcaaatgattgtatcataactttgtcgcaattacaaccgatttgtctttttttgtaaaatatgctattatatacagacttaaaagcgaaaaaaggggcggttttatgtttaagggcgcagtttttgatatggacgggcttatgattgacagcgaaaggcttgtttattcaatctggcgggaaatgcttgatgaggacggcaaagagtttaatctcgacattttcaaaaagacaatcggacttcgcagtgaggattcctacgaatattacaagtcggtttacggcgatgattttgactatcctgcttacaaggcggagtcgagaatccgctattttaagcgtattgaaaagaacggtgtgcctgtaaaaaaaggcttgtacgaaatttttgattatttaaaatcagtcggttgtaaaatttcgcttgcaacttcaacctcgtcacaaacggctttgaagattatgaagaaaatcaatctctatgataaatttgacgcattcgtgtgcggtgatgatgttaaaaacggcaagcccgatcccgaggtttttctgattgccgcaaagaagctcggtcttgagccggtggactgcgttgcatttgaggacagcattaacggcataaaatctgcacattccgcaggtatgaccacggttatgatacccgatttgtcagagccgacagacgaaattaagccgatgatagattttttgtgtacggatttaagcgaagcgataaagcatttataaattgaaaattacggcgagccgccgtacccaatttgtgcaaatttgaatacacaatttatgttatatcaaaacatatgtgtatggacataatatttcatcaaggcgggcgtccaatgaacgcccctacagagaaaattacaaataattacaaatggttacattttacaaaaatacaattgaacagagctgattattatacacattttccacatagttttcaacaattgttgaaaaagaacggcaatgcctgttgggcgttgctacggttactgcggaaaatggtaaaatgaaaaataattattgaataacagcacgataatatgttatactttggtaaacaacaatctttacggaggacaaaatgaagaaaattataaataaaaagtcactcaagggtacgcttgctgttatgttgtgtgccgttatggcattttctgtctgtgcctgtgactttgattctgacacagaaccaaccaaaacggatgcacaaattcagtttgataaatattgtgacgatttgttttcggaagaacttgaggatgacgctcttactgcacattttgacatttcaaatccgtcggactacggtttgaaatatgacgaggaggactataccctcggtcatgtgtccgatgaagaaacaaaagaatcctttgatgaactgaaagaggcaaaaacggatttggaggagtttgaccgttcgggacttacttcttctcaaaagcagacatatgacacccttgaaagctactttgaaattcagctttcatatgagggtacaacagaattgcagagtatatttgcaccgcagtcgggaattattgcaaacctctttaccaccctgtccgaattcactttctatgaaaaggatgataccgacctttaccttgctgttttgaaggacacaaaacgctatatggacgagtgcattgcgttcacaagaaaacaggctgaggacggttactttatggctgaagatattgcacagcagtcaattgacgagtgcgaaaagcatattaagaatgacaagtccgtgcttgttgacgagtttgagtcgagaataaagtcactcggtcttagcgattccgagaaaaagactgttgtcgaaaccaataaaaagtattttgaagaatactacattcctgctctgaaatcagcaaattcagcacttgaaagtctcaaaaaatcaggcaaaaacgaagaaggtctttgcggttacggcaaaatcggcaaaaagtattattcggcaatcgtcaaagacaaaacaagcagcagcatgactcccgaggagcttaagtcataccttacaaacagctttacaaaggttggaatgagcatgagcaatgtttcgcaggatgacttgagcaaatttcaggactacaaacccgactttaaggacgccgatgaggtgcttgaatttttgattgagaatatcgaggaggactttccgactcccgttacaacctcttacacggcagattatatgagcgattccgcaaagagcgacaatgtgggagcgtactatgttcagggacgaattgacgatacaagcgttaatatcatcaaaatcaaccccgactttgcaaataagggtatgactcagatgtacacaactcttgcccacgaaggctatccgggtcatctttatcagtttaccgcatcaaatgcaaacacagatatcccgaatgtacgcaagattttaagctttatgggcgcaaccgagggttgggcgcagtatgcctcgaaatgtacgcttgattaccttgatacaagcgaaggcattaagaagcttatctacgcaaacgatatcctcggctatattctctattccatggtcgatgtcggtgtgaactacaacggctgggattatgaaaaagtcaaggagtatatgtcaacggcactcggttcggctgacagcgagagcgttacagccgcaacaaaagaggcgtatgaccttgcccgttcaaatccgggttattttctcccatataccgtaggctacctcaagatgattgatatgcgtgaaacagccgaaagcgagcttggctcaagctttgacgcaaaggagtatcacacattcattatgaatctcggaatcacaagcattgatgtctacgaaaaagcccttgatatgtggcttgaaagcaaaaagtaaatttttggtgataatcttgaatattttttacaggtatgatataattaacttattgatatgataaatataaattggtatggatttttctaagatgtgattcttattttcgccatacactcattatgggtgtatggcgatttttattttacgcaaggggtgttaatatgggcgttaaaacggaaaacaaaatggcttatgaacctgtcaacaaacttataattcaaatgtcggcaccgccgctgatttcaatgttttttcagtattcatacaaccttgttgacagtatgtttgttgcggggataaatgaacaggcacttgcggcagtatcgcttgcattcccgattacaacgcttatgaatgcgttgtccgtgtggataggtgtgggtgttaatgttttgattgcaggttatttgggacagaaaaatcagcaaaaggcaaattctgcagcggctctcggagtggtaatttcggtagttgtcggagtgctgataaatttcctttcgcttttcataataaatccctattattcggcttttacgcaaaacaaagagatttttgaatacggaattgcgtatatgagcgtctgcgtttttatgcagataccaaatatggtgcatattgtaattcaaaaaatacttcaggcaacaggcaatatgattgctccgatgtggtttcaaattgcaggtgttgtattcaattttgtgtttgaccctttgctcattttcggcataggtccgtttccgaaaatgggtgtggtcggagctgcagttgccacggttttaggctatgttgtttcaacaatcattgcgttgatacagctgtttcttacaaaacaaaaggttaagccggtgtttaaaaactgccttgaaccgcagatgataaagctgatattttcctacggattgccctcgtttgttatgaatgcgttgggagcattcaccgtgaattttgcaaatatgtttttggtgcgatattcggacacggcggttgcatttttcggagcatatttcaaggttcagcagttgatttttatgacggtgaacggactaattcaaggctgtttgcctataatgcggtttaattacagagcaaaagagtatggtcgccttaaacaagcaaataagagcggaacaattatcgcgactgttatgatgattgtcggtatgctcttggtgctgattttcccaaaagaaatattgtttttgttttcggcatcggaagaaatgtgtgcttttggagtgccggcaatgagaattatgtcactcggatttgtgttcagcggcttttctgcaatgattgcaacctatgaacaggcaacagacagtattatgcccggcgttgtagttcaactgttgcgacagggcgtgctgttagtccccgtaatttggcttttaaacagcgctgttcaaatgacaggcatatggcttgcgttcccaattacagaatttgttacatttcttgttgctgttgtatttgcaaaaattaaaaatcattgaataaataaaaataacaaccgccaaaatccgatataatggattttggcggttgtttgttatttaaaatatgtttaattttaaattgtttttgcaaaaatattatcagatgattttgctctgaaaattgtttttacgagcaagaatgttatataaacataaagtgcggtgtagatgattgccgtaaatttaaggctaataagctcgtaggagaacagatagtagcaatagcctctcaggcttataagcgttgacacaatcggaatccacaaatgctttgcacttactgccgcatagacaattaaaataatgtcaagcagataaccgtagcgttcgtgcattgacgaaaggaacatgatacaggtgaacacagtccacgctgttgtcagaagaaaagtttcaaggtttttcaaatcaacctttttatagatgataatgcacatcataattccgagtacggcaattgtcagaaagaccgaaaactgcttgaacagataataatatgtaatatcgtttccgtcacatatgagtgcataaaagttcggacagttcatctgaataagctttccgtagtcggtctgttccgcatatattgtgatgatatctataaacggtctacccataataattgcaggcaggcacattatcacatcaagtgcagggattataaagaaatgcagaatcgaaattttctttgtcgaaatccagtaataaagcataacgggaatgatgaatacggtttgcagcttgaatgcaaacgcaatgccgatgaacacaaacgatgcgatcggcttgtctttgtgcaaaaacaggattgcaaggattataaacgaggtgtaaattgaatcgcattgcgcccaaaacgatgagttaaaaatcaccgttgccgaaagaagtacggctgagtaggtgagtatcgctttgagccgtcggttattctttgcaaacgaataaacaagcattgcggttgaaattgcaagtacaaaatcgaatattattgatacgattttgtacgcatacagagcatttagcggcaaaagagtcataagatagattatgacttgatacggaatgttgtagttacccacctgagttgcaagccccgtaaaatcattcagcttgattatgctccaccacgaatttaaaaagctgttgaaatcatcgctttgaaaatccattccgcagactctgaggaaaattgcaataatcgttaccgcaacgagtaaaaataaaagaatgtgtttttttataaagtcaatgactttgctttctgcttttgtcatatagaaaattcctgttcgggtttaaataaaaccgattttcttcataaccttgcccattgtgcggctgctgattttaagggcaatttcatcggcttttctgtaacagctttcaagatatgccttgtctgcaacaagcttttcgtagcgttcacgaatcggacgaagttcttcaacaactgcctcgcctacagctgtcttgaagtcgccgtagcccttgccgtcaaaatccttttcaatctgctcatatgaaagacctgtaactgcgctgtaaattgccataaggttatttacgccgtctttgccctccgcatagcgaacctttgcctcgctgtccgtaacggctctcttgaacttcttcattataacctcgggtgcatcaagaagatgtacacagccgttgacattttcatcggacttgctcatctttcttgtcgggtcctgaagactcataacccttgcaccgttctttggaatgaaaccgtccggaatcttgaacacattgccgtaaataccgttaaaacgctctgcaatgtttcttgtaatctcaatgtgctgtttctggtctgcaccgacaggcactttgtcagcctgatagagaagaatgtcggcagccatgagtacgggatatgtgaaaagaccggcgttgatgttgtcggcgtgctttgcagacttgtccttgaactgcgtcattcttgaaagctcgccgaactgtgtgtaacagctgagcgcccatgcaagctctgcgtgagtgtgaacatgactctgaatgaagaaaagacttttttcaacatcaataccgcaagccataattgaagcataagcgtcaattatattcttacgcataacggcaggagtctgtcttaccgtgattgtgtgcaaatctgcaagagcgtaaatgcagtcgtattcgttctgcattgtaacccagttgcgaaccgcaccgagatagtttccgagtgtaattgttccgctgggctgtattgcgctgaatacaacctctttttttgtctgattttccattattcccctccgtgattaaagactgtttgcatactcgccgagaattttgattcctctttcaagctgttcgtcagtcggtgttgaaaagtttattctgaaactgtgacaggtttcgttttcgtcagttaaaaatgcgttgcccggaactacgcaaacctttttgagaacgagttctttgcagaaattcggcatatcaatatcctcgggcaagtcacaccaaatgaaaagaccgccgtcaattttatgatatgtgattttaggtgcgcagtatttgtcaagaagctccatgcagaagttcgctttctttgtgtagatttcacgaagctttgcaaggtgagcgttgaagtcatactttgtgatgaattcatcgcatacatattgtgcccagatatttgtatgtacatcgttgccctgtttgcacacaacaagcttttgaaaaatcggctttggtgcaattgtgtaagcaacacgcatacccggtgaaattacctttgagaatgaaccggcatagattacaattccgtccgtatcaaagctttttatgttcggaacatattcaccgctgtaacgcaggtcgccgtacgggttgtcctcaatgatgagaacaccgtattttttggcaagctcataaactttcttacgcttttcaaggctcattgtaatacccgaaggattttgaaaattcggaattgtgtaaatgagctttgcgttcggattggcttttaaagcctcttcaagcttttctgtgttcataccgtcaggctcaacgggaacacctgcaagctttgcgttgtagcttctgaatgtgttgagcgagccgatgaatgacggtgcctcgcagattacaacatcgccctcgtttacaagagcctttgagcataaatccataatctgctgtgcgcctgttgtgatgagaatgtcgtcattgtcagagcctgtgttatgctcctttttcatatattccgtaaggtgctttctcagcggagtgtaaccctccgaaacgctgtactgtaaaaccgaaatcggatcttctgcaaaaacctttgccgagatttccgcaatctcctttgagggaaatgcatcgggcgacgggtttcctgccgaaagcgatacaacgctcggatcggcggcatatttgaaaatttctctgatagcactcggcttcaggtttgaaaccctgtcggaaaacctgtattccataaaaatatctccttttaagatgataaggattttttaaaattccataccctgtaattctatcacgaattgcatatatgttcaagaaatttgactgtttttactgcgattttattcaaaaaatgtgtaatttattattttgcatttgtaaatgttaattcacggaaattgtattttttgtgctttttgtattgtttttgatgagtttctgttgtataatctaagtgataatgtccttacggtcagagcaaggcttgctttgattcaaacaggagtacactgcgcgtaattaatacacttatataattcattgaattcaaattgaatttaaaaatcttcggtttgggagagtaacactatgagcagaagaaacgattacgattattttgatcttgataatttcgatgacagcattgattcccgtgaatatcgtcgcagacagcaacagcgccgttctgcaagctatgccgcaagaccgtcatcacagcgtccagtcagaagacctgtaaaaagaagaaacaaaagaagaaccagaaacagaattattatcgttgtgagcgcattggtaattctgtttgttattatttttattataacttcaatttttaagggttgttcaaaggaagatgcccttgcaagcgttcccacgggaacagtgggtacaacggcatctcccgacgaaaccgcaaaatcttcgacagctaacaaagcagacgagctttctcctacatactttatgacaccgagcataaaggacgacaatacaaacggaactctttcgtacggcatttatgtgtggaacaaaataggctacgaattgttcagcagtgatgatgcaagagcgcagaactatgctcagacaatcaacggctttgcagacaagttcggcagctccgtaaaggtttatgatatgattgttcctaaccataccgaaatgggacttccgcaaagactcaaagacagcgacgctccgtcaacctcacaggctgacaacatcaaggcggcttatgcggctctttccgataaggtaactccgattaactgctacaaccgtcttgcggaacataatacagattacatctactttaagagcgaccaccattggacaggcctcggcgcttactatgcttacacagcatttgccgatacaaacgatttgccagttctttcgcttgatgattgcaaggaacagaaaattgacggctttacaggctcatttaccaactcggcagacggtcttgacagcgatacggtaagttattggaagttcccttataatgtaacaatggatatcacacaggcagacggttcttccgcaagctataacagtccctactatgaagccgcagagggcggttcaaacacctacggtgtgtttattatgggtgataatgccctcacggttctgaaatcagcttcgaaaaatgcggcggcaggcaagaagattgccgttgtaaaggaaagctacggcaacgcttttgttccgtatcttaccaataactacgaagaagttcatgttatcgatttcagatatttcaaacataatcttgttaattactgcaaaaccaacggaattgacgaggtgctttttatgaacggtgtaatgagtgccaacactcaggttcagcttgacagtatgagcggactttttaactga

SEQ ID NO: 146 - DNA, 17060 bp, unidentified
  source 1..17060: mol_type = unassigned DNA
ttatgccaattcagcaaagtacttaattgtacgaaccatctggctggtgtagctgttttcgttgtcgtaccaggaaacaacctgtacttcatacagatcatcagcaatcttggaaaccatggtctgagttgcatcgaacagagaaccgtacttcatgccgataacgtcagaagaaacgatcggttcttcattgtaaccataggattcagtagcagcagccttcatagcagcgttgatgccttccttggttacgtctgtgcccttaacaacagcagtcaggatcgtagtagaaccagtcggaaccggtacacgctgtgcagaaccgatcagcttgccgttcagttccggaataaccagaccgattgccttagcagcaccagtggagttcggaacgatgtttgcagcaccagctcttgctcttctcaggtcgccctttctgtgcggaccgtcgaggatcatctggtcaccagtgtaagcgtggatggtgctcatgataccgctctggatcggagcgtagtcattcagagcctttgccatcggagccaggcagttggtggtgcaagatgcagcagagatgatcttgtcgtctgttgtcagagtttcgtggtttacattgtaaacgatagtcggcagatcgttaccagccggagcagaaataacaaccttctttgcacctgcatcaatgtgagcctgtgccttagccttagaggtgtagaaacctgtgcattccagaacaacgtcaacaccgatttcgccccacggcagttcagcagcgtttgcctttgcatagatggtcagggccttaccgtcaacagtgatagtaccagcttcatcatcagcagaaacagtgtgcttgttttcgccgattctgcctgcgtaaccgccctgtgcggtatcatacttcagcaggtgagcgagcatagacggcttggtcaggtcgttgatagcaacaacctcataaccttcagcaccgaacatctgtctgaatgcgagacggccgatccggccaaatccattaatagcaactttaactgacatttggaattacctcctaaaaatttatactcttattgtacaccaaaacggtgaaaattgcaaggtctttctataaaaaaattgacataaaattatcgtttcttccgcttttctctattttgcacaaatttcaacatgtttccatctacgttttatcggcaaaaacacatttgatagaaattgttctttttttctctctttattttaggcagtttcgggatataataaaaagaagtatttgaaccgttgccacgagaatctatcttttctttcaaattgtgcagaatctttttctacatatgaagaaaacatttctttttcgtgcatattctgtaaatactatgactttgacagaaatgacactcaacagaaaggggtctgcaatgacgacagaaacactgcactttttaaaagccctctatgccaacgaaacccgtcaggtctgggttttcgatgaaacgaatacctgtatttggaaaaacgatatttccaagccgttacaatcagaagccgactgtcaagcgttgctgaaaactgtagctgctaacacaagcagccaactattctggcatgaatcgcttttgtacgctgcggaagttcagcagagcacagaactgcactgcaccatcttaaaaatcacagccgagccagtcttgaccaacgtcatgaaagaaaaaaatttccgggcaatttgtcaagaatttctcgccaatcaacgagaggcagtttttcagatttccaccattgcggaacagatctatgatgaagtggaatccaacaacattggcgacttggaacaggaggagattttctccaatttaaatgatgtcatgcgtgcatgctgccacctgctgcggcgtaccaactattatgcagagttggagaaatatgcagaatctgagagcatggctcttcaaccgatagaactatctcgactgttgtttgacttttcacaaaactgcaaggaaacactgggacggagaatttccatgaaaatgcaggcggaaacaaaaatctgggtgctctgcaacgaagcccgactctgcttctcgctgctctgcctgatgacacagctgctggctcaagggcagtcagaattaacacggactgtttttctgcatgttttttccaaggaaaatacagcaaccatttccattcaaacagaaaaaatcgaaaatgatttcccagaaatagaacctacagtcctgtttcagtcaaatgaagaagttgcaaagcaggattatgatcttaccaatgcagtgctggagaatttctgcaaaacgtataacgccaaactagaacgcaccagcaccgataccaagcaaggctatctgttaaaaattccggtttacaatgcacgcagcaacttgcaattacatgcaaatattccacgccgcagacgctccacgttcttgaacaactatcaagttatgctgtatgatatttccgattaccgattttattaaatgaaaccagataacaaaaacgtccctgtcgaagttgacagggacgtttttttcatctcatgcaaaaagaaaatttccttacagtcttttcttctgattttcaatcattgctaccaaatcatctaccgatgcagtatcataagaagacggtctgcgagatgctggctttgcagcaggtcttgcagtagatggctttgcagtggtggaacgctgcggtgttctggatgtggaagtgctccgtgtagcgaatgggtcgttgccaaagatatcatccacatttggacgcttgaatgtaccagtggaactcaggaatgtcttagaacctgtggacgagctgccagacggagcttcatgtgcaccatggtaggtctgttcctgctgcggtgcttcctgtaccggttctgcaaccggagcatctgcaccatactttccaacatagccattggtttctggctgctgcgatgcaacagattcatatggctgttccggaatcggcacattcttttgtgcctggaactgcatggtctttgccttctggaatgcagaattcggattgactgccttccgttcaaagttctgcgagatagatgacttcttggtttcaaacgatgaagtctgtgcgttctgaacagccgtatttccataacttggatagctgctgtccatgttgtaagaacctgtgttatacgttccggtgttgccgcttctggtctggtaagtcgtctgcggtacatcgtttacgaagtcctcgtcttcatagtcttcatcatcataattgtagtcttcttcgcccggcaattcatcatagctttcttcaaatgcatatgcatcatcttcccgcttgtttgcacttctgcgtaccaatgcaacaatcagcaacgcaatcagcaatacgcaaggcagtgccagcagaacgataatcccgctgaatccggttgcaaactgaataaagctgtaaagctgagcactttcataacggcaaataccacgcacactgtctaccgtgattgctggttctgtaccgatggtgtccacctgcatggtggtcggataatacttcatgatgcccgtttcttcatccgaagcaatgttcagaatccggcggattgccatgccttccttgtccttatcggaagaagtgtcttccggtgctaatacgcacaaaatcgcattgttcttggaaagcggttcgctgccatcgtatgccttacagataacagccgtttttgcgtgaatggatgcactcgcatcaatcgtggtagaaccgtccgtgctcggtttgacttccatgctgtctgattccatcagatagacatagttgccaaaaattttcggcgtatcatgctgcgagaataaaacattcagcgtcagcgtgatcaggacaacgatcagcaggagaactgcggcaacgatgcccaaaatggatagcgatttcttttttttcatgatgttcccttcctttgacacagtttgtatttctcaccttattataacatactttttgggaaatttcaatttcctttttgctttttttccgattttttttactttctgcaaaagatgccgattttctgccgtttttggcaggaaataaagagattgctctcattataccatacttatttttaaatttcaactgcaaaatgcaattttcagatatttttttgaaaaccccttgacaaatccaaaaaacatgctataatatacttgttactgtgcaccgcactgagaaaaatctgataacatttttgctggaatagctcagttggtagagcagcgcattcgtaatgcgcaggtcgcgtgttcaagtcacgtttccagctccattttttacctaaatttcaccagtggacaagagcgggcaagcaaagagggcacaaagagggaaagcgaacggacagggggcaataagaccatgtggaaccattctgaaccagaagattcttttggcgaaccgccaaagtcgcacacaaaaggaaaaggcattgcctttgcacttgttccaaccattttgctgctgacgggaatcggattccgaattgcccgcactgctcaaaaagcagaacgtctgatcaaccatcacgcatccactacagtgacaacaacggcggtcacaacgccaaccaagccagcccgtgcagctgccaagcaggtgaaaaccgaaccggcaaccgctgcaaagactgccgctcaggatgttcgcaacggaatttatacttctggcgactatgaagtaggggttgacctgccagccggaacatatctggcggtctatgatggaccttccggagatcagaagtttgtgatgcagatttcttccagttctgacccgaacgattctgatgcagttttgacaagtcaaacgtttcatccgaatcaggtttattttcaggtgatagacgggcagtttctgcacatctcatgggcaaacttttatgatatcgaacaggtttcgattacattagaaccatttgtacatgatggtatgtaccaagttggaaaagacattccggcaggcacatatcaattggaactggacaagggcgagtatgtttatccggaaaccgctggttatcagatttacagtcaaatggcttctccgcagccgcttcccaaatccaaaggcagttataccgattccatcactttgcaggatggggaatatgtacagttagatgattgtcattttcagcaaaatgccggatgattccggttttttgcgggcgtagtttagtggtaaaacatcagcttcccaagctgaggttgcgagttcgattctcgtcgcccgctccaaattttaagaagcagtccgatttgttcgggctgttttttcttttcaacaacaaaagaccgctatcgtttccacgccaaacgacagcggccttttttcaatcccaaatatgcttgtttattcccttgtttttgatgattctatttttctttcttttcaatcgccatattccgcaatctgcatttctgccccgaaagattcgatgattttcctgtctatttttctacttcagggcagatactgcatccctgcggtcaggctgctttcctcaacttctggaacaggtgttgctgcttcatcaaacagaatttctttgaaatagtctatcttctgaaaatctgccccaactgtttcccgcttcaaagcgatccactgttccatatcaatcaaatagcgtgtgatactgccgtcttcatatttcccgaccagatagcaatctcggttcagataagaaaccgttccaaatacaaacaaattctgggggacaacgactccttccaaatcttcgctgcgtgccgaaaattcctgtcccaaataaaaaatgccatcttcaaaaatagttccatccgccaacatattaacggctgtatcataattcgtccactcgtccgtacctgcatttaaaaccgtatagcactgtaaatccggataaatggtataccagttatttgccgtccagacctgttccatagaaagtttctgctgattcgcatagatgtattcccacgttgccgcttccctgctgtcgctctgggaatccggcggtgacgctacaatccgaaggacatctttggttctggttgccaagtcaatctgaaaggtcgtcaggctgcgaatttcctcgattgctcctgttccatcggatgacatccctgtgtaggaatccaccagcgaaccagaaacctgccgaaaggaaaacggctggtttaatagctgcggttgcaagtcctgtatcgttgtatttttggggttgctcccatcaatggcagttctgcccagcagttcccctgttgcagaggtactgttttccgatgcattcccattctgtgtattggggacaactgcatgagaagcggcaacttctgagagcatttccgttaaaatttccggtgtactaagaaaataagcctgtctgtccaacaaatccattttccaaacaccatctccaacatcaaaatacaaaacgccagagagatccagacagtcagaagaaattgtaatagcataatcccatgtaaaccggtcagtcatctgtacattttcttccgctacatctgcatccgaagaaagtccgctgctaaaattgatgctgtccgcattgtcttgcaaaaaggtaaacagtggaaataattcctcattggtgtagttttcataggtgcgttctgtaatctggtcttcatccaaaaaagtaaaactgccggaggaaatccagtcttttataatcggataatctttgaccgttctcacaacgtccggaatagaaataaacaaatactgcgttccgttccattctgctgctacaactgtttcttcaacggttgctatatctttcaaatagacctgataaactgaaacagttgttgctccgtctgcatcaatcagcgaaccttcacccaacgtgttttgtacttctaccctgtccggattgacaaccgccatttcctgcaaattctgtccctgatactgcaaaacaagtgattgggttgcttttggtgtttcagatgcttccggagtggattctgaagagggaacaaaaacttgttctgtgtgtttcagatgataaccaatcaccgttcccatactcagcagaaagacggctgcaactacaccgccggaaaatttctgccaggaacagcgaatgcgtttggagggcggcggtgcagttttggtatgcagggtttgaatcgaacggttcggctgctgctcggcaagagaggctacttcttctgcatgaatccgctgttgcagtcgctgcaccacggcttccggcggctgcatctgttcaaacattcgttcacattgctttttatccatcaaccgttccctcctcatcttgcagttgcgtgcgtagttgttccctgccccgaagcagctgcatccgaattgttccagcccgttttcccaacaaccctgcaatttcttctgtccgatatcccgcaaagtaatacagatacagcacatttcgatacatgggcttgaggctgcaaagtgccgcaaacaattgattatccgctggcaaatcaaacaataccggcagcggcgtggtgtccgtcagtggaacggttcgctttcggtaagtactgcccgtgattttcttgcagtaattgcaggctgtccgaatcaaccatgctttccgatgttcttcttctcgaaacgtcttgtttgcctgaaaataagcaagaaatgtttcttgaaagacatcctctgcatctgcccgatttccaccagttcccgtcagtgcaatgccatagatgagccgctgatagacctgaattacctgctgaatctccattggctgcacggcttcttccggcgagatgctttgcgagatctgcaacatatcacttccccctttcacctacaactacaagttccgacacaaaatgtcacacagtctgcaaaaaaattttttcagcgattgcaaacaaaacagggagcgtttctcctgtaaaaaacaactccctgttttatgtaattttttaaaatcctgctttttttaattcatcctgaaaagcgggtcttcgtggaaatttttcccgcaattcctgtgccagcacccgagccgcaatcggactatcctctgaaaacttcttcaacttctggcagaccgctgcatattccgagcgatttgctgccgcatccatctcttccaaaatccaatcttcatataattctgttgcccgttccgcaaagggactgcattttaaagcactaaaatacagcagcaagtcagacgggtctttctcgcaagcttctgccatcaagtccactcgattttctgctaatagaattttgcgatacaccttgatgggagcttcttttaacagttgttcgatttttacagatttcaaatcgaacggaatcaacgatttccactcttcataataatccggttcgccacctttcaacaacgcttcgcaaacatccgccagcttttcccgttctcctgttctgtgatagcagtgatagcgacatttctgccactcctgcaacaagcccggcaatgcttggttttcatattccccatccagtgccagccgttccactgtgctttcatctcctgcatcaattgcattttgaattgccatccgtcgatattctgggttggaaagatgccggttgatgaaatcgttctgttcctgcggtgttccatatcgtttgagaatttgaaactgctgttctgccagttctcttcgttcatattctgtcgaaacggcttgccgatattgcagccattcttctaccttttttcgatattccggcagagcacacagagtattcaacatcggagaaaatggattttcaatatctataaaatctacttgcagcatttttaacagaatctgataaatagcctctgctgcttttcggtctttctgtttgacaacaccctgcacaatttgcatcaatgcatccgaacaaacgtcaatctcatcatatacaatccaatccgattcacagctatttgtctgataccatttcttcaacaatcgaatcatggatgcacctgttttcaccttttctgcatcatcgttccaactctgcatggatttcaacagaaatgcaactgttttctgcaattctttccacacgattttcccagagaaaaagcggttgcaagtacgatttagaatggcaagcagttcttccggctgcaattgctctgatacacgcagctgcaaataatccaaaaaaccccgattttcctttgcatattccatcatccatgcaatcagttctgttttctcacaggcagccaattgttctggcagagcctgtttctgttccggttcttccacgaacgaagtatattcttcctgttcccgcaatgcatataaaaccgctgcctcatgcttacaaaattcttcccaatcataagggcaatcacaggaaatatcagaaatttcaccgttttcttccagttctacaaacacggtatagatttggctgccctctacttctgcttcataatatccttcttcgatgcgatccagtgtgatcacatgatgattccggtagtattctttcccacgctctaaaattctcgggctgaaatattcttcaaaatctgttatattcatacttatttttctcccttctgtttcatcggttctgcggattctatatgcttctgtccaattcgattataagcaaagctgataccgaaacacaacagcccgcaaatcaaaaatgctcctgcccataacagcggtgtctgataggacaaatccaacagcagcagcttgcacaaaaagaccatcattgcaatcaagctataaattcgcagtcctttctgatgaaaacggaatcccaccaacagcataccaaacaaaagcagcgttaaaataccactactccatgcagctcgctggaagaatgcaccgctgaccactgcccccagcaaggtcatgcgaataccaaggtatacaccgacaccatttcgattcggatactttcgcagcaaatacggcacattcaacaggaaaatcaaaacgacaaatgcagccagcaaaatcgtatcccatggaatgacaattgctgtatcgtttcccgtctgccgaaacagcgagccgattgcatgccaaaatgctgcaactgaccggaacaagccctccagcagcagcaaacaccagccctctaccatcagccagcccgttacacaaagcgatagaatttccatgcctcgatgggaacggcaatgacgaagatacaaggttacagcaatgtcaatggcaacccatgcaccatactgcaaagtaatatcatccaaaacggaaatttttgacagaatcagacgaatgccaaacaaaaacagcacatatcccagatacaagcagccattttgctttcgtacgtgccacatcacaaacagagctgcttccaacagcacccatcccagcaatgctggcaagatggacaacggcagcagccacagaaatgcgaaaatactgcaaatacacgccatcaaattccgcaggacaggttcttcctgcttgcggtcatagagcatccaaactgcaacggcagtcagggcagacagcaaatattttccggtatcccaaaagaaaaagaaccactgtgcctgcaactgcaccagcagcagccccgacagtgctgtaaaaaaatatccaactccgctttgctctgccggacgcatccgcatgcgataccaaatcaactgtgccaaagtgtacagcatcaaaagaatgccctccgcaagcaataatccaaacatcggcgtatgcatcgctcttcgcaatgtcactgtaaacaaaaccgtgagaatcagcagagaaatcgcattgcagagcaaggtagacagctggcaagcaattccgattcgacggtctgcaaactgataaagtgccgataccaacacgaaaaagaaaaaaatcaatccggtttccagtgcgttcagctgccgaaacgcaaacaacaacgacaatacgattccgcactgtccaatcaagcggaacaaaggcacgctttttcgggacatccaaagcacaaacactgcccagagcaacagcattccatacatcgcccattttccaactacagaaaaataccaataactcaagagaatggacaaatagagaatgcctgctccgcatccggcaacgctcaggaaaaagtagggatatttctttttagaaatcccgtaaagtcccgcagcggaaacgcctgctccgatgacgaacaacccgaccatctgcaagatactgggcaaaaatgcatatccaatgagaatcgctgcaaagatgaaaatcgaagcaagaattcccataacaattcttccgaacttctgctcggtatccattcgctgcggtggcggaacaggttgcatggtttgtgtctgtgatgtccacgaggcattctgttgaaaagaaggcggaggcggtgtaggctgcgtcgtctgcatcggcgaaatctccggagcgggtggcagaatggtgggtggtgcttcctggtgcggcatggtgggcggtacaggtggctgcgaggatgcaggtgcattcttttcttgcaacgcctgttccagctgagcaattcgctgctctaaccgctgtactttttcttcttctggcgacaattttgtcccctcctgtctattttttaagaaaagtataacatagtttcggttctctgtcaacgaacatttcatattcagaagcatctcggaaaatcgctcgaaataccgtttccctgcacgcttgtcatccaaattctcccttttcttgcagcatcttccgccatccctgaaaaaaatctggtttctttgcaaataagacttgaaaaaaaaagaaaaatccgctatactataatagtaaattgctgacatagtatcccctgtgtcacacaacgagagagagaaaggacgaaacagggaaatgggtgaaattcttgtaactggcggtgcagggttcattggaacacatacttgtattgctcttttacaggcggggtattcggttgtcattctggataacctttgcaatgccaaacaagaaagtctgctgcatttgcaggagattaccggaaaatccataccattctatcacatggatatccgcaacgctgacggtctgcgtcagatttttcaaacacatcatatttctgccgtgctgcactttgccggactgaaagcagttggcgaatcggtacagcagccactgcgatattatcaaaataacatcggcggtatgatgacgttattagaggagttacagaaaaccgactgccacacgctgattttttcttcttccgctacggtatacggaacacaacatactgccccctatgcggaaaccgtcacaccactttccgcaagcaatccctacggggaaacaaaaatcatcagcgaacaactcttacaagacctctgtcaggcagattccgactggcacattacagcactccgttacttcaatccgattggagcacatgaaagcggactgctaggcgaagaaccgcatggtattccaagcaacattgccccttatttagcactggttgcaagcggtcagctgccttattttcgagtctatggcaacgattatgacaccccagacggtactggtgttcgggactatgtccatgtcatggatttggcagaaggacacgtttctgccctgcaatacagcatgcagcacgctggcttctcggtattcaacttgggaacaggcagcggttgcagtgtattggaactggcaaatatgtatgaagccgtcagtggaaagccgattcccctgaagatttttccacggcgtgccggagatgtggcaacatcgtatgctgatgtatccaaagccaaaactgtgctgggatggacagcgaaacgcaaccttcagcaaatgtgtgcggacagctggcggtttattcaaaaacaagctcagaaaggagcggattccaaatgattaataatattcattacgaagaagccttaaacaatatcttgattgtcgtcattgcagcagcagtggtgctggtactggtcatgttgctggggtcgaaaaaaagccgattccggaaaaagctgagtacattctttgcagatgatacggttggaacggcaaaacatccgatggaatttaaccgggaatattacatcaccggagaaaagaatatgcggaagcctgccaagacgaagggggcaacccgaactgaaatggtcatgctggtgcagaaagtagatgaacgccggcgtacgattgacccaaatggtacatcgaaactgtacaatgaatactatgaattgattttcaagacccgaaaaggtgaaattttacatatcgtcaccacaaaggtggtctataaagaagtgccattcaatcagcagggttctttgacgttccgtggagaacagttcgtgaagtttaagtatctcggcggagaaatcacagaggcaaaaacgcattataatgcagaagtcatcaacaagtaaggagtcttgattcagatggggttatttggtgctctcaataaaatgtctgggtattctgcagaaaacatgaacaaggtatttgatgaattcctgcctgtaatggattccaaggcaatttgtccaattggcatttccctgaaagccaaagggcttttctcctcaaagccgattgcttctggatttgcaacgattacaaataccagtctttttgttatctatacgatgattcccatcaaaggcgttgcgatttatgatttccgcaatgcaaaaaagttagtcatccgcaatcagattgccaatcaaaaagtgattgatgcgaaattgttgaatcttcgcacgcaggaatttgaggatgtctgcctgcaaactgccccgaaaatcaacggctttccgcaacaggaaacgaacctcaatcaaatgcttgcaatcttaaagccgtatttgacagaataaaaaatagaacagcgtctgctcccgaaaaaggaacagacgctgttttgttttccatcaaaaatttgctcaatatggcacaacaaccgtatcacaagtatcattatcatcactgatggtatgataagttacaactgcctcggtatctttccaggtaatccaataggaaaccccgttggaatagactgcatttccatctgcatcttcgctccaagtgccatattttgtaaatggctggtatccatcatctgttccgccacttccaatcaacgttttttcaacgccatctgcatcgcagcgataaacagaaaccgttccgctgaacaaatccgagttctgtaaaacaacaaggctgtgtttctgatcgggagcatcataatacagccagtccgcttcatcttccgatgtttccccaaacactatgaatccagctttttccacttctgaaagctctgcccgtcgaaccgcagcaaatgccagataattggtcagctgttttccgcctgcctgctgataagagagcagaattgccaaagcctgattcttttgaattgccgtatattccaatggtgctgcatttcgcaattggaacgaatgaaccaccaaggtggattccgcaaaaaaagcatcgtcatattgctgtaaatattccggtatctcatccggctgtaaaatcgtttctaaataggtttgcagttcctctgtggaatcaatacgagtttctgacccatcagaaaaagcatcatttccggtaacggcacaccaattcaaagtgacctccggcgtgacagattgccatacgacttgttcatgatcctgcatctttggaattgccacctgcatccatgcaaattgctggattcccgttggtttttctttttcccagatacaaccataggaaacctgcaaggtttttgcatctgcacctgtaacctgacaggcatatgccttcattgtttttcccatcggtttcaacagcaaaacagactccgcaaaaaaatcggcatcgtatcgttcacagaacgtttcccgttctgattccgtggtgtatggggtcagataagcggtcagttcctccacagaatgaatctccacttccggcggcacgactccggcagacgatgtggacagaatatccgttcgatactgctgtgtaacctgcttttgctgcaacagtatctgttttaaaaggcagaggtcaacaatgttcacctgtgcatctaaattcagatcccatgcagattgttcctctggcatctctccgactgttttttgtcgcagcaaatacagctgcatggaaaccagatcggacaagtcaaccgttccatcctgattgcaatctccaaccagaacggtttttggcgttttcacttgttccgataacgttttcgcctgtgcagagattcccagaccagaagttgccattgcagcactcaataccagtgcagcgatttgtttcttgttcatgtttcgacaccctttctaaatgattcttttttcataaataaaaatccaatttaattataacaaattagaccgctttgtgtcaattgtaaaatacaaaaaaagtgtgaacattttatattaaagcagcatctgtcccctgaaaaaggaacagatgctattttttgaatcgctttcacaaatatgtacttctatttttccctgcatttcaactctatgcatgtcgataaaattgcaggaaaaatgtctggaacatctccggaatatatgcataatgattggaatccgcataaattttgcattctgctgttgtaacaccatctgctttcagccgtcccataagatgtgtgataccctctaaagtagaatcattttctccataataagacgcataatctgcatcttcctgttcaccgccacacacatatagcgttttgttgaaacttgtattccggttaaaataaccatattccgtctgatattctggtgggttcgattcactttccagaaaataaggtgaccagaacgccggactgccgatgatataatactgaaacggctgattttcaaataaatcagactgaaatgctgcgtaatgcgtgaaagtaccgccaagagaatgcccatataaagcagactgagaaaaatcaatggaataagacgcattcaaatatggcattaggttgtctgtgataaacgaaagaaacaggtcttttttctcacaaaaatacgttgctctcaccgcattatcggttccatctaactggaaatcatacccaatgctaactaaaatgacatcttccactgctttttcctgcatgagattccagagtgcgggatgattgccaaaccgccataccccatctgtcatgacaaacatgggatatgttttctctgcatcaaaatccggcggcaatgttacatgtatgataaatgttgtatccagttcttcatcatacatagaaatttcctgaacagaatctgcaatcgaagccactgcatccgcatcaaattcccatttgtctttgaaatcctcgcctgtagaaatggtttctattggctcttctaagacttcatatgtttcattcattacactttgaaacagtaccagcatatctgcatatgtttggtctgactcttcctgcgtcatttccccagttttcacttgctggtcaagataatcccgatacatcggctggaacgcttcaaatgtatctgcatgaatcatttctcctgtatcagaagaatagtcgagtgctccgccggtatatccgtaagatggcagaaatcctgtgtaatacctgccatcaatcaacgctccatgaatggatgtaaacgaattggattgataaaaatcaacctgcttttgatagtcttgctctgaaaactgttcctgatgttcttccatccaattcaagtaatccaagttatcccagagttctacttccacaactggttgctccgaagaactagcatctgctgtattctgccccagcagggtcaatgctccaacggaaacacgtttttgttcctgttctgacatctgattttgcagcgttccgattcctgttttcacttcttctgttgtgagagcagttgtctctgaatgctgctgtgatgtggttgcttgacaagcacagagactcaacaggcaaccaatcgcaatcccaacggtaaaaatttttttcat

SEQ ID NO: 147 - DNA, 7525 bp, unidentified
  source 1..7525: mol_type = unassigned DNA
atgaagggaaaacatagaattattgtatcaacaaagcgcttaaaatatgattttgaaattcgaagaaatctgacggtcatccggggagacagcgcaactggaaaaaccacattggtagatatgattcgggaatacgtaaacaatccatccgggacccctgtggaactgacgtgtgacaaaaaatgttatgtgctcgaaggctcactgtggaaagaacagttatcagcaatgcaggatagtattgtatttattgatgagggaaacgaatttatcaagacagtagaattcgcagatactattcagaaaacagataattattatgtcattatttccagggaatccttgccttctttgccgtatagcgtggaggaaatctatggaattcgtacttcaggaaaatacggaacattaaaaccgtgttatcatgagttttacagaatatatggagcacagactttagagaaggatatcaaaccagaggttgtaataacggaagacagtaattccggttatcagttttttaattctgtatgtaggcaacagcaattgaaatgtgagacaatgaatggaaagtcaaatgttttccattatttaaatatgcataaaaatgaacgcatacttgtaattgcagacggtgcggcatttggttctgaaattgacagagtgatgcagttgatgggtggaaaagatcaagtggtgctttatttgccggagtcatttgaatggctgatattaaaggcaaaagtagtaaaaagcaaatgggcagatcaggtgctggaaaagccgtgggaatatgtggaaagcaaaacatattttagctgggagcggttttttacggcagttttgattgaagagacaaatggttcttaccttgcatatgcaaaaagaaaattaaatccagcatatctgaacgattctgtcaaagattccatactggaacagatgacaaaaattaaattgttttagggaaaaagtgtgataaaatagcagaagatgtgattttttctgcaaaggagtaagagacaatgttaaaaggaaaatgtgtggtactcggtgtgaccggaagtatcgctgcctataaaatcgcctatctggcaagtgcgctcgtcaagcagcatgcggatgtgcatgtgatcatgacggaaaatgcaaccaattttattaatcctatcacgtttgagacgctcacaagcaacaagtgtctggtcgatacgtttgaccggaatttccagttcaatgtcgagcatgtggcactggcaaaacgggcggatatttttatggtagcaccggcttctgccaatgtgatcggcaagatggcaaacggaatcgcagatgatatgctgacaacaacgattcttgcggcaaaatgcccgaagtatgtttcccctgccatgaataccaatatgtttgaaaatccgatcgtacaggataacatcaaaaagctcggggactatgggtttcatatcattgatccggcgagcggttatcttgcctgcggggataccggagccgggaaaatgccggaaccggaaacactgttttcttatattatgaaagatcttgcctgcgaaaaggacatggtcggaaagaaagtgatggtcacagcaggaccgacacaggagaagattgatcccgtgcgttatattacgaatcactctaccggaaaaatgggctatgcaattgcggaaaactgtatgcgccgtggcgcggaagtgacgctgatcacgggaccggtggcaatcactccgccgccgtttgtaaaggtcgttccggttgtatctgccgcggatatggcagcagccgtaaaggagacagcagagcaacaggatattattatcaaagcggcagctgtggcggattatcgtccggatcacccggtcgatgagaaagtcaagaaaaaagacgggaatgccactcttacgatggaacgcacggaagatatcctttcgtatctgggcgcgcacaaaaaaccgggacagtttctgtgtggattttccatggagacggaacatatgctggagaattcccgtgcaaaacttgcaaaaaagaatgcagatatgattgtggcgaataacctgaaggtagccggagccggatttggtacagataccaatgtggtgacgctgattacggcagatgactgcagggaactggaaataatgagcaaagcggatgtcgcatcagcgattgtgagtgaaattttaaagaaaatgtgttagtattaaaatatgacagacttagaagcctattataataaatttaatgaagagaagcgtctggacagccgacacggcagggtggaatttgtgacaagcatgcattatatccatcagtgtctggatgaaattgtgaaagaacgtgcaaaagaggaaatccatatccttgatatcggggcgggaaccggacgatacagcgtaccgctggcacaggaagggttcgatgtgacggccgtggaactggtaaagcataatctgggacgcctgaaacagaagggtgcaggagtgcatgcatatcagggaaatgcaatgaatctgaaaaaattttccgatgattcctttgacgtaaccctgttgtttgggccgatgtatcacctgcatgaggaaaaggacaagcttgctgcgctgcgggaggcggtgagggtgaccagacccggaggcaggattctcgtggcgtatattatgaatgaattttccgttatcacgtatgcgtttaaggaaaaacatattctggaggcgcttcaggagggaatgctcacagaggattatcactgtacttcaaaagccaatcctctgtattccatggttcgtctggaagatattgaagcattggaccggcaggtagaggtcaggcgccggcagatcatagcggcagacggtgcagcaaattatatgcgtccgtttttaaatgcgctgacggaagaagagtttgatgcgtttctgcagtatcatctggcaacctgtgaacggatggatcttatgggtgcaagcggtcacacggtggatattcttgtgaaagaggagtctgaaaacgtatgaaaaaatggatattgccaatcctaatggcaggatttttgctgacgggatgttcttctcctgcagcaacgtcatcggctttgccctcttctacggaaaaaatcacggagacacagatgacggaagaaccgggtacgctggaagaaacggaaaccgggactgcaactgaaacgcagcaggaaccggtgatacagacggtaaaaattacggcgacaggtgactgtacgcttggggcaacacagacgcatgggtatgcaggttcctttcatgaatactatgataaatacgggcaggattatttttttaaaaatgtcagaagtatttttgagcaggatgattttacactgctcaatctggaatgtgtgttgtcaaatgcgaccgagcgtgtggaaaaaacgtggaacttaaaaggaaaaccggagtatgttggtattatgacagacagttctgtggagggggcaagtctgggaaataatcatacgtttgattatgggcagcagggacttgatgataccagggaagtgttaaataaagcagggattatcttcggattcaatgatcatgtggatacctataccacgaaggatggtatcaaaatcggaattgtctccgcaagccagttgtctgcagatgaaaaacatgccaattatatccgggatgggattgcagaacttcgggaagaaggagcggatctggtaattgcctgttgccactgggggatagagggggatcattatccgaatgattatcagcagaagctggcacaccaggtgattgactggggagcagatctgctggtcggtacacatcctcatgtattgcagggaatggaattatacaacggaaaaatgatctgctacagtcttggaaatttctgctttggggggaacaggaatccaaaagacaaagatacggcgatctatgaacagacctttacctttgtggatggggtactgcagacagatatatcagccgatatgataccatgcagcatttcttccacatcagaaagaaataattttcagcctgccatagcaaaaggcgacagaaaacagacgattattgatcatatgaatgagtattcggaaaagtacagtaaaatcggatttgacgcaaatggcagggtaatcatcagggaagagtagggggataatataattttatgtggcaagtaaataataatgataagaggaatcagcacatgaatgcaagtttttggaattatccgtcaaaacagaaaagctggccgatagacgaagaaatggaaagtctcggggaagtcattcatccactcgataatatcggtggatttgatgtacgtccgggattttatcagatgaatggtgcatatcagacagaggaaggggtaagttttacggtaagctcccatggtgccacgagttgtgtcctgctgttattccggccggcggcacaggaaccgtatgcaagaatccgcattccggaaagttataaaattggaaatacgtattctatccttgtttttggcttaaaagcagaggattttgagtatgcctatcagatggacggtcctgccgatcaggcgagagggttactgtttaacagaaaacatacgcttcttgatccatatgcgaaagctgttaccggtcagagaaactggggagaaaaaccggaaggcggaaaggattttgtctataaagcccgtgtggtgcaaagtgattttgactgggggcggtatcggaatctgaattacaaatttgaagatctggtgatctatgagatgcatgtcaggggatttaccaaagatgcgtcctccggtgtaaaaggtgggggaacatttgaaggtttgcgacagaaaattccgtatctgaaagatctgggaatcaatgcggtagaactcatgccgatttttgaatttgatgaaatggaaagtgcccgtgtggtggatggcgtgcagttgtacaattactggggctataatacggtttccttttttgccccgaatacaagttatgcatttcatcaggagcataatcatgagggtgatgaattaaagcgtctgatccgcgaactgaaagaaaatggaattgaagtcattcttgatgtggtattcaaccatacggcagagggaaatgaaaacggtccatgtttttgctttaaggggattgataacaatatttattatatgcttacaccggatggatattattacaatttcagcggctgtggcaatgtcttaaactgcaaccatccggtggtacggaggtttattacggactgtctgcggcactgggcagtagagtaccgggtggatggattccggtttgatctggcatcgattctgggaagagatcagaatggtgcaccgatggagaatccgccgattctggaagcccttgcatttgactctattctgggggatatgaagttgatcgcagaagcctgggatgcgggtggcttgtatcaggttggaagtttcccgtcctggaaccgctgggccgaatggaacggaagataccgtgatgatatgagaagctttttaaagggcgacagtggcgtagcagggcgtgcaattacacgtatcaccggatcctccgacatgtatgatccggcaagccgcggatatagtgcatccgtcaattttctgacctgtcatgatgggttcacgttgtatgatctgtattcatataatgaaaagcataatgagaaaaacggatggaacaatacggacggggataacaacggcatgagctggaactgtggggcagagggtgagacggatgatccggcggttatgggcctgcggcgcaggcttgtaaaaaatgcatttgccgcgttgttatgcagccgtggaccggctatgttttttgcaggggatgaattttgtaatacgcagtatggaaataacaacgcatactgccaggataatattatttcctggctggactggaacagactggaagaatttcaggagattcatgattttgcccgttttatgatccatttccgtgcaaagcatccgattctgcgaagggatacaaagccggcagtctgcgggttaccttccgtaagtatccataatggagagccgaaccggaattatacggactataatacacatttaattggaatcatgtatgcgggaagaaatgccgatgatacggatgatgatatgatcttttacggaatgaatgcgtattgggagcctttggagatgcgcctgccttcgttgccggagtcttatcattggaaacttgtagtaaatactttctgtgaataccaggatggggcagattttgaagcccagacacagggagatcagacacgtgtgcgtgttccggaacgttctacggtaattttactggcagaacatgatttataaaaaagagttgagcaccgctctggaaacagggcgtgctcaactctttttttcggtggtatcgggtctggttgtaatttcactggttccgatgaggtaatctgcagaaacattcagaatctgcacgatggctgcaagatccgcaacggtcggagaacgacgaccggtacggtatccgctgatcgtggacggcgaaacaaacattgcatttgccagctggatattggaaatattttgtttatacataatcagactcagacggtcaccaaaatctttgtatttatttttatcattcgttttcatacaaatgattttatagaaagttgatataaaaaacagagaaaacgcgtattgcgttttaattcttaaataaatggaaaaagatttccaaagagataagaaattaaatccatccaccgtctaaggtgagaatctgtccattcaggtaactgcttgctgtggcaagagaatatgccagtgaagcaacttcttccggggatcccatacggccggcaggaatttcttcgatgagtgcagagcgttcttcctcggagaaacaacggttcatatccgtatcgattaccccacaggcgatggcatttacctggatattgctgggggcaagttctttgcccaaagcgcgtgtaagggaattgatcccgcctttgcatgcagaataggcaacttcgcaggaagctccgacatttccccatacagaagaaatattgatgatatgtccggatttggcatgaaccatggaggggatgacctgtctgcaggtggaaaagacggatgtgaggtttgtcgcaataatccggttccagtcggtaatatccatgtcggtgagcagaccgatataagagatgccggcattgttgattaacacatcaatctggccgaaggtatccagtgttttttgcaccatgtcacagataaaagtatagtctcctacatcaccacggaagcaaagcacctgtatggagtaggttgtttcaagttttgtggcaagtgcctgcagcgtttcataagagttatggcagcaaagagccagatgatagccttcagcggcaaatcgacatgccagggctgcaccgattcctcgggatgcacctgtaatcaaagcagtatgtttcat

SEQ ID NO: 148 - DNA, 12821 bp, unidentified
  source 1..12821: mol_type = unassigned DNA
tcaactgccagaatggtcatgtttggctttttgcaccgcaaaaatcaatgcaaacaatgccactgcaaacaggcattccacaccaagatactggagaaatgtccgtgtttgaaacacttcgcccgaaattccaaacagcatattatttgctcgaacataccaatatgccggtaaaaactgccctgcttttaaaacgccgtcgcttaacatcgactgcggaacaaaaatcccacacaaaaaactcatgcccaagccgatgacctgattccaaacattcaaaaccgtatcactgggggctgctgctgataacaaaatcgcaatggctgcggctaccagtaaaaatacaaagctgtttaatatcgcataccaaagctttccggtaaccataccgccattgaaccaaagtgctgcaaccataaaaatcaaccagacaaatagtacaaataatccgctgcccagcagcatttgcaacgtctgcgaactggaagataagcaagaacagttcgtacggttgcgaatgtcttgcttttgcagtgcaatcaaggtaggagaaagtgctgcaattaacacagacaggaaaatatagggcaaatactgaaaataatagctgaaactttcattgtgggaagctggattcgctgtttctgcaaacgggtcgctgtttacaggaatttcctcagaaagcaccgtttctgccgatgaaattgcatccatacaggataatccgcttgtttcatatgccaatacagtttttacatattcagaaagtgtactgtccaataaggtatttgcatagcggtcatctaaataataatgggtgaatagcgtatccgtcttgccagcttgcaagttttctgcatagccttttgcaatcgtcatggcatagtcaattcgttcatcatagagcatatctaaaatggtattctgctcctgcttaacagaaacgaggttatgatgctttcccaaataggaaaccaatgcttgactttcaggagtctgatcttcatcaaatacacagatgttaaattgattttctgtaaaggaaaagggactactgttgttcgtggtcacaccaatcgcaatcatcaagaacacaaccacccaaatcattgcaatcggcagcttttttcgcagaattcgcaaaaatgccttaaagacttgcatatttccgcctccttgtcagtaaaaatccaatcatcgtacagagcaccgacattcctaaaattgtccccaatttcaccagataccgttgataattgccgtccatattcaggcaataaaataaatcacaaatcaacgatgctggattgatggaatgaaacagcggaacgtgttctgccagatagggacgaatgccagatgccattaagccactgcaaaaacaactcaacattgaaaatgtcattgcaattccgacttttgccccttgttgcagcgttccgaatgaaccaattgaaaaaccaagagaaacgccgaacaatccgctgagaattgcagaaagataaatcaatccaatatttccgacaaactgcacctttaatacaaataccaaataggtaaccgcaatgctcatgcagacggtctgcaaaatatagctgccgaccaagcacgccaactgactcactaattttggcgttggagaacagcattttcgtgctcccaatgcggaaagattcccctgtccattgatggcaatatgcatacccgttaaagagccaaacattgccaccatcgcaagcagattataaaaatagttggtggttgcatccggattgccggaagtcatagaaattttttgattgcccactacagtatcattcaaagcggcaatcactgcttccattttttccggagcggtctgcatcgtctgctgaatcactgccttctgaatctgatattgttcagcaaaggatttgataatggtttgttccacgccattttctgaaaaactgagcgacaaggtttctccagcgtaaagaatgccgtccactttttgttcttttagcaaggataatgcggtctgttcatcggtataagtcaccgcaaacagcggttctttctcggattccagattgtctaatactgtgtgcaagactggctgttccgttgtttcgaccactgccatgggaatggtcgaaaagagcgttgttttttcatagatactcccgaatgcaattttgaaaaatgttgcaaggacgatgggaaatagaatcaaccagaataatacatcctttacccgcaagccgctcaacacctcatattttaaattatgccagaacattgctttatccctcctgatcccgcagtgcttttccggtaatctccagaaagacatcattcaaagtcggtagggtcgtataaactcgaccaattgcaatttgctgctcctgcaaaatgtgcagaacatctaccagattatgcataccgccagaacagtaaacttttaattcttcctgttcataggtcacctgataaacgtgttccaacgcctttatggattgtaagacgatttctggcagcatgggaacttcaatggtaatcgtttcggtattcttgatgatctgcttgagttcttcctttgtcccctctgcgattttctttccctgatccataattgcaatgcgtgtgcaaatctgctcgacttcctccatataatgcgaggtgtaaataattgtcgccccgtttgcgttcaacttttgaatgccctctaaaatttgatttcggctctgtgggtcaaccgcaacggttggttcgtctaaaataatcagctttggtttgtgtgcaatgccacaggcgatgttcaaccgccgcagcaagcccccagaaagcttttttggatagaatttcagaaatttttccagtccggtaaaatgaaccgcatccatgacatactgttttcgagttgccttatctcgaatatacagcccacaaaaataatcgatgttttcatagacggtcaactcctgaaaaactgccacattctgcataatcacaccaatttgccgcttgatgtcgtattgaactggtgacatttcttttccaaaaatctcaatcttgcctttgtcaaacgaaagcagagaaagcagacaattgattgtcgttgtttttccagagccgttcggccctaacaacccaaaaatctccccctctcgaatctccagtgaaaaatgatccagtgcaatgagttccttgtatcgcttgaccagattgtcaatttttacaacaacttgttccatatttgtccctccgaatggctgtgaatggtttataaccttattataaatccaattcaacaaaaaaggaagtgtcaaatgtcatcagttttgatgacaaatgtcacttccttttcaaaaatatctcaaatagaattattcttccacctgtgcagccaaatcgttcagcacttctccggcaacgatcagccctacaacagacggaacaaacgcagtcgaacccggaatatctctccgaacgatacatttccgaaccgttcccggcggacaaacgcactgtgtccggcaagaattttccgaatcatccaacgggcggcgaggctgttcttcggaataaaccacttttaagcttttaatgccacgtttccgcaaggcattccgcatcactcttgccagcggacacatttttgtttcatagatgtctgcaacccgaaaagcagtgggatctaatttgtttccagctcccattgcagaaatcactggaacacctgcattttttgcctgctgaatgatttccagctttccggttacggtatcaattgcatcaatgacataatcatattgccggaaatcaaactggtcagccgtttcgggcaaataaaagcatttatgccgatgtaccaccgtagacgggcaaatatcttgaatccgttccgcagcagcatctactttatacttgccaacggtgctccgcagggcaaacagctgccgattcaggttcgtaatacaaactttatcatcatcaatcaaatctagcgtaccaataccgctgcgtgccaacgcctccacggcataaccgccaacaccgccgatgccaaacacagcaacccggctcttttgaaaatgctccatgacagctttcccatagagcaattctgttctcgaaaattgatttaacaagggtggaatcctcctccgattaacgggattttctttgattatagcatatttttttggaacttgcaaggattttatccgacaaaaaacgggcagggttgcagttccctgctcgtttttctcataaacatcgctaacttacagcaatccttcctgttccaatgcctgctgcaaatctacaataatatcttctgcatcttcaatgccgacactgaaccggaaaaatccatcatgaaaggcttccggataaagatactgccgctcatcattttcgcccaaaaagacaatcaaactttcatcatgtcccagagaaactgccgaggtaatcacgttcaagtgactgacaaaacggttatgggtgtcatggtctgctttcaatccaaacgataaaacgccgccatatccgggttgcatctgcttttttgcaatttcatgaccggggtcatcttccaatcccggataggcaacaaaccgtacacccggaacggttttcaagtagtttgccactttcattgcattttcgttgtgctgtttcattcgcagcggcagcgttacagaaccacgcataatcaaccatgcattgaatgggctgatggttgcccctaagttgacctgtgactgtacacgaatcaaatccaaatattctttcttgccgatgattgctccacccatcgcatcgccgtgtccattgatgtatttggttaagctctcaatggtgaaatctgctcccagttcgatcggtcgctgattatacggagaagcaaacgtattatctactgacaatagaatgccgtgttcatgggcaatttctgcaatcgcacgaatatcggaaactgtcagggttggatttcccggcgtttcaatgtgaatcagtttcgtatttggacgaatcgccttgcgaatcgcatccaaatcagaagtatccacaatggtggtttctacctgaaatttgttgttgaacagttcattcagcagccgataaacggcgatataagtgacactggaaaaaataacatggtcaccgctttgcagcagagcaaaaaataatccggacagggcagcaacgccgcttgccaatacgatgcagtcttctccgccctctaacgatgcaagcttttcctgcaagtattgctgattcgagccaccgtttctggtatacagattctttccggcactgctccagtttaaatcgcttgggtcatatggcaattcataactatttgccatggtaatcgggcgtttaattgctccggtttctgcatccacatcatttccagtgtgtactgcccgtgtctgaaagccatattctgctccataagttcgctttcccattttcttcaccgctcctctgttttttgcagaaattgccatgcggattcgcatggcaattcttgtttctgttccatggttggtttgcttccttattgtggaaaaataacctttctgtaagtatcaaaccgcacccattttgcaaagaacgctgtctggtcagcttcattggttacagcatattcctgtaagaactgctgtacctgttcgttagaatctgccaatacggcaaaacctctgccgttgataaccggaacatggtcataaacataatctgctgccggcaaaatggcagtgattttcttatcccgtacccgtacagcaacctgatcccgcaaaacgataatatcaaagctatccggatactggtaactttctccgctaactgggatttcgtcgccgatggtataagtccggttgactggctgatatttcaagacattcaagctgctggtatcataataaaattcttcaaaaatatcgcctcttgcagtcaaatcattcagacggaaggatgccttttctgtaccgtttgtcaccttttctgcaactgcttctacaacgccgcatgcagaagtcatattggttacacggtcaatcagaatcagttcaccgagtgtcttatgctttgcgaacaaatctacaacaatgccttctgtcagcaacagttcgcagacggcaatttcattcttatgtaaagaatcctttgtgacgtgttcgcctgtattgacatcaattgcatactgaacgtgtgtcagaatgcccggaatggtctttgtacccagctttaccagatagtcctttccgattgccaaatcttcgtcatccatccacaggagcgaaactgtcagcttcttataaacgccaatatctgtatttttcaccagtacgcagccacgggaaacatccacttcccggtctaaagtaatggtaactggctgtccctgctttgcggaagttgcttctttgtctgtcacgagaatgcccttaacggttgcagtttcgttgctcggcaaggtggtaatggcatcgcctacagaaatgctgccggattcaatctgtccctggaatccacggaatgtatggtctggacggcaaacacgctgtactggcatatagaagccttcttcggtatccgatgcaatgtcaacagtttccagatattccagcagcggctttccagtataccacggaatgttttccgaatgggtggtaacattgtcgccctctgttgcagaaagcggaataatcgtgatgttttccagtcccagttcctgcttcagggcatcaatctgtgcaacgatttcgttgaaacgggattcgctgtagtttaccaagtccatcttgtttacagcaaagacaaagtaccgaatacccatcagtttgcagattcttgcatgacgtctggtctgcaccaaaacgccctgagaagcgtcaatcaaaatgactgccaaatccgcaaacgatgcaccaactgccatgtttctggtatattcttcatgacctggggtgtctgcaacgataaagctgcggttgtcggttgtaaaataccgatatgcaacgtcaatcgtaatgccctgttcccgttctgccatcaagccatctaacagtagcgaatagtcaatcttaccgctccggctgccgaccttgctgtccagttccagagccttttcctggtctgcatacagcaactttgcatcatagagaatatgtccgatcagcgtggactttccatcgtctacactgccgcaagtgataaatttcaataagcctttcattaaaaatatccctcccgctttctacgttccatgctgccggctgcttcgttgtcaatgactctggaggttcgttcggaagatacagagcttaacgtttcttcaatgatttcatccagtgtggttgcagtcgactcaatgccacctgtcagcggatagcagcccaatgtccggaaccgtaccgacttcatctgcggaacttcaccgtctttcaacgggaaccggtcatcgtctaccataatcaaatttccgtcccgttctacaactggacgttctgctgcaaaatacagcggtacaatttcaatcttttcccgctggatgtactgccagatatctttttctgtccagttggaaatcgggaatacccgaatgctttcgcccttcttaatcttggtattatagagcttccacatttccggacgctggtttttcggatcccatgcctgtgcttcattccggaaagagaaaatccgttcctttgcacgggacttttcttcatcacgtctgccgccgccaaatgctgcggtaaacccatattttgcaagtgcctgcttcaatgccttcgtcttcataatatcggtataagcagagccgtggtcaaacgggttaatgccctgcttgacaccgtcctgattgatgtattccagcatttcaatgcccttttccttggcaatccggtcacgaaatgcaatcatttccttgaacttccaagtggtgttgacatgtaaaaacgggaacggcggcttttccggatagaatgctttcatggcaagatgcagcattacagagctgtccttaccgatggaatacagcataactggcttctcacattctgcggcaacctctcggataatataaatcgcttccgcctctaattcatccagatgcgaaaattcgctcatatgacttccctcctatttaatattgattcgattctttttgatttacacggatttctgtggtcgtaccgtctgtgcgttccacaatccagcgtaaaatatcgccttctttttcagtatgtaccaaactgcccataccgcccatatctgcccccagataaaaccggatggcatgtaccggacattctttcaagcaagacgtacatccccaacaatccttggggtatttgataaatgctttccggtctgcattcaggtgaatcagtgttcccggacaaacatcatgacattttccgcatccaatgcaggcattttgattaatggcaatgctcataagtttgtcctccttccaccaaatcccggaaaatgattttcaattcgccgttttccaatttggaattgacgtattttctccaatgcacatcgtctttttccggataatccagattttctgcgaagctgtgccagcgagtttcttgccgagcctttaagtgtgcaatcacactccgacagacaaccagccgttcccgcagttcatagatgtacatcagttcctgaaaatcatctgcgtgcagctgttcagaaagctgcatcagctgtacaatcttttcatctgcaatcttcaattgcttctcattgaaccgataatttgttttaatgccgcctgcataggcatccatcaccgtctgcatggcttcttccagctgttctgttgtaaagcgagaaccgctctgcgtcaggaatcgctgtacttcttcagcatgttcggtcacagaagattctgcaatgggagcagcggtatgctgttttaaaaattccagtgcagagcatgctgcgatttcgccctctgccaatgcacctgttacatatttctgtgggcatccgccggcgacatctccagctgcaaacaaaccggtaacggtcgttgcccgatgggtatccacccagtaaccgcttgcagtatgtccgccaacaatatacggctctgttccttcaatttccacattctgctgagatggattctttccgctctcaatccacttcaacgtctgagaaggtgccatattcagataggctttcagcaaagattcatcctgttctggtgtaatcccttctgttcgcaagtaacatggacctctgccttccacattctcatttaccgttccatagactcgttcggaagtcgtcaaaccatacttggtttcataaacttctccatgagaattgatttgcttggcaccgacaccttgtgccagtgttccagttggtgcaatggtatctttacaacgcagggcaataaaccgcatttcaaaggtggtcatttctgcccctgcacgaatgcccattgcataacctgctccggtattaaacggcggataccacatcttgtgacgagaaaatcccggattgtttggcttgtataagccagctgctccaccagtcgcaatcaaaactgcattggcttcgatgacataaaacgtatcattttcaatgccgattccaaatgcaccacaaatgcgattgtccttaactgcaaaatcaacaatattgacccgattcaaaaccgtggtatttggcagagcagaaactgcatctgccaaaatcggcttaatattttccccgttgatttttaagtttcggttgccacgggtgacatagtttccgtctgcatctttcagtagaaccagccccaaatcttccagctttgcggttacggcattcagccgctccgacatggtcagcagcaaatcttcccgtacaattccgtctgcatctttctttgcatagtccacataatcctgcggcactctgccctttgtgatataggcatttaacgcattcacgccagctgcaaggcagccgctgcgtttaatgtgtgccttttcacaaatcaaaacagaaacagcatcgttttgttccgcaatggtcaatgctgcatagcagccagctgtaccgccgccaatcaccaggacatctgtttgcaatcgttctgttttcacggtatcacccatttccttttctgaaatactgttcaatcgactgcacgcagtttgcaccgtctgcaaccgctgttacaacctgccgcagcggtgttgtccgcacatctccagcggcaaacacacccggtgttgtggtaacgccggtttcgtctgcgaggatatagccgctctcatccaacttgcacagatctccaagaaaatctgtatttggaattgatccgattgcaacaaagacaccatccaccggcagcgttttcgatgctccgttttgcagcagttccaaatgatctactcgcttttctcccagaacagcagtcggtacggcatccaataccagttcgattgctgcattctgctgaacggcggtctgcaatgcctgatttgcacgaaattcctgccgacgatgcaccagatatactttctttgccattctggaaagatacatggcatcgcccagtgcagtatctccgccgccaatcactgcaacggttttatctttatagaatgctccgtcacacgttgcacagtaagaaacgccttgcagtgttccgcccggcacatccaatctgcggtaagatgttccggaagcacagagaatcgtacggctttgcagtggttctccctctttacagaaaacagtaaaaccatctgcggttcgttcgatgtggtctacttccacattttcaaactttgcacccaactgctctgcgtgttcccgaaacttttcgcccagcgtatagccatcgatgcccggaagccccggataattatctacctgttcgctgactgcaatctgtccgctgcccaaataatctttttccagtaccactgctgtcaactgtgcccgactggcatagatggcagcggttaaaccagcaggcccgctgccgatgatgatgatgtcatacataattgtttactcctcaataaccagcggttctttctccgcatcatcgccctcaatatggaacgaattgagtaccggctgctccaatttcatcagagaaagaatcatataacttgcggttttgtcgtatgccaaccgcttgtcttcctgcgatggacgggatggcgattccggatgagaatgccagttgcccagtggaaccagaccgtttgcacgcatatccttgatggctgcgagctgttccttcgggtctaacgagaaatgctcgttggaatggtcgatattggtgagcagatacaccttttgaatgtgcttgtctgctccatccttgacacctgcaatcaaaccgcatgcttcattcggcagttctttctttgcatgtgccagaattttttcaaaatctgcttttttcagtgtaatcataatcctaccccatcacattcagcctgttcgtagtcaattaacttggtgattgtcgggtactttccgcaaaccgggcaattatccgtgttatgcggcagctttaccttccggaaatccatggtcagtgcatcataggtcagcagatagccagtcagcagatcgccaacgccaacaatgtacttgatggcttccattgcctgtaaactgccaatgacaccgcccattgcaccaacaacgccagcctgcttgcaggtcggaacagcatccttcggaggcggattcttgaaaacgcaacgatagcaaggaccttcccccggtacataagtcatcagctgacccttaaaccgaatgattccggcatgagagaacggcttctttgccattacgcaagcgtcattgatcaagaactttgctgggaagttgtctgttccatcaatgatgaaatcatagtcctgaatcagttccatgatattttcactggtaacgaatgtgtggtatgtaatgaccttaacatccggattcatggcttccatggtttcctttgcagattctaccttcggctttccaacgtccttggttgcatggatgatttgccgctgcaggttggacagatccacttcatctgcatcagcaatgccgatcgtaccaacgccagcagctgccagatacatcgcaaccggtgcacccagtccgccagcaccgataatcagaactttcgcattcaggagcttcttctgtccctttacgccaatttcttttaagataatatgacgggaataccgctctaactgttcatttgtaaatgccattactgaccgcctcccatgaaatacagaaattcaacattgtcgccgtctttcagaacggtggtttcaaatgttccgctttctacaaagtcatcattgatggtcacggtaacatactgcggggtttctaccttttcctgttcaatcagctgtgcaacggtcagaccgtctgcaacttcctttgtaacgcctgcaactgtaattttcatgataacataactccttatgaatttattttttcagagaatcaatgacttctgtcaattctgctttttttaccaagcctctcagacgggcaacttctgcaccgttctggaaaaagacgagggtcggggctgcctgtacggcatactgttctgccagttctgcatcaaagttgatgttgacttttaccactttcaacccgtccgggtcagcggctgccacttccgaaagcagcggtgcaatccgcttgcatggaacgcaactgtcagaataaaaatccaccagaaccaatccctttgcctgcaatacttctgccgcaaaggtttccgcatttacacgaactgccat

SEQ ID NO: 149 - DNA, 16295 bp, unidentified
  source 1..16295: mol_type = unassigned DNA
ctgataaccggggtcatacgcatggaatgtcaggcgcggttccgtcaagaaaaaattgtatagcgcaacactggcaatggagcccagcacaccgcaggtgtaaccgctggtagacaatgcggtgaacagcacccccagcatatagagcataataatattatagcgcgcaaagtccagttgcaagaaaatgaagccgatgagcgtgatgcagctcaggatgcctgcggtgatcagcagatcacggacagacggcagaagcggacgggtgaacagcttccgtcctgaaccgtagccgttctctgcagaagcatccgggatgatataaatatccagattaggcgcagtcagcgtcaatttttcagtcagtgacggtccactccagaaatggcggcgatgtacgctggagcgccccagtacgatttttgtaatgccggagatgcgggcaaactctgcgatctgctgcggaatgtcatctccgtagatcgtagaaatgtcggcacctgcctgctctgccatacgaatgtgctgctgcaagcgccgacagtcttcttttcccatctgatccgagtcaggcgtccggacatacagagctgtaaaggtccctccaaacgcctttgccatcgttgacgccgtccgcacgatctttgcattggagggagaggacgacagacacgccagaatatgttcagtgggtgggtcgttctgattcataaagatcacctgccttgcccacagtatagcacaatttgatggtcacgaccaccagccacgtctttttccttcctgtcgaaggatctccttccgcatgtgatccagcgcatctgctgcccggaaaccactcaacatgactccaagaaccatcaataacaaagcgacatccatacgatccgtcctatctttttagagccggaaacacttctggatcgatgcgtattttcccaaaaccagcatactttcatcccggcacagctgcgtatccggcgtaatgctcatatcgagctttccgtcttttttcagtgcaagaatgttgatgttatacttttttcgaatattgatctcgccgatcgtgcgattcatccattccggcggaatagtcacttccatgatggcgtggtcgtcctgcagctcgatataatccaggatgtgttcggagctgtatcggatcgctgcccactttgccagctgcttttccgggtagaccacttcatccgcaccgttgcgcagcagaaacttggcttgtacatcccgctctgcacgcgagaccacaagctttgcgcccagctccttgagcagtgatgttgtttccaacgaactctgaaaattgccgccgatggttacgatacacacatcaaaattgccaacgccaagggaacgcagaaagtattcgctggtgctgtcaccgatctgtgcattcgtcacataggaaagcacagcgttcacacggtcttcgttgctgtcgatcgccatgacctgatgacccagctcattcagttcctgcgcaatatggcggccaaaacggccaagcccgatcaaaagaatcgatttcatacttgtctcctttatccgattgcgattttctcctgcggcagacgagagtgggcagggctgctgccaaatgccgcatagatcaacgtcaatccgccaacacgtcccaaaaacatcagtgcgatcagcaccccctgcgaaaggatgcccaactgcggcgtgatgcccaatgtcagacctaccgttgccacagccgaagcagtctcatacaaacagaccgacatcggcagctgctcggccgcagcaatgacaaaggctccgaggaagaacagcgtcaaatacatccctgcgatcgtggcagcattcttgaccgcggaaccatctatgcgccgcccgaaaaattcggcatcttctctgcggcggaaggtcgcccacatattggccagcagaacggcaaatgttgtggttttcatgccgcctgccgtggagccgggcgaaccgcccaacagcatcagaaccaccatcaatgcctgtgaagtgctgcccatcgcagcaagatcagcggtgttaaagccggcagtacgaggggtaacggattggaacatcgacaataaaatgcgctgccgggcagagcctgccgtgaactcgaagcaataaaagtacagcgccggcagcaccagaagaaacgccgttgtgacaaggatcaccttgctctgcatccgatagcggtgaaagtcaaggcggtatgtacaaatgtcctcccatgtcagaaagccaaggccgccaaagacgatcagggccgcgatcactgtggtaagcaatgggtttcctgcataccgtgtcagcgaaacaaattttgcatcctctgttcccagcaggtcaaagccggcattgcagaacgccgaaatggaatgaaacagtgcataccagatcccgcgcaaaccataatcggcgcagaacgtcggcagcagcagtgcagcaccggccaattcaaacagggcggtgatccgcagaataaagcctgtcagccgcacgatgccgcccatctgtggggcagcggtggcttcctgcatcgtgctgcgctgcttgagggagatctttcgcccggaaagcagcgcaaaggcagcgcccaccgtaatgacgcccaatcctccgatctggatcagaagaaggatcacactctgcccgaatgccgaccagtagctgccggtatcctgaaccacaagcccggtcacacaaagggcagaggtagaagtaaacagcgcctcatggaacggtgtaacgcaccgctgctgtgcagcaatcggaagcatcagaagcaacgcgcccaccagatcaactgccgcaaaacctgcaataatgacctgaaaagaagaaaaacggtgctgcctgtaacgaggatattgaatcataaaagctcctttacctatccgtgtgcataaagattagcatggaatagataaaagagtcgtaaagaaaattgtagaagtataaagattccattaaaattgatcgggcaacaccaaataacaaatgctggacatcaccagttaaaaaaaacagtaatatccagcattcattcagatttctaacccatggctcccggccgcattcttcaaatattcttccggctcgctatccagaatcaaattcgcgtagcccagcggatcattgtagatgaggtagtctaactccgacctctgcgccatggtcacgtccagtgcatcctcgaccccggtgcagtcgatggaaatttttctcccatcccggagcagcagctccacgcagccggtgtccatgttgaaatgacaaactcttgcatcgtagcctagaattcttcccgcatggaagaaccctagggctatcttttttgttataaaagtgtttggaacaaacgcgccgcctgcatcggcacgatgcagaacaaatggggtttgggcacagcccaacaagcattttgcaaagcaaaatagcatttgtatagacgaatgccctgcttgctacaaccgcataccgcttatctcgctggaacacctcttgattttaacacaatcggatgttatcctattcttatagaaatctccgaagggcaggtgttttcatgtacaatcatcagctggaaaccttcatccgtgtggcggatgcaggcagcttcaacaaggcggcagaggaaagctacatcacgccaacagccatcatcaagcagatcaacctattggaagattcccttggtgtcaagctgttcgagcgtactcgccggggactaacactgaccaaagcaggccgttccatgtatcaggatgccaagtacatcattcaatactgccatgattctgtcattcgtgcccggaacgcaatgcaggaggattccaacgtcatccgcattggttcctctcccatgacacctgcccagctgctcatggaactgtggtcgaaagtgcagaccatctgcccggacatcaaattccagattgtgccttttgaaaacaccccggaaaatgcacgggaaattctggcggacctcggcacgaacattgatgtagtaggcggcatctttgatgaaacgatgctgcatctgcgcaaatgtgccggtctggaactggttcgcaggccgttttactgcgcggtttccatccatcataaacttgcggcaaaagaccgcttgcagatcacagacctgtacggcgaaaatctactgctgatgcaccgtggatggagccactatgtagatgaactgcgggatgatttatggcagcaccatccacaagtaaatatcgtggattttgaattttacagcatggacatcttcaaccgctgcgaaaacaccaacgatgtgctgctggcaattccgggctgggccaatgtccacccattgctgaaagtgattccagtagattgggattacggcatcccctatggtatcctgcactccccgaatccaacgcctgccgttcagcgttttctggatgcggctaaaatagccagcaaggaattgtatcgctgatacgccactgcaacgagaagctgctgcatgagaaatcatgcagtggctttttctttttacaaaagatgcacttgacctaaagctgactctaagtgttacaatcagggtgtcaagcgggttgtttgaacctttgagttcaaacaagtgaacaaaatggagattccgggaaatgcagacttgcgctatactggaaccagaaaaagagagtacctcaaaggaggaacgaccaatgaagaaagtcttgattttgtccggcagtccccgcaaggacggcaactccgacctgctgtgcagtgagtttatgcgcggtgcgcaggagagcggcaacgaagtgcaaaagatcttcgtgcgcagcaagaagattgtgccctgcaatgcctgctattactgccgcgaccacggcggcaagtgtgccctgaacgatgacatgagcgaaattctggacgcaatgcaggcggcagatgttatcgtgatggcaagcccggtgtacttctactccattgatgcacagatgaagatcatcatcgaccgcagccttgcccggtggacgaacattccgaacaaggagttctatttcatcatgacctgcgcggacgataaccgtgctgccatggcctgcaccttggagtgtttccggggctttaccgcctgcctgaatggtgccaaggaaaagggggtcatctacggcaccggcgtatatcggcccggcgaggtgatgtcctccccggccatgaaggaagcctacgagatgggcaaaaacgtctgatttcccagttttatataaaggagtgtaacggctatgaacaattttctgtttgaaaacaagaccaaggtttatttcggcaagggtggcgtgaaggaatatctgggctgtctgctggagcactacggcgataccgtgatgctggcctacggcggcggttctatcaagcacaatggtgtctatgatgaaatcgtcggtattctgaacgccgagggtaagcgcatcgtggagtttcccggcatcatgcccaatcccacctacgccaaggtgcaggagggtgcaaagctggcccgtgagaaccatgtggatttgatccttgccgtgggcggcggttccgtgtccgactgctgcaaggtggtgtctgcacaggccaaggtagacgaagatttgtgggagctggaaaacaccaagcatactcgtcccactgcgttcatcccgctgggcaccatcgtcacggtgttcggtaccggctccgagatgaacaacggcgcagtcatcacccatgaggaaaagaagattaagggggccctgtggggtgcacaggccgactttgctttcctcgaccccacctacacgttgtccgttcccatgaagcaggtcatttccggtgcgttcgacaccctgagccacgcgatggaaacttacttcggcaagccggacgagaacaacctctccgatgacatcaacgaagccgtcatgcgcagcgtcatccgcaacatccgcgtcctgttgaccgacaaggacaactacgaggcccgcagcgagctgacatgggcttcggctatggccgaaaacggcatcctgaaaatcggcaaggtcaccgacttccagtgtcacatgatcgagcatcagctgggtgcctacaccaactgcaaccacggtgctggtctggcggtcattcacccggtgctgtaccgtcacctgctcccggccaacaccgcacggttcgcccgctttgcacagaacgtctggggcatcgacccggcgggcaaatccgagctgaaactggcacaggctggcgtggaggctctggcggccttcatcaaggagatcgggatgcccaccacctttgcagaactgggcgtccctgccgacaccgacctcaaggctgtggccgattccaccgtgctgaccggcggctgctgcaagaagctgagccgcgaagaactgctggacatcctcaacgagtgcaagtaatcaaggaacgaaaaatacaaaaggagctatttattatggaattcattactctgaacaatggcgtcaagatgccggcagagggcatcggcaccttcctgctgaccccggacaaagctgaaactgccgtgctgagtgcgctgaaagacggtgcacggcttatcgacaccgccaacgcctactgcaacgaaaaagccgtgggccgcgctatgaagaagtccggtctgctgcgggaggaaattttcctcgaaaccaagctgtggccgaccttctacaccgatgccgatgctgtggacaagacgctggcacgtctggacaccgactacatcgacctgctgctcattcaccagcctgccggtgattacgttgccggttatcgcctgatggaaaaggcttacaaggagggcaaagtccgtgccatcggtctgtccaacttcaacgaggagcagatcaaagaaattctgagcatctgcgaagtcaagcccaccatcctccagaccgaagttcacccctacgcccagcagaaagaactgaaagccttcctcgccgagaatggcatggtgattcaggcatggtatccgctgggccacgctgacaagggcctgctggaagagccgttgttcacacgccttgcagcaaagtacggcaagagcaacgtgcaaattattctgcgctggcacattcaggcaggcaatgtggtcattcccggctccaagaacccggcccacatccacgacaacttcgatgtgttcgattttgcgctgaccgatgcagaaatgcaggagatcaccacgctgaacaaggataaacggtattatgaggtcacggaggataagctggcggcattcgccaccatgtttcctcccgtggaagatcagaagtaaatttcaagcagtttgtagctgggtgcggagagtttttttgcggaaaatgaaccagatgaaagggtaaatgaagatgaataagatcacgcgcaaaagttttctgaaagttcttgccgccaccatggtgggtggtgcagccgcttccgcgctgacgggtgcagcggctcctgtttccattgacgagacaaacggcaaggtaagccgctgggtaaagaacaacctgaacccggacggcccgctgacgattgccaagcaaggaatgttctcctccggcggcacggtcacggcaccggtggcaggcacttatgatgccaccaccaactggctggacactacccgtgcaggcaacaccgctcatgtggatcacgctaatgttctgtatcaaatcccggcagacagcaacggttggccgatggtttatctgcacggctatggacagtcccgcatgggctggataaccaccccggacggccgtcagggctgggccgatctgtttctgcgcaacggctactctgcgttcttggtagaccagccccgccgtggtgaggctggcagtaccgcccagatgagcacggacggtttcctcgatacttggtctgccaactccaaggactacaagcccggcgatcaggcatggtacacccacttccgcattggccgcgttgccccggaacggtacgaaggctcccagttcccggagggcgatgctgcacagaatcagttcttccgccagatgacccccaacaccggcgacttcgatcaggcagttgctgccgccgcactgggcgaggtgatgaaggacgtgcagaccctgaccggccacaagtccattttcgtcacccactcgcagggcggtgcagtcggctgggatgtgcccgccgacaacattgccgccattgttgccattgagccgggcggaacccctgccatcggctcggagcagtacacgaaactgctgagcgcaggtattccaatcgctatctactttggcgattacatcgacaacggcccggaagatatcatgtccaccagcttctggcggcgggtacgggacggcgcactggcctttgccgcccagtacaatgccgatggcggtgactgcactgtggtcgatctgccgaaaatcggcatcaccggcaactcccacttcatgttccaagagctgaacaacaaagagatcgctgatcacatttatcagtggctggagagccgcgcactggcatgagcggttctctgagattcccggcattttacatagatagaggcgtgtttcgtatgaagaataaaatttcccgccgccagtttttgcaggttgctggcgcatctgctgccgccctgctgctggcttcctgctccggcaattccgctagcagtgtgagcagttcttctgtggcttccagtgaagccgcatccagcgcggctgcttcttcggaagctaccagcacggtaacgactacgggcaaaacactggtggtgtatttctccgccaccggcactacacagggcgtagcgcagaccatcgccgacaccgtgggtgctgacctgtttgaagtcgttccgtctgacccctatacctccgatgatctgaactggacgaacaatgacagccgcgtttcccgtgaacacaacgacgagggccttcgtgctgtggctttggaaagcaccgatgtggacggctgggacgattacgacaccgtgttcatcggctaccccatctggtggggcattgccgcatggcccatgagcagctttgttgccgtcaatgacttcaccggcaaaaatgttgttccgttctgcacgtccctttcctccggcatcgggcagagcggcaagctgctggcagaattagcggacgccggcacttggctggacggccagcggttcagccacagcagcagtgaagccgacattgcaagctgggtaaatggcctgaacctgtaagcagagcttttgtgtgaggagaattttctcttgcggtaatttttgaaatagagggtaaatcaaaaggagaatgtttgtatgaaagcattgctcatcaacggcagtccgcggcccaacggctgcacctttacggccctgaccgaactggcaaatacgctggaagccgagggcattgaaaccgagatcgtccatgtgggcaacaaggacatccggggctgcatcgcctgccgccgctgccacagcaccggctccaacaagtgcgtctttgatgatattgtcaacgaagtagcccccaagttggctgaagccgatgcctttgtcattggcgcaccggtgtactttggttccccggcaggcggcgcgatctcctttatggaccgcctgttcttcagtaccctgaacatcgacaagaccatgaaagtgggtgcttcggtcgtgacctgtcggcgcggcggcaacacagcttcctacgatgtgctgaacaaatattttaccatgtgtgggatgccagtggccagcagccagtattggaacatggtctacggcggctctgccgaggaggtcaagaaagatgccgagggcttgcagaccatgcgcacccttggccgcaacatggcctttttgatgaagagtatccagataggcaagcaacagatcggcctgcccgaaaaagaacctgctgtcttcacaaacttccatcattgaggaagtgttccatattcctccttctttgttgcagggaaagccgggacggaaacgtcccggctttcccattttcctgatttttgcgaggtgattttatgcgcagcgtgattttcgcggtttccaccgctttgaccgttttattatccgcctgcaccggggcggcatcctctgtgccagtcaatacggtttcttcggtttcggccagcacatccatcacgacctcgtccgaagtggattcggctgtttcggagagtgcttcttcggaaaccggaaacatccagactgggcttgtccgggagcagacattggacagcactgaggagctcatccattacagctactacctgccggaggattacgaccccacccggaagtaccccatgatggtggtcatgcccggctataacatgatgtggttcggggaatcttcctccggcagcaatctggactggacggggtttaccagctggacgaaccttggacaggatatgatcgtagtgtctgcccagctcaccgactggggcgacacttcggcgcggcaggccatcgctctgacggagtatttcatcaatcactttgccgtagataccgcccgcatttacgccgcaggctactcggctggcggcgaaaccatgtcgcgggcagttgccatgcggcctgacctgtatgcagcttatctgcatggagcatcccagtgggacggcggttttgcgcccattgcagaaaacggcgtggcggtctacatctacatggcgcagggcgatgaatactacggtgtgcagaaagcacgggatgcctacaacggtctgcacgatgcttacgccgccgcaggctggacggatgaacaaatcgacaccgtgctgcaaatgcagaccccggacaacgcctttttcgatgcgcaggggcttcacgtctaccatgctgccgcaaatgttgtctttgatgatgccgatattctgaactggatcgtttccaaacacaagtgataggagagaaattttgaaccgacggcaattcacaaaacttctggcgggtgcagggctgcttctggcaggctgccgggcaggtactgcacccagttcctccaccccggaaagaaaggattccatgcaaacgaccacccaaacttatacccgcaccacgcccatcgaaaccgtacggaatgacccggttttcggtgattatgggcagctgatcttccctgtggaacgctcttattacagcggcgacacgctggagcagctgcatcttacctactataacaacatcgacccggacgaaacagtggacatctgcaacaccctgcgccagcgtgcagcggacgggcagaccatcttttacgatatttacaccgaggacgaaaaagctgctgacccggataaagctgacaccggcttattctacttcaagggtaatcccggcgcaaaattttccatctgcaacgcaggcggtgcgtttgcgtatgtgggggccatgcaggacagctttcctcatgcactggaactttcccgcaaggagtacaacgcttttgcgctcatctaccgccccggcgcacagaccgcctgcgaagatctggcacgggccattgcctttgtctttacccatgcggaggaactggaagtagacaccagcggctactccctctggggcggttctgccggggcacggatggcggcgtggctgggcagctacggcacggcatccttcggtgaacaggcgtatccgcaaccgggagccgtcatcatgcagtacaccgggctgggggaagtctacggcaacgagccgcccacttatgcctgtgtgggtgaccgggactacatcgcagacgaacgcgtgatgcgctggcgcattgaaaccatccgctctcagggcacccctgccgaggttgaagtctttccgggccttgcccacggttttggcttgggcaccggcacctctgccgaaggctggctcgatcatgccgtagcgttctgggaagaaaacacctgaaaccgtgaggaaactgttatgacgaaaaaatggactgcactgcttctcgcggcagtacttgctgtcggcctttcggcctgcgacaccagccgcgcagaagcccccggcagcaatttggaaagcggagtttccgccatcgaggatgctatgacgaaacgaaatgaaaccgaaagcagctcattcccggcaggcagcgacctgcgcatcggcacttctgacgacaccgttgcaacgccggatgatttcccggcagcatacaactacgacactggaaaaattgaggattattcccgtaccgccatgctgcaaaagatgccggaaccagtggacaatgcgaccgtgctgaacacctcggcagaccctaaccatattcaggcgttgtacctgtgggaagaaggcaacgttccggctaaaacgcagttcaccgctgcaatgaccggttattttgacaactgggatttccgcccctatgtgacggcaattcccgtccgcaccggagtacaaccgaaaggtgctgtggtgttgatggcaggcggtgcgtatcagttccgtggaaactataccgattctctgcccacggcagcggctctacgggagctgggcttccagaccttcatcgtagattaccgtctgtcgccctacacgcaggaggaaggcgcgctggatgtagcgcgggctgtccgctttgtgcggcagaatgcggatgtttacggcattgaccctgacgatattgcagttatgggcttttccgcaggcggcattcaggcgggcgaatttctgatgcactacgatgaagatgtcaacggcactgctctggatgaaagctatgtacccgatgcgctggatgctattccggctcacgcttcggcggcgggcatgatctattcgttctatgggcggctcagcgtgggcaacatggacccggactggctggccgagggtgatctgccgccaacattctacgtttacggcacggaggaccccttctaccgccaattccagcagcagtatgatgtgattcggaatatgggcatttccaccggacgcatcgtgctgaatggctggccccacggctttggctcggatggcggctgggtgaacgattacgctgcatggctggaaagtgtttttgcaaataaggaggaattttaacatgaagtatcgtactttggacagcgacctgaccgtttctgctgttggtctgggctgtatgggcatgagccatgcctacggcgcacctgccaacaagaaggaaatgaccgaactgctggcgcaggccgtgggtatgggctatacgttctttgacaccgccgaagtctacggcacaccggataatccccacgacaacgaggaactggtgggtgctgccctgaaaccctaccgagataaaatcgttctggcgaccaagttcggcatccattttgacatgaccagtacggcagtcaacaagccgctgatgccggattcccgcccggaagttatccgtgcatcggtagatgcctccctcaagcggctgggcaccgaccatattgacctgtattatcagcatcggcttgaccccaaggtacccattgaggaagtggccggtgtaatggctgacctgattcgggagggcaagatcactcactggggcctttcggaagccaccgaggagaccatccgccgagcacacgcagtctgcccggtaacggccatccagaaccgttactccatgatggcccgctggtacgaaagcctgttcccggttctggaagaactgcacattggttatgtggcattctcgccgcttgcaaacggttttctctccggcaaatacgataagacttccaagtttgaagcaggcacggactaccgcagcgtcatgccgcagttccagccagacagcattgaccagaactgcgccctgctggaactgttacaccgtcttgccgccgagaaaaatgcaacacctgcccagatctcactggcgtggatgctgtgcaaaaagccttatatcgtaccaatccccggcacccggaaactcaaccgtttacaggaaaacgccggtgcagcggatattgtgctgtctgccgcagaagtggctctgattgacgaagcactggcgcacatggaaatgtcgcatgtgtttggcgggagccgcattgtgaaagagtaagacagcagctttgacgatgagcttcaatagatcatgcggaggtaattgtttttgataatgaagaaagcaaagagtatgaacctttgagtactaacaggtgaacaaaacggagattctgctcagggggtcaaacggttataatgaaaccagaaagagttccagcgcggcagggagcggaaaagcaggattccgctccccgatctgaaacaaatctaaaaagaaaaggagaacacgattagaccgcaacgatgacggcaccggtacgctggaacgctacaaaaaggattccttttactgatatcagaatgtcatcaaaaccaacggcgcatgcctgaatgaacaggtaaaaaagataacaaggcattttgtcttgcggaaggagaagattgttcatgaaaaaagttgaagtcatcgtccgtactacggaggacaattttcctccgcaggaaaaagttgttttgaaattcacagagcaaacggtttcttcggcagaaaccgatgccgtgctgagttatcccggattggaaatccatctggagcatcatcgagtattcaaaaatggacaggaagtgtatatgagccgttatgaatatggcgttttaagtttaatggcacggcatccggggcaattgttcacaaaagagcaaatatttgaagctgtctggcatcaggatagtgaaagctgcctgacggccgttaccaatgcaattggacggcatccggcagaaaattgaagatgacagagctgcacctgtttatatccgaacgatttccaaccttggctaccaattcatgccgactgtttccgcagaatccgtagaaaaagattcctgataacgataaaagccatactcaaagggcagtttagaccttgggtatggcttttatcattataatgtggacgactgaaaactgacatccttgcaatcgaaaacaatcttttctaaaatacagaaaaaagattttaggaggcgataagatgttaacgcatcaaaaaaagcctgtctgctgccgtaagccagaccgccccgaagcaagcacaatcgttccgttccaccatccacaatcgtgccgatgtgttatattgcgccagcttcccgccatgggaggctggcgtttttgcgcttttggagccaaagtgccgcagtccaccgtttctcctatgatacagcagcaaactttatatttgggagggaaagtcatgctcgatcataagaaggaagcgattacggaacactggcagttttgccccaagtgcaatataaagctctatcgaatgaccgccgactgcactggattcatccacataaaatgctggcgttgccgggaaatgttatggctcaacctttccattcgagccaagtaagcattggtttcataaaaatcgggtgcaacgcactctgaatatggactgttagcaccgagcaacgggccattgccacatggcaatgtatgaaacgtagcaccaaatggccgggcagcagcttgactgaaagattttcgcttgaaaatccttcggttggctgttgtccggctattttttatagcttcagatggcctgctcccgaaaaggagcaggttttatgtttgccctcttttcgtggctgccccaagcggcgaaatatccgtagcatctccgaattttcgacttctcacgttttatcgaaaatttggaggttacacatgggctttaattatggtttggaaaagaagaattttgaccgtcagtgggctatgttgcgcaagcagtacgaggacgctggcatgagcatcgaagcgattcagacaatgtacgaatatgactggtctgttttcaatgctgcgcgttcttaccagaaccacacgcaggaaatcaccgctccgtcctttgaacagggcgaagaatcctactcgccccttatgaacaagtatcaggaagcaatttctgttaccgaacactaccgcgaaaccaagagccgcttcacatggattggcgaaattgagaatgaacggctgttgtctgctcttgaaaatttgtcggacgcagacctcaaccttgtcaccatgtatgcctatgaggggtacaccgtcactgaaatttctaaagttttaggtgtcgcgcagcctactattagtatcaaaatcaagagaattactaaatttttgaaaaacttcaatttcaatgctacgaattga

SEQ ID NO: 150 - DNA, 7463 bp, unidentified
  source 1..7463: mol_type = unassigned DNA
atgaaaatacatattattggttgcagtggttcaggaaaaacctatctagcaaatgcactttcaaagaaatataatatttctcatttcgacttagacgatattcaatgggataataacgccaaaggatatgggaaattgcagattctgtggtgcgcttcatagcgtaaatgggcatgtataagcgtcctttcacaagtcattcacagcgtaaataaaagaaaaacggtataaacaaatattattttctttgtgagctatggagataagactctttagaggcttatcggaatgtccagcgaacagaaacataatatttcgtttataccgttttttcttttcataaacctataaaatcacgacttgtgagaggacgattatatctgcccttcacgccctaggaaagcaccgcggaatctgcgacactacgctagttaaactccggtttatttaccaagttcagtctttaaagctgctgtcaatgccggaacgatcttatttaagtctccaacaagaccataatcagctacatcgaagattggtgcatcttcatctttgttgattgcaatgataagatcagaatcttccatacctgctacgtgctggattgctccggaaataccgattgcgaagtaaatctgtggacgaactgttttacctgtctgtccaacctgaagatctactggtaaccagccattctctacaacagcacgggagcagcttacagtaccgccaagaacttctgctaagtcctctaacagtttgaagttctctttggaacctactccacgtccaccagataccaaaatcttagcttccatgatatttgctgtagattttacagcttttacaacattgaggatttcaacatatctgttgttaggtgtgaatcctggattgaattcaacaacgtttgcttttgcaccagcgattggagcaatcttctgcataacacctggacgaacggttgccatctgtgggcggttatccgggcaagcgattgtagcgattgtgttaccaccaaatgctggacgagtcattaacaactgattgtgtttctgctcagattcttttcctggagcagcaaccaatgggaaatctccgatttcaagagaagtacagtctgctgtaagacctgttttaactcttgctgatacagtaggaccaagatcacgtccgatagctgttgcaccaactaacatgatctctggtttgtactcattgattacagatgccagtgcatgtgcatatggctctgttctgtattcttttaattcaggatcgtctacaacgataacacggtctgcaccatactctgctaactgatctgctaatcctttgacgccagagccgatcaatactgctgtaacttctgtatttaagtcttttgctaaatctttacctttgccaagcaattcaaatgcaacaccgtctaatacgttatctacctgctgtgcaaagacaaatactcccttatattcttctaatgacatcttattcaccacttttccttatttttttagataatgtgtttctctttgaatttaccgatcaagtatgctacggattctgctggatcaagatttactttctcaccagctccttttgctactttatcagatgcttttgcaatctttgttggtgatccttttaatccaaggtcagaatcatcaacatcctttaagtctgctcttccccaaacagtcacttctttgtcacatgcatcaaagattccacctggtgtcatgtaacgtggctgatttaattcagaaagtgctgtcactaagcaaggcatttttgcttttaattcgtgatatctgtcttcatactgtctcttaacgataacagaatctccatcaactttgatgtctgctgcgtaagagataactggtaaaccaagatgctcagcgatctgtggtcctacctgtgcggtatctccatcgatagcctgacgtcctgtgatgataagatcgtaatctaagttacgaagagcaccagcgattgtagtagatgttgcccatgtatctgctccacctaatactctgtctgttacaaggattgcatcatctgctcccattgccattgcttcacgaagaactgcatcagcctttggaagtcccatggtaagaactgtaacttttgctcctgtctcatctttgattcttaatgctgcttcaagacctgctttgtcatctgggttcatgatagcaagcattgctgctctatcaagtgttccatctggattgaattttactccaccctttgtatcaggaacctgtttaatacatactacgatattcatgtattttccactccttatgttattatattttcattaatcgcggattactcgaaacacttcgtgtttctcgtgcgcgttgcgctctcaaatgtctgtcagaaatatttcattctcgcaagcgtgattctatatttcttccattcattttcaatccgctagatcacgtctatttaagcaatgcacctgagataaccatgcgctgtacttcgcttgttccctcatagatctctgtgatcttagcatcacgcatcatacgctctacatcgtactctctgatgtatccatatccaccgaataactgaacaacttctgttgtaacagccattgctgtctctgctgcgaataattttgcttttgcagcttctacagagtaaactttctggtttgcttttgccattgctgctttataaactaacatctgagcggcttcaattcttgttgccatatcagctaacttgaactgtgtattctgctgctgtgcgatagaacgaccaaactgttttctttcttttgtataagcgattgcgcgctctaatgcaccttctgcaataccaagtgcctgggaagcgataccaatacgtccaccatctaatgtatgcatagcgattgggaatccttttccttcaggtccaagtaacgcatcctttggaattctgcagtcttcaaaaattaactcataggtagaagatccacggatacccatcttcttctcttttgttccgaaggagaatcctggagcacctttttctacgataaatgcggagaagttctttttctttcttcctctcttgtcctctgtaatgcttgtgatagcgattacaatataaacatctgcaactttaccattggtaatgaagcattttgatccgtttaatacccattcgtcaccgtctaaaacagcttttgtctgagcaccctgagcatctgtaccagcacctggttctgtcaatgcgaaagcaccaagtttctcgcctgtagcaagtggtctgacatatttctgtttctgttcttctgtaccgtaagtcataattggatcgatgcagagagaagtatgtgcggaaacaacaacacctgttgtagcgcaaacttttgataactcttctacacacataacatatgttaatggatcacatccctgtccgccgtactcctttggtaccgggattcccatgaatccatattttgccattttcttaactgtctctgctgggaactgttctgtctcatcagtttcctgtgcaagaggttttacttcgttttcagcgaattctctgaacagggaacgcgccatttcatgtttcttgtctaaagtgaaatccatgatttcaaatcctcctaaaccttaatatctgttaattactgagcgtcaactggtgtttttgtgcggtcagcattgtatacatagaatccttttccgctcttagcaccaaggttaccaccacgaaccattttgcggatcaatgggcatgcacggtatttgctgtcgccagtctctttgtaaagaacatccataatagcaaggcagatatcaagaccgatgaaatctcctaactctaatggtcccattggatggtttgcgccaagtttcatagctgcatcgatacctgcgatatcagatacaccttccattttgatgaatgctgcttcgttgatcattggaattaaaatacggtttacaacgaatcctgctgcttcatttacctgtacaggtgtttttccgatctcaacagagattttcttaatagcttcaacagtctcatccggtgtatttacaccagcgataacttcgatcaatttcatacggtctgcagggttgaagaaatgcataccaaccattggacgtgtaagaccatttccgatctctgtgatggaaaggcttgatgtatttgaagcaaagatacactctggttttgcgatcttatctaattcctggaatgttgttttctttactcccatatcttcgaatgctgcttctacgatcagatcgcagtctgcgcaaaggtcttcttttaatcctggagtgattttagcaaggatagcatcaacagcttcctgtgtcatttttcctttttctacaagtcttgcataacctttctggattttggcttttccgccgtcagcccattcctgcttaatatcgcagagagctacctcatatccttctacctgggcaaatgcttttgcaataccctgtcccatggttcctgcaccaataacaccaactttcatgttagtacctcctgaatttattctgaatttttaatatgtaatggaaacgcccggaaaagcagtcacccgctttccggacagttttatctgaattaattatctctcaacgattgtagagcatcccattccgccaccgatacataatgtagcaagacctctgtgggaatctctcttctgcatctcatgcaataatgttacaaggatacggcatccggaagctcctactggatgtccaagtgcgattgcaccaccattaacgttaactttggacatatcgaaatgtaaatctcttgcaactgcgatagactgagctgcgaaagcttcgtttgcttcgatcagatccatatcatcgattgtaagtcctgtcttagctaatactttcttagtagaagcaacaggtccaacacccatgatctctggctcaacaccgccaagtgctccagctacccatgtagccattggtgtaacaccaagttcttttgctttctcttcgctcattacaacgattgctgctgcaccatcgttaataccggaagcgttacctgctgtaacaagtccaccctctttgccagagcagcattttaattttgctaaagactctgctgttgtacctgcacgaggtccttcatctttcacgaaatctacgatctcttttttcactttaaccggaaccggaacgatctcatctgcaaatttaccttcagcgatcgctttttcacatttctgctggctgtttgctgagaactcgtctaattcttctcttgtgattccatatttatcacatacgttctctgctgtgatcatcatatgataatgattgaatgcatctgtcaatgcatcgttaaccattgtatcgatgatcgttgcattgttcatacgatatccgaaacgagcttttgtcatagcatatggtgccattgacatattttccataccacctgcaacaacgatatcagcttctcctgccatgatcatggtagctgcatcattgacacatttcaaaccagaaccacatacaacgttgattgtgattgctggaacttcgattgggagtcctgctttgatagaagcctgacgtgcaacgttctgtccctgagctgcctggattacacaacccattttaacttcgtcaaccatctctggtttaacacctgctcttcttaatgcctctttgataacgattgcacctaagtctgctgctggagtattgcttaatgctccacccattttaccaattgctgtacggcatgcgcctgctaaaactacttttcttgccattttgaattctcccttcggttttgtggtacaaaacaccgctcataatatgcagtatattttgtttccttcataataaatctgccgaaaaacgttgttatttttttaacaatcttttagtaaaaaaaataaatctaaaatctcttcttttaaatttaaattttctttttcctgattttctacgtttttatgtattcggcttttttattggcttttcagtactttctcatgctaccatattttattttcaaatgcaatagctttctttttttttcacacttttttcagtatttaaatttggtttttacctattttatatactgtttttcgttaaaaaattatcatgcgcaaccgctcaattccacaaaaaagagacgttttttgtatatttcttacaaaaacgtctctttttctatttggtttcaaaaatgatttttatgtaatttgcgcattgacagccgtattagtagaatatgtgatgtccgatgatcgttccttccaatccgtcgatcacagttctgaaatagagacagctgtttgtgatgttcccgttaagcacctcctgtgccgcctgcatacaggtattatttaccccctgctcgaggcggagcgcatatcgtccactggctaccggagaaaactgtccgctctgataaatcacaccggatacggtattcgggaaataagagcttcgcacacggttcatgacaacacttccgactgcaagctttccctcatatggttcaccgtctgcctcacactggatgatcgcacctaacaggtaaagatcactgtcacttgggacataagaaaattcgccgttgttctcagcctcctgacgcttgatctccgccattctcgcagcgtcttcttttgccttctggatctctaactgtttttccagttcttccatccgtgcgatctgactgttgatatcattgacttttccctgggcgctgctcaattcagaattggtctggctgatatttgcctgtgttgaactgataaggctgtttacagaattctgttttaccttcatgtcatcctgcatggcgagcagttcctgctgctcactctcgagatccttcttctgttcttcaagagaagcttcctctgccgcaatctgttcctgcacctggataaactcctctaatttctgtctgtcatacgaattgatctccgaaatatactccgtccggttcagaaaatcagaaaaggatgatgccgataacagcatctcaagcatcggtgtatttccattttcatacatatagcggatacgtatcttcatatcctcatactggctggctgactgctgctttgcagcttccagattatcctgcgtctgatcgatctcatcctcaagatctgacagttcttttttcttatcattgatctgtgactcaagggcattcatggacgaaacaatgttggtcatctgtccatttaaattgttcaggtcgctctctagctggcctttttttccattgatatcatcgaccgcatcctgtgcatctttctgctggtttttcagattgttgatctgattttttgcattgtcaatatcttcctgcgtgacatctgcataagctgttgtcacggtaagacagcacactaatgctgccgctgcaaatattctttttaaggggatttttttcat

SEQ ID NO: 151 - DNA, 8830 bp, unidentified
  source 1..8830: mol_type = unassigned DNA
ttatttgtcgttgttcttgttcttctcgttcatcattgcgcggactttcatggacagaccgaacaggttgatgaatccggttgcatccttatggtcatacagctcaccggtagtgaagcttgcaagactctcagaatacagagaatatggagaagttgttccggctttgatgatgtttcctttgtacagtctcatcttaacctgaccggtaactgtctcctgtgtcttttcaacaaatgcctgaagagcctcacggagagggcagaaccactttccttcgtatacaagatctgcaaacttggttgctacgagcttcttgtatgcaagggtttcacgatccagagtcagctcctctaactgcttgtgagcttccatcagaattgttccgccgggagtctcataaacaccacgggtcttcatgccgacaacacggttctcaacgatatcgataataccgataccatgcttgccgcctaaacggtttaattcacgaatgatatcagaaactttcatctttgtaccgttaatagcagttgggatacccttttcaaaatcaagtgtcagatattcatcctcatccggtgccttttcaggggtaacaccgagaaccagaagatcatcgtagtttggttcgtttgcaggattctccagttccagaccttcatggctgatgtgccagatattacggtcacggctgtaagaatgagcagcatcaaacggaagattgataccgtgtgcctgacagtatgcaatctccgcatcacgggaatccagcttccattccggctgtctccatacagcgataaccttgatgtcaggagcaagagccttaattgaaagctcaaatcttaactggtcatttccttttcctgttgcgccgtgacagatcgcaacagcaccttccttacgagcaacctcaactaatttcttagcgatcagaggtcttgcgaaagaagtaccgagtaaatatttattctcatatacagcatctgcctgaacagttggcatgatgtattcatcacataattcatcaacaacatccagaatgtataacttggaagctcctgaatattttgctctttcatccagtccttccagctcactttcctgtcctacgtcgatgcaggcgcagataacatcataatcataagtttcttttaaccaagggatgatagctgttgtatcaaggccgcctgagtatgcaagaacaactttgtcttttgccatttctaaatcctccttaaaatccgtctgtgtggaatatgtacatttctgatatatcataattccatttgttgaataaaggacatatcgtcctgtctgcaaattaatatataacggtagtgaatattatgcaagtgttttttgaatagaaaagtggaaaaaataaaaaagaaacaaaatggaagaaaacagaatttacaatatagaagagggatagaagaaaaaatacgatcatgaaacaaaaagaataaaatatgaatattacatatacaaatatgaataatattcatatacgcattgaattacaggaaacatcggtttgtatataatgaatagaaagttgtaacaaatcagaaaaaaatagtagaaataagaaaaaataggaataatgtttgagtatcttgtagaaatgctatataatataatagactgtggatactggttattatagactgtgaatgggaaatcctgaagttagaaatcacagccagatataataattcgggtgaaagaatgaaaagttttttgattaacaggaggaataagagatgaaaggcattattttagccggaggatctggaacaaggttatatccgttgacaaaagtaacatcgaagcagctgcttccgatttatgataaaccgatgatctattatccgatgtcagttctgatgaatgcagggatccgtgatatattgatcatttcaacaccgcaggatactccaagatttgaggatctgttgggagatggaagtcagtttggtgtaaatcttacttatgctgtacagcctacaccggatggacttgcacaggcttttgttattggtgcggattttattggtgatgatactgtggcaatggttctcggtgataatatttttgcaggccacggacttaaaaagagattacgtgcagctgttcagaatgcggaaaacggtaagggtgcaactgtatttggttattacgtagatgatccggagcggtttggaattgttgaattcgacaaagacggacgtgcgatctcgattgaggaaaaaccggaaaagccaaagagcaattactgtgtaacaggtctctatttttacgataataaagttgttgaatatgcaaagaatctgaaaccatccgccagaggcgagcttgagatcaccgatctgaaccgtatttatcttgaacatcagcagttaaatgtagagcttctcggacagggattcacatggctggatacagggacacatgagagtctggttgatgccacgaactttgtaaagacgatagagcagcatcagcatagaaagattgcatgtcttgaggagattgcatacctgaatggatggatttccagagaagaagttcttgaagtatatgaagttttgaagaagaatcagtatggacagtatctgaaggatgtattagatggtaagtatctggatgtgcttgcatagcttttgcagataaaaagataaaagatagattgaggagaaagataaaaatgagtaaaacaatcatagtaacaggtggagccggctttatcggttcaaattttgtattccatatgcttgataaatatccggaatatcgtatcgtatgcttggacaagctgacatatgcaggtaatctgtcaacacttgagccggtaatgaagaatccgaatttcagattcgttaaagcggatatttgcgaccgagatgccgtttaccggttatttgaggaagaaaagccggatatcattgtgaactttgcagcagagagtcatgttgacagaagtatcgagaatccggatatcttcttaaagacaaatattatgggtacggcagtgcttatggatgcctgcagaaaatatggaattgagagatatcatcaggtatccaccgatgaagtgtatggagatctgccgcttgacagacctgatctgttctttacagaagaaacaccgattcatacaagctctccttacagcagctcaaaggcagcagcagatcttctggtattggcataccacagaacttacggattgcctgtcagcatatccagatgttcgaataactatggaccgtatcatttcccggagaaactgataccattaatgatcgcaaatgcattgaatgacaagcctcttcccgtatatggtgagggcttgaatgtgcgtgactggttatatgtagaagatcattgtaaggctatcgacctgatcattcataaagggcgtgttggcgaagtatacaatgtcggtggtcacaatgagaaacagaatattgagatcgttaagatcatctgtaaagaacttggcaagcctgagtctctgatcacacatgttggcgatcgtaaaggacatgatatgcgctatgcaatcgatccgacaaagatccataatgaacttggatggcttccggagacaaagtttgaagatggaataaagaagacgatccggtggtatcttgataacagagaatggtgggagaccattatctcgggagaataccagaattactatgagaagatgtatggtaatcgttaatttgtggaaaagaggtagagaaataagatgggacagattaaagttacaaaagcaccgatagaaggattgtacattattgaacctgcagtacatggagacagcagaggatattttatggaaacctataaccagaaggatatggaggaaaatggtctgaatatggtatttgttcaggataatcaaagtatgtcgacaaaaggcgtgcttcgcggactccattttcagaaggaatttccgcagggaaaactagtacgtgtgattaaaggtgcagtttatgatgttgctgttgatctgagatcaggaagcgaaacatatggaaaatggtatggtgtggagttgacagaagagaacaagaagcagttctatatctcggaaggcttcgctcatggatttttagttttatcggatacggcggaattttgttataaggtaacagatttctatcatcccggtgatgagggcggtctggcatggaatgatcctgaaattggtattgagtggccgaaggtctttggtgaatatcagggaaacgcaagtgcggaagggtatcatctggaagatggaaccgcgctcaacctgagtgataaggaccagaaatggctgggattaaaggaaacatttaagttctaataaagtttttagttgcagagaggatgtctttcactaatggataataagactacacagtatgataaacgtctatcggaatacagagacagactgttacaacggaataaggaaatgacagcggacgatgatgagctgatcgattcgatcatcaatcagaatgaaccggaaaatagcaaagctgacggtaaagcagatggtacatctgaggagaaaatggcagattctgtatcagatgcttcttcggcgaaagaaacaccggtatcggaatcctataaggaatatgcagacaaattagagtcggtattaaaagaggttggggttgcgacagcggagaagtccgaatcgaagcagccgacagagagaataaaagaagaccgtgtagccgaagaacggaaaaggcttgcttataagaaactcggttatgaagaacagacgcaggatgataccatggaatctgaggcagatatggatgaatcggaagaagatggacatacatttgctgatgtatttgcaaatctgagagaaaatgtccgggatgcagtaggtgaggctgagaagaaggtcagaagccggaagcctgttagatcagaagtgggtaatgatgaacagaaacgatcatttcgactgaatacactcggtaaatgggcggttacaggcattgtattgttcgtagtattcctgatccttacgatcggttatgtatcggcgaataaatcttataagtataatcagatggatattcgtccgatcaagaacagtgatctggttgtcaacgaaggtgtaaaagaacagacaaagggttataccacgattgcactttacggagttgattccagagattcaaatctggatacaggaacaaacagtgatgcgattattttactcagtatcaataaagatacaaaagaagttaagatggtttcggtatacagagatacattgttacagatacagagcgactctcagacaactcataaggtcaattacgcatatcagctcgggggtgctttaatgtcgatcaatacgttaaatgcaaatctggatcttgctatatcggattatattaccgttgattttaatgctatggcagatataatcaatgcgctgggaggcgtagaggtaacggtaacagaagatgaggtaaataatctgaacaagaatcttgcggaacagatcggtatttcgggaaaatattccgagggcgttcatgaggcgggaacgaaggtattaaacggacagcaggcagttgcatattccagaatccgaagcacgggtaaaggagatattaccagaaccatgagacagcgtaccgtattacttggtctggtaaataaaatgataaatgcagacagtaagatgatatcgaatctgatcgatgtatcctttagctgcatatcaaccagtcttacaaaggatgaagtgacttcgttggcgaaagatattgctgactataagattacaggaaatattggattcccgttcgcttatacaccgatgtccttagatggtaaaggcagtgtgatcgtagcagcggatctgaatgcaaatgttacagcattacatgaatatctgtatggaacatcgggttatactccgtcgacttcagcatcatctataagcacagaagtatcatcggaaacgggagtggcagcaacagaagcaattgatatagataaggtatcaggcgaaactgctgttacaacacaggaaagcagtgaagcttcgagtgaatcggcaacaaatggatctgaaacaggttcgacaacagaagtacagacgatcacgacacctccggcgggaatgatagaaaatgaataatatcagaatccgtctgagacttttcgcagggaagattccggtgctgacagtgatcatatgtgtgatagtattatttttcgggaaatacagacagatggaatatgtccgggcgaatgaaaccggagtaatagagatagaaaatacagagatcttaccgaagcaaatattttgcaggcgcaataccaatgacagcttccctgtgtgcggtgtagtgcttcatgactggattaaagatataagacagaatcttgcatgggcaggtatgacagaacgatatatcgctcatatgggactgcatgaaaaggtatgtcagatgatgtttgtaaatcctgagaatctggttttaagtcatgatgtgaccaagctggataaggaatttaagtcggcgcttaagaagtatcctgtcggtgggattatgctgaaatcaaaaaacatacagacgaaaaaacagctgaaaaagctgttgaagaaaatgcaggataattctgatattacactcttccttgctgtagatgaggaaggcggaacggtcagccgcgtaatgcagaagcttggcaatatagatggcggcgatatcggatcaatgtatgattacagaaatctgggtggagatattgcgtatgagaatgcaagacagatcggagataatctgtcgtattatggatttaaccttgattttgctccggtagcagatgtatggtcaaatccggggaatacagtcataggaaagagagcttacagcaatatctatagtgaagcggcggaattaattccatatgcggtgcgtggttttcacgcaggcggagtgctctgtactttgaagcattttcccgggcatggcaatacaaaagaagattcccattatggaaatgcatatgtatatgagacgaaagacgatcttgaaaacaatgaatttcagtcgtttcgggcaggaattgatgcaggagctgactttgtgatggtagggcatatgatcgtaaccgatatatcgaatatcccatccgatctttctaaagaaatcgtgacagatattcttcggacagaacttggtttttccggagtgatcattacggattcattgcagatggaatcaattaccgatacatattcagccggggatgctgcgatttatgcggtggctgcaggaaatgatatgatattggaaccggaaaatctggaacaggcagttgaggggataaagcaggcagtaaaagatcagattattgcagagactcagatcaacgaaagcgtaagaagaattttggtgatgaagcatactgctattgagaaagaatagaccgattgggcaaatttaaacacaaaacgcacaaaatgcggattatatattttaaaagtaaaagacacgatttcaatggaaagaccattgcaattgtgtctttttgatttgcaataatttatattggctatacaaaacactttataaaattaaatttacaaactatctgacaatttgacgaaaaaagttgtttacaaacggaaaaaaagatagtatgattacaaatcataaaaagcacagagccgcatttgagaattactatcagataacctgactataagatctctacaggtactggcaataagttggaaaggaaaacgagcatggaagataacagaaacgtagtaaatccagggttatacagtgaagaatacgaacatgataactgtggtatcggtgccgttgttaatatcaaaggcattaagacacatgaaaccgtaaataatgcgttaaagattgttgaaaatctggaacacagagcaggaaaagacgcagaaggaaaaaccggtgatggtgtaggtatccttcttcagatttcacataaattttttaagaaagcagttgcggagctcggatatgatctgggtaaagaacgtgattatggtattggtatgtttttctttccgcaggatgaactgccaagaaaacaggcaatgaagatgtttgaggttattgtcgagaaagagggacttgagttcctgtgttggagaatggttccgactactccgggaatccttggaaagaaggctgttgatgttatgccgtgcattatgcaggcatttatcaagagacctgacagcgtgaaaacgggacttgattttgaccgaaagctttactttgtcagaagaatatttgaagaaagtaatgatgatacctatgtaccatcactttccagtaaaacgatcgtatataaaggtatgttcttagttggagaacttcgtaagttctataacgaccttcaggatccggattatgaatcagcgatcggacttgtacattcgagattctccacgaatacaactcctagctggcttcgggcacatccgtatcgttatctctgccataatggtgagatcaatacgattcgtggaaatgaagataagatgatcgccagagaagagacaatggaatctacgatcatgcaggacgagatgtacaaggttatgcctgtacttgatccaaatggttccgattccgcaagactggataactgtcttgaattccttgtattaaatggtattccgcttccgctggcagttatgatcacgatccctgaaccatgggaaaatgatcgatttatgagccaagagaagaaagatttctatcagtattatgcaacaatg

SEQ ID NO: 152 - DNA, 11322 bp, unidentified
  source 1..11322: mol_type = unassigned DNA
tcatactatctcacctgccgtttcccgatagatttcaaagaacttatcctcaagtggcatttccgccgtcacatgggaaagcgtgtcacacaaaaccatttttccgttgatgataatgccgacacggtcgcagatcttttcgatcagtgaaaaaatatgtgttgatacaatgatcgtttttccttctgctttcaattcctgcagaaaatcggtcacaaccttcgccgtgataacatcaagtccgtttgtcggctcatcaaaaataatgatctgcggatcatgcaccagtgaaatgatcagggatactttttgtttcataccagtggagagatttgcaaccttcacttccgcaaactcatccacaccaaatttctgaaacaggatacgttttctctcatcccgctctgcctgatcgacaccgtataattctgagaaaaaatcaaacagatagttcggagtaaaaaattcttccagttttaattcactcgtcagaaatccgatctttttccgaacaccgttcggatctgtcacaatactgcttccgtcaatcagagcatcacctttatccggtttgatcagcgttgctaacatgcgaagcgttgttgtctttcccgctccattgggccctaataatccaaaaacttcccccctgtaagtacaaaaggaaagatcatccaccgcaaccttaactttttccattgtcttttctaatttctgctgtttttttgacaagtgaaatgtcttggataatccactgactgtcaataactcttccataaccctctccattaaaaatttctatatcatgatcgtgatctacactcgcttcgctcggcagtcttattatatcgttccgtcatccatactgtcttcaatatcatcatagatatcatcgtaaatatgatcatagatgtcattatagctgctataagatccaagtcctgtaaaaaaaatcaggatatacagaataatcgatgctgcaaaaccgattccacctgtgatcaaaccaacgatcgccattccttttttgtttccttttacaagctgtatgataccaaaaataatcgcaagaataccggtgatccagctgatacaggtacagaacagcaaaaccgtaatgattccaagtactaacgacgcaataccaaagccttcactttctgacttattacttccatacctgccagccggttgtccgtaattatattctgtacttccgtttgactgtccatagttataacctgcactgtcatttgactgtccgtaattataatttgtattgccgtttccatatgacgtatttgtataatacggattgtctgtcatagtcttttctgaatttacacgctcttcatttccggtcacagtcttctctaaatttacacctgctgtaccatcagtcgtacttttctccaggctgacaggatttccctgatttacattcggctcatcatttccataattccagttattttcttcactcatactctcactacctcttaattaaatccgaccactttctgtgacagtcgatatgccgcaaccgaaatctttctgcctcccttgcccggcagattcattgcatttcccataattccggcgcgcagatgatggaataaacggatgtcttgatccttaatatatttccacagttcacgttttttcagaagattttcctcagtgccggagcggatcagcataatcgtggaaatgaccgtgatgatttccagataattaaacatgtaatgacgcagttttcggtttggaatcttccagagatcaaattcatctaccataatcttatttacattgatctgctggtcgatacggctgatcatcactttctcattgaccgactgatcttccctgccaataaagtaacggtaaaaatctacatccatataatacagtgtttttacacttggtaatggtttgtacacataaatattatccacataaaatgtatgtttcggcaactctaatccacattcacgcagcagttttgtacgataaatcacagaatgcatcaaaatgtactgaccctttctgaaacgtgacacatcattccaggtaaaaatctgattttggggcaggttcgtgtagtgcatcacttttttatgatgcgcaccttctttttcatatacataattggcaataaacatatccagggtctgattgccgccggtcagctcacgaagtttatctaaaatcttcttataagcctcctcatctacccagtcatcgctgtctaccactttaaaataaagtcctgtcgcattgcggattccagcattgacagcctctccgtgtcctccatttacctgatggattgcacggatgattcccggatatttcttctcataggcatctgctatgtcaccggtgctgtcttttgacccatcatcaatgatcaggatctcaacatcatcgccacccggtagcagggatttgatacagttttccatgtaatcctgtgaattgtaacacgggatcgcaaatgtcagtaatttcatatatgaatcctccgattatctttttgtattttctgccatgatcgcatcagcaagttccatcgcctttttcgtcatcgcatcgatattatagtatttgtattctgccagtcgtccgagcagataaaaatgcggcagtccacctgcaagcgcatgatatttttcatagagttcctggttctttggctctaatatcgcatagtaaggaatttctccctccgctcctgtgtaggcaaacggatactctttcacgattgtggttccgtccgtgttcttttgtccggtcagatacttaaactctgtgattcttgtaaaatcctcactgaccgtgtaattgaccacgctgtgtccctgataagattctttctcataatgttcaaagtcaaatcttaaggaacgatatggaagccttccaaactgacagtcaaacaactcatccagtgcgcccgtatagataacctctccgtcaaacggtgttccatcaaaataaatctgattttcttcaaaacgtaatctctctttacagtcaacacctgtctcaaccgtgatgttctcatggtctaacatgcgctcaaacatcggtgtgaaaccttccttcggcactccctgatatttgtcctgaaaatagcggttgtcataagaaaccagcaccggcacacggcctgtcacttccgggctgatatcctccggtttttgtccccactgcttcatggtatattttaaaaatacattttcgtacacaaactgtgcgatctcgcggatgtccggatcttcattttcccgcagtttcatgatcggcacgcggcttccctctccgtatgcagcaatcagtttctgctctaatgcatctgctttttccttttcatataccatatgaagcgtatttaaattaaacggaaccgggatcagacgatccccgacctttgctaccacctcatgtccgaatgcataccagtccgtaaatcttgagagatactgatatacttcttctattcctgtatgaaaaatatgtggtccataattatgtattaatattccatgttcatccggctcatcatagcagttacctccgatatgactgcgtctctctaaaaccagtactttctttcctgcttcctctgcaagctttctcgcactgacagcacccgcaattcctgcgccgatcacgatacaatcgtacatgtaatcctccttgttttgcggagcaaaatccgagtccattgacgaggagaggattttcctccttgttttccactttgttttaccatagccattctattatacacattttcctaccgcaaaccaatcaaatttttctttagatattcttaatttctgccaaagtatgtagttgttcatattttatttacataattctcacaaacagggcatacggcggtcacaattccccgatatactaaattcaaagttaaggcaacaagttaaaatttttcatagaactttttttcatacctgatgtaagtcaggtagccttgcttatccgataagcaaggttcctcccagcaaatagtgaattacttcacttttcatacacactctttttcataatgaatagccggtgctgttgcaccggctccctctttttataaatattttcttttaagctttcttttcatttccaagaagaatgttcatatatttcgcatacgcagcaaaagcggacggaatagcatatttttcttttgcatcttctgcttccacaaataataatccatctgcacgatttttttcacactgcacctgtggatgcatttccggctcctctacacggactgcataacctgtcatgtgccattcgatatgggaaaaaatatgtttcgcctcacctaacggctgaatacggatcggtgcataccccatctcttttaccatggaaagtacttcctcctgtcccatatttccttccacattcggaagctcatacagtcctgccaaaagtccctttgccggtcttttccggattgcaaccttctcatcatcccttaaaatcagaaccgtttttttctcgatctttcgcggttttgccttgctcttgactggtatctgtccgatcagttcctgtttttttgcctcacaaaaatccttccatggacattcggtacaaagcggtgcaccgtttggcacacagatcgttgctccaagttccatgagtgcctggttaaacgcaccggcaagattctgatgatatacctttgccctcagatcatctgcatcctccatccatggaaatacatttttttcatttctgccgtctgccccatgcatcaatttttctaataatttttccatctcattacggaatgactgtttcatgatatccgtatcatccgcagaaacgcgcgttaaaacacggagcacatttccatcgaccgccggaaccgggattccgtatgcgatagatgcgaccgctcccgctgtataatggccgatcccctttagtttcaacagtttctcataatctgccggaagttgtccaccataattttccacaacttccacagccgctttttgcatgttcctgacacggttataataacctaacccctcccaaagctttaaaagttcatcctccggacacactgcaagtgcctttgcatccggcagtgccgtggtaaaccgctcaaaatacggctttaccgcctccactctcgtctgctggagcatgatctccgaaacccacacccggtatggagtcggttcctctcgccatggcaatacacgggcatgatttaaaaaccattgcaataatggggatacaagttgctttaagtcgtaatcttttaacatgtatgtctcaaactttctttgttatatagcagccttcatgtctgcgcttatttttttcaaaccagtaccttatttgaggtcaaactggctgacaaatactgcgatcttctctaaacatttcttaataatgtctttggaataagcataagagcagcggatgtaaccctctgcacaacttccaaatgcgtctcccggaatgactgccaccttctgttcctgcagcagacggttacaaaattccatgctggtaagtcctgtttttttgatcgacgggaatacataaaatgcaccttccggttctgtcacatccagtcccatattccggaacccgtccaccatgatctttcgtctctcatcgtattctttacgcatcacatcgatctcttcgtcacgaaccggactcgtcagtgcttcaagcgccgccacctgtgacgttgttcctgcagacatggtcgtaaactgatgaatcttattcatatgaaaaataacttccgcaggacccgctgcaatacccatacgccatccggtcattgcaaatgcttttgaaaaaccatttaataccacacaacgctcatacatatccggcagcgccgcaatagatgcatgctttttgccataggtcagctctgcataaatctcatctgtaatcacaaaaatatcatgtgcggtcacaacctcacggattgcttctaaatcctctttttccatgatcgctccggtagggttgttggggaatgagatcagcagtacttttgttttatctgtaattttttcttcaagttcttccttcgtcaggcggaatttattctctgcctttaacgggatggaaaccggaatgccgccacacaattccacacacggaatataggaaacatagcaaggttctacaactaacacctcatcccccggatccaccagtgcacgaagcgccagatcgattccctcactcgcccccattgtgatcagaatttcattttccctgtcataatgaagtccaaacttttccagatactctgcagatgccgcacggagttcgaccgtaccgcgattatcggtatactttgtctcacctcttttgattgaagcaatcgctgcctccctgacatgttccggtgtcggaaaatccggctcgccgacaccaagtgacaatgctccctccatcgtatttgcaatatcaaaaaagtccttgatccctgaatccggcatctcctttactaccttagataagtatgatttgcttgtgtccatggtttttcctcttttctgtgtctttgtcaaagtatcataccacctatcatagcactttttctaccaaatttatagtgaatttttcccataatctattgacaaattcagggaaaagctgtacgctattaataacgtatattgttaattttttatcaaactattcaggagggttccaaacgatgagcgattttaacaatttaaaactggaagttgctgaggagattgctgttcttacaatttcaagaccagcagcattaaacgcattaaacagcgagacattagacgagttaaacacagcattaactgagatcgaagcaagagacgacatcaaagtcgtaatcttaaccggcggtcctgacaagaaaggcaacgaattcaaatctttcgtagcaggcgctgatatttctgagatggtaaactttaccgcagcagaagcaagagctttcggtatgagagcttccgtaccattcttcaaattaatgaacatgcgtcaggtaacgatcgcagctgttaatggttttgcacttggcggtggatgtgaaatttccatggcatgtgatatccgtatcgcatctgacaacgctactttcgcacagccagagacaggtcttggaatcattcctggattcggcggtacacaaagacttgcccgtttagtaggcatgggacgcgcaaaagagatgatctttacctgcgattccgttgatgcagcagaagcttaccgcatcggtcttgttaataaagtagttgctccggaagagttaatgaacacagcaaaagctatggctaagaaaatcatctccaaaggaagctacgctgtttccgttgcaaaagcagcaatcaacaacggttatgatatggacatcaagaacgctgttgagatggaagcaaacttattcggcgtaacctgctctactcatgacaaaacagaaggtatgactgctttcttagagagaagagctgctgatttaacagatttctaaaaaaacatatcaaaaaaacgggctgataattcagtccgttttttttgatatactcatattccaaatttaatgtgcaggtaatctctgattacctctacgcatttttcacgcccccatcaaaaccgacaccaccggcatcgtcaccgcagcaagaattgccgtaagcgcaactcctcttgccgccagatcataatttccatcatactgctgtcatactgccgacaggcgttgcgagcatgaccatacacacgcctaaaatcatcggatcatcaacaaactgctttatgatccatgtgcctgcaatcaaaaaaagcgtcagaaccctcttagttccaacgcctttgtcaataatttttatcatttgtatgtaatatagtcgatagctatatttttgtcaatatcccgctgtttctatatttcagtggagaaatgccatatgtttttttgaaacttctgataaaatagcttacattctggtatccgctctgcatagctgtctccgtcactgaaagatcggtgtcctgtaacaactgttttgcattctccaaacgtaaatatgttatatattgcgacaatgtaatatggaaatgttccttaaaataccgcgatatatatttttccgaaagatgaaactgttccccaaattcctttagcgatatctttcctgtaaaattctgctgtatatatgaaaccatctctttttctacaatatttctgccgcttgtatcattttctattacaaatcctttcttccacatttcaagaataaattgtaaaagaattatttttgtctttatctgcgcagttatttttgactcagtttcatcattttctgccatatatatatcaatcagctgctcacacagttcttttgccgagtcttttactcttgggtttatcatcaaatgaccgctatttaatggttcaagcaatttatcatctaacatgtcatcggtccgaaaagatatatattttaacggaaacaaaaatgtaaaataatccacagtgccggtctgtgagcccataagatgcagattgcccggcgatacaacgaacgcatcccctgcttttccaatataactctctcctgatatacttaccgtcagcaaaccactttttacatatataatctcaagttcatcatgccaatgtaccggtatctgaaatgaccgccccgcattctctatgtgatatatactaaatggattgtcctttgtgccatgtggtttattttcctttaattcaaagtacatactctctcctacaattctacaaggctcttgcttttccattttccgctcttccatctaagcaccattccaacagctctcgcgcactcatcacctgccatggcaatatatgctcctactgcctgaagtcccatatgtattccaagaaaatatgttccaccaactgcaaacagatacataaatatcgcacccattataaccggaaaaaccgcatctccactggtttttaatgcctgaccatatacaagatttgtcacccttccaaattcaaggaatatatctactattaacagccttaccacaagatttatcatttgcgcatcatccgtaaatatatgaactataaaatgtccggacatcgcaaatgtcacagagaagcacgtcgctgttataagaccatataccacagctttccgcgtacccctgtcacattcttcaaactcctttgatccaattctccagccagtcataatagcattagcctgtgcaagtgcagctcctatacaatacgaaaaatttgctatctgcatagcatatgaacgggctgtaacattcattccgactgcatccatctgattcatgaatcttactataagcgtcattgcaacattataaagtgctgtttcaaatgcagaaggaaaacctatcttaacaatctgcgcaagtatcttccgtggcggaatgcgctccggactctgctttgcctttatcagtacagcacccatgcctgctacaatgataaggttcacaacttttgaaataactgtggcaatagcaacgcccattactccccaatgaaatacaaacaggaacactgaattaaatattatattaatggcatttcctgcaatcgttcctatcaaggaatgctttgtatatccaaacactctgagatagctggaaaaaatgggaataagcgcatttaaaacacatgcacctccaacaattttaaggtatgtttctgccggctcaagcaaagccggagaaatacttacgattctaagtatttctccagaaaaaaaggcaataataaccgacataaggatacctgtcagtgcgttaaacataagtccaagctgtctggcctgatatgcaattccaggtctccccgctccgatattttgtgacataactgctaccataccggatgatattaccccgaacatgatgataaaaacacttatatacgtatttgctgttccgacagctcccacagcctggtcgcttacagacgataacataagtgtatcgaccatgcctgaaagcatataaaataaagtctctaagcatattggcacagccagctgtgtcaatgtttttctttcagttgccatgtttttctcctatgaaaactaatataacatacattatcaataatatggtatttttctgcatatttcttgtataatattatgcaaaaattgcattatttctacttatttacgaagtgaatcagcaagtctgttaattttgccctgatctgcattatcataggaaaatattttatgattccacattctcatctctgcataaaatgttgacgtttccccccaaatagactaggatagaatttgaatgataaatacgcaaaacaaggaggaaaatcctctgctcctgcaatggcagtcgcattttgctccgcaaaacaaggagggaaatcctctgctcctgcaatggcagtcgcattttgctccgcaaaacaaggaggattttatgttagataaaatgattggttttatcggtgccggcaatatgggaagcgccatgatcggcggtattctggatgcatctttagtgacgaccagccagatcatcgcaagtgcacactctcctgagacacttgataagatccggacaaaattttccatagagacaacccagtcaaacgaggtcgttgcagaacgaagcgatattttgtttctcgctgtaaaaccaaataaattttccgaagtacttccgcagatcaaaggtcatttaaaaccggactgtatcgtagtttcgattgcagccggacagccgatcgcaaatatcgaggcgctgctcggtgaggtcagactgatccgcgccatgccaaacaccccggcgcttgtaggcgctgcgatgagtgcactctgtccgaatgacaaggtaacaccagaggaagtaaagctcgttgagtccttattcaacagcttcggccgtgcagaagttgtaccggaaagcatgatggatgccgttgtcggcgtttccggttcttcccctgcctatgtctatatgtttattgaggcaatggcagacgccgccgttgcagacggcatgccgcgcgcacaggcttataaatttgctgcccagtctgttttgggcgccgcaaaaatggtattagagaccggaaagcatccgggcgaattaaaagatgctgtctgctctccgggcggtacgaccattgaggcagttgcagctttagaacatggcggtttccgtgatactgtgatcagtgcacagcgcgcatgttctaaaaaatcatatgatatgagtcaaaaataa

SEQ ID NO: 153 - DNA, 10353 bp, unidentified
  source 1..10353: mol_type = unassigned DNA
cttacgatgaataacaaaattcaaaaaactatacaactctttttaactttcataaaaataggtgcatttacttttggaggcggttatgctatgttaccactgattcaaaaagaaattgttgagaagaagcattggataactgataatgatattcttgaaatagtggctatctccgagtcaactcccggaccaattgcaattaatgcggctacttttgttggctttcgtatctgtggtttttggggtgcactgtttgcaacacttggagttgtgataccatcctacctgattattcttattatatcttttgtacttaaagaatttcaaagcataaaaatcatacaatatgcctttaatggtatcagagctggtgtacttgctctgattatcaaagctctctggtcaatgtatattcaatgtcctaagaatattatttcttatataattatggcatgttcttttatttttactgccttacttaatgtaaatgtgcttattgtaattatcagctgtgcaatattaggtttagtaacatctattaccatattaaggaggaaatgttaatgatttatcttgagcttttttatattttcttaaaaatcggtgcatttacctttggcggtggttatgctatgttaccattgattcaggatgaagttattgctcataattggatagattcacagtcacttattgattttatagcagttagcgaaagtacacccggaccatttgctgtaaatatagcaacatatgtaggagcagaagttggcggtattttcggttctttttgtgcaacactcggagtgatactcccatcctttattatcattcttattgttgcaaaatgttttattcaatttcaaaaaagtatagtcataaagggatgtatgtcaggattaaaacctgctgtagttggtttgattggttctgctgtaatttcgatgagttcaaccgttttcataccagatgggtttaatactactgtttttactgatatttctttttatacatcattaattatatttctgatatccgtagttttagcattcaaaaaattaaatccaattttaattatatgcttatccgcaatactcggaatagtttgcggatacatataattaattataacaaaacatcataaaagactcagatgaacggtcctggatagtttaaattaatgcctgtatcatttttcatcaacaacttggaagatgtagaatttcagataatagctctcctgcgcctcccacagtattgggtggtcaggtgactgtgtcctgaactcgacctgacggagtcttttatgtacagctttagcggcttccttaatagtcttggtaagaagctcctgtgtcatgaagtgtgagcatgaacagcttgcaagatagccgccgtctttgacaagcttaagtcccttcatattgatttccctgtagcccttgattgcgttctttgtagcttccctcgatttggtaaatgccggcgggtcaagtattacaacgtcatatttctcacctgcttcgttaagctttggcagctcatccaatacatttgcacatttaaaatgtactgtattctcaagtccgttaagcttggcattggctctcgcctgttcaacagcatattctgatatatcaagtccagtaacttccttagcacctgcaattcctgcatttaatgcaaatgtacccatatgggtaaaacagtctaatacccgcttgtccttgcacagcttctgcattgcaagtctgttgtacttctgatcaagaaagaacccggttttctgtccattcacaacatctatcatgtagtggacaccattctcaactatctcaacattagtgtcaaattcatcaccaataaagcccttaactctctccatcccttcaagagtacggactttggcatcgcttctttcatatactccacggatatcaatgcctttttcatgaaggatttccttcactttttcgacaataagtgacttaaatctgtcaatacctaaagcaagcgattccacaacaagcacatctgagtacttatctataacaagccccggcagaaaatctgcctccccaaatataagacggcaggcagaggtatctactgtgtcaaatctgtactcaactgcagcccttactctctcctcaataaatgcttcatcaacaacatctgtgtgtcttgcaagcattcttactgtaatcttggattttctgttaataaatccgattcccatgaaataatcatcaaaatcaagcacctcaacaagatgtccgtcaattattccgtcagacatccattcaatttcgttatcatatacccaggcaccgcctgcctttaaggttcttccttcaccttttcttaatcgtatctttccgcatacgctgaataaatcttccattctgttccttcctgtcagatttttctgacatttatcataattattcataatatattaatccgttgacggattaccaagaaaataaaacatacatactcctgcaaccgtaataagaagcgacatgagcttaatccatgaaaatgtagtcttctcacttccaaacagcccgaaaagtcccagcagatacgaaacaattatctgcgcaactacaatcgtaacctccgctttagcaattccaagaccacttatactttttataactgtaaatgttataaatgcacctatcacacctccaagaagtgtaatcttgttatcaaccttaaacagcttcatgatatcaggtcttccgtcaattacccacataatcgcacaagtcgccagtgctgtcaactgcacaaacattgccgtaacccacacactgcttgcttttgtaacatttgtattaaatgcgccctgtaaactcataagtgcacctgatattattgcaatcaaaaatcctgccattaactaacctccccattaatctgcatagaataattattagttaataacaggatatttattcataatgttatttagtactctgcgtactgttttcattattatttttagttgttttttctattgttgttgcaaatgtactgtaagctgtatcaacatttccaccatcatatacctgatgaagcataatctcatatctcatatacacttctcctactccgatatatttagcttttacaacagagtcagaataaatctggtgtaacttctggtagctttctgctctcttaacctttaaatccgcccttgcacagcttttcttagccatgtttccaagataatctgcataatcataagaaattgctcttgcaacagccttggatgcatctacattcttagtgtacggattaactactgccatcgtagtaacagacattgccttagaatcaatatcatctcccattgtaggatactcgcatattccataatctacatctgtaacattaatctctgcaagactgtctgcatcaagcacagtatagagcatatttccagtagaaaacagatctgcacagtctttaagacttactgtatttctgtcaataccaaatgcatcttttaactgagcgtacttagtaagaaccttcttaatcttttcctcattaagagatacctcagccctgttctctgcattaactccgcctatattaatataggctcctgctgctgcataattaaggaacattgaatcaggatcccattcaaacaccattgaaacatcctgattctcatctgtaatctgataattatcacttatattacgaatctggtctatagtatcaactgcttctgcatatttcttattatatacaagaaatgaagtgttgaacgacaccgggtaaccatataacttaccaccatacgaacatgcagtcattgcagccttaccatacacattctcattatagacttcaggatacatatcattctcagaggtaagacctgaaagataagccttctccatctcttcagatgtcagaaaatatatatcacatgcattgttattccttaccgattcgtcatatatataattaatatatgaatccgcctcaatatatactggcttaacagtcaccagttcattagatttcttaaattgtctggcaacgaattcaagataagactcatatgcactgtcattataccagacattaactgtaataggtccactaagattaagcttcttcgcagcctgtgtcctgtcatctttattaccacagcctgcaaagactgtcagcatggtaacaatcagcatcatactgataaatcttcttaatttcataaagtaaactcctgattctagaaggatttcttaagcttagctatgcattcatctacatctgccttagtaattacaagtggtggaacaaatcttataacattagttcctgctgagaacagaataagtccgttatcaagtgctctcgcaattacatccttaggattaactgataactcaagtccctgcataagtcccattcctcgtctctcgacaacaacatctattgtctcaacaagctcatcaagcttttcttcaaagtaagcagatacttccttgacattatctaatacatgctgcttctcaaaaagttcgaacaccttggttgctgctgcacatgcaagtggattaccaccgtatgttgttccatggtctcctggaactaatgccttcgcaacttcctctgtcgctgcaaatgcacctacaggaactccacagccaagagccttggcaactgtaaggatatcaggcttaacgccatactgctggaatgcaaacatacttcctgttcttcccattccgcactgaatctcatcaagtataagaaggattcccttctcatcgcataactttcttacaccttcaataaattctttagtagcaggataaattcctccttcaccctgtactgtctcaaatattatagcacaagttttgtcattaacaagttcctttacactgtcaaggtcgttatactgtgcaaacttaattcccggtatcataggtccgaatgcttcctgataatgcttattaccagttactgcaagtgctcccatacttcttccatggaatgaatgctgcattgcaataatctctgcatcagcttttccgttcttgacataataatatttctttgcaagcttgactgcaccttcaatagcctctgtaccactgttagtaaagaatactctgtccattcctgaagcctttgtaagtgctgttgcagcctctacagccggttcattatagaaataattagatgtgtgtataagcttatcaatctgtgcctttaatgcatcgttatattccttattgttataaccaagtgcaaatactgctatacctgctccaaaatcaagatattctttaccatctgtatcgtaaagtcttactccgtcacccttatcaagtactatctggtaacggttgtatgtatgaatcagcttctcttctgctgtttctataatctgctgtgtattcatgattactctcactttcctattcttatgagcacacattttcacatgggccaatataatattataacctcaacgcttacggttcgcaattatttatctgaatcaaagaatttttctgcatcatctgaaagaatagctgtaccaacacccttgttagtaaatatttcaagaagaaggcagtgtggaattcttccatcaagaatatgtactcttgatacaccatgctcaatagcatctatacagttattaagcttaggaagcataccgccgccgattgttccgctctctaaaagtgttctcgcctctgaagtagaaagctcagatataagtgaatccttatcgtcaaaatccttatatacaccttcgatatctgttaagaatgcaagcttttcagcactgacagctcttgcaattgcacatgctgcgtcatctgcattaatattgtatgcatgaaaatcatcatcatatccaatagggcatattactgggaggaaatcgtccttaagcaatgaatcaagaagtgttgtgtcaacatctgtcacttcaccaacatatcctatatcctcacccttagaatacttcttctcaacctttaacatgccgccatccttaccactgataccacatgccttaactccaagctgctcaatcattgacacaagactcttattaaccttgttaagaaccatctcggcaatctccattgttggctcgtctgtaactcttaatccattcttgaattcaggtgtcatgcctgacttttcaacccatttgctgatttccttgccaccgccatgaacgatgattggcttaaaaccaacgagtttaagaagaacaacatcctgaataacttttctcttaagttcttcatctaccatggcacttccgccgtacttaactacaattatctttctgttaaacttctgaatataaggaagtgcctcaacaagcacctgtgccttcataagttcctctgtcatatcttttgcgctcataataatctccatttcatatttattcagatatatttgctttaaaatgctgtgtcagatcagcttctgtaatcagcatttatcttgacataatcaaatgtaaggtcacatccccatgctgtagcgcttgcatcgccctgcttaacatcagcaatagcaattacaggattctgtgaaagtatttctgttgctttctcctcactgtagtctgtagcagttccatctttaacaatctgaagctcacctgctgaactcttaaagaatatatcaaccttttcagggtcaaagtcagcaccagaatatcccattgcacagagaattcttccccagttagcgtcatgtccgaatattgctgccttagtaagacttgatgtaacaattgacttagcaagtgtcttggcttctgccttagttgttgcaccctttacctgaacctcgaaaagacatgtacagccctcgccgtcacctgcaatcatcttggaaagctctgtaaatacatagcttaagccttcatagaaagcattataatcagcaccctcttctgtaatcttcttattgccagccattccattagcaagaacaagagctgtatcattagttgatgtatctccatcaactgatatcatgttaaatgaatcatcaacaattgcacttgtcatcttctgaagaagtgccttgtcgatatcacagtctgttgttatgtagcagagcattgttgccatattaggatgaatcattcctgcgcccttgcacataccaccgattgttaccttagtacctgcaacttctacttctacagcaacctgcttgcttcttgtatctgtagtcataattgcctctgctgcctgtgttcctgcttctaatgaatcatcaagcattggagcaagcttttcaattcctgcacatattctgtcaacaggaagctgcattccgataacacctgttgaaccgataagtactgcattctccggtacattaagaacttttgcaactgcctttgcttcttctgcacatgcgttatctccttcaacgcctgtacatgcgttggcaacaccgctgtttacaactacagcctgtgcaaagtcttcattatatacaatgtttctgtcccatttaacaggagctgcaaatactttgttagttgtaaatgttcctgctgtaacacatggcttctcactgtatacaagtgccatatctttctttccgttcttatatttaatctgtgcttcacatccggcagccttgaatcctttagctgctgtaacaccgcctttaattatattcataacatcctcctattgtaccatcacatatactctgtcattgtgcatatttcgtcgtgtaaattctgaatttacgctacatttattatggaaacattggtgcaagctgtaatccctcattctctggaagtccgaagagaaggttcatattctgtactgcctgacctgctgcacccttaacaagattatctaacgcacccatcattataagtctgttagttcttggctcaatcttaaatcctatatcaacaaagttgcttccctcaacccagcgtgtttcagggcatacatctttaggaagtactcttacgaaatattccttatcatagtacttgtcatatgctgccttaacatcttcatatgtaacatctttggcaaggttggcgtatgctgttacaagaattcctctgttcattggaaccaaatgtggtgtgaagataagctttaaatcatctcttccacatgcataacctaactgttcctcaatctcaggtgtatgtctgtgagttccgacaccataagccttcatgctctcattaacttcgcagaaaaggttggcaaccttagctccacgtcctgcacctgaagttccactcttagcatcaattataattgtatccggattgattattccttccttaaccattgggtaaagtgtaagaattgatgttgttgtataacagcccggattagcaataattcttgtgtctttgcttaccttgtctctgttaatctcacataagccataaacagcttcatcaatatactgtggtgctttatgctcaagcttataccactgttcatatacattaacatccttaagtctgaaatcagcactcagatcaataatcttagtctttgaaagaatttcgtcattaacaagtgatgcacataagccctgtggtgttgctgtaaatataacatcaacctcgttagcaagctgctccatattgtcgtccatacattttgcatctacaagcttaaacatgtttctatatacatctgaataattctgatctatgtaacttctcgaaccgagccatacaatctctgcatccttatgtcctaataataatctgacaagctcgttacctgcgtaacctgtcgcaccgataatgcctactttaatcataactcctccttgttttgcgaagcaaaatgcatatattcaacatttatgcataaaataacgcaaaatgtaaattgataacctacattatagcaactttttttcttatgtaaaggatattttaaagaaaattcatatttatacatttttattgtatattaatgtataatatgcataatttgttgttgcatttttaaataaagtagtttattataatctgcaggtgcatagcatatgtgttttactatgtaaacttaataatatacggaggaatatataatgaaagaaaaagttattcttgcttattctggcggacttgacacaactgccatcatcccttggttaaaggaaacatacaactatgatgttgtctgcgtatgtgcagactgtggtcaggaagaggagttggacggacttgagcagagagctctctcatgtggtgctgctaagttatatatagaagatatcactgatgagttctgcgacaactacatcgttccatgtgttcaggcacacgctgtttatgaaaataaatatttacttggtacttcaatggcaagacctcttatcgctaagagacttgttgagattgcccgtaaggaaggtgctgttgctatctgccatggtgctactggtaagggtaatgaccagatcagattcgagcttacaatcaaggctttagctccagatatcaagattatcgctccttggagagattctaactggaagcttcagtctcgtgaggatgagattgaatactgcagacagcatggtattcatcttccattcagcacagactgcagctacagccgtgaccgtaacatctggcatatcagccatgaaggtcttgagcttgaagatccagctaatgagcctaactacaagcatttattagttcttggatgcactcctgaggaagctccggatgaaccagaatatgttactatgacatttgaaaaaggtgttccaaagtcagttaatggcaaggctatgaaggtttctgatattatcagagagcttaacagacttggtgccaagcatggtatcggtatcattgatatcgttgagaaccgtgttgttggtatgaagtcccgtggtgtatatgagactcctggtggaacaattctttacgaagctcatcagcagcttgaggaattagttctcgacagagatacaacaacattcaagatggatgttggaaacaagtttgcacaggttgtttacgaaggaaagtgggagacacctcttcgtgaagcacttcaggcattcgttgagaagactcaggaatatgtaacaggtgaagttaagttcagactttacaagggtaacatcatcaaggctggaacaacatctccatattcactttacaacgagtcaattgcatcattcaagacaggtgatatgtatgatcatcatgatgctgacggattcatcaacctcttcggtctttcacttaaggtaagagctatgaagaagcttgagaatgagaagaagaacaataagtaa

SEQ ID NO: 154 - DNA, 9693 bp, unidentified
  source 1..9693: mol_type = unassigned DNA
  misc_difference 8273: note = a, c, g, or t
  misc_difference 8274: note = a, c, g, or t
  misc_difference 8275: note = a, c, g, or t
  misc_difference 8276: note = a, c, g, or t
  misc_difference 8277: note = a, c, g, or t
  misc_difference 8278: note = a, c, g, or t
  misc_difference 8279: note = a, c, g, or t
  misc_difference 8280: note = a, c, g, or t
  misc_difference 8281: note = a, c, g, or t
  misc_difference 8282: note = a, c, g, or t
ttaatcatcaacaatgctttacacggaaagaaacttccagtatatggtgatggaatgaacatccgtgactggttatatgtagatgaccatgcaaagggaatcgatatggttcaggagcagggacgtcttggacagacttataacatcggtggacacaatgagaagcgtaatatcgaaatcatcaacatcattattgaaaccttgcaggagattcttccggatgatgatccaagaaaagcaaatgtaagcaaagatttaattacttacgtagaagaccgtaaaggacatgacagacgttatgcaatcgctccggacaaaatcaaagctgagattggctgggagccggagaccatgttcaaagatggtatcaagaagacaattgcatggtatcttgagcatgaagactggatgaacaatgtaaccagtggtgactaccagaaatattatgcagatatgtataaagataaataaatagaagtatagaaagagaagcggataggaaaatacaagacctgtccgcttttttgtgcgttttcgccagtatttccacgggtactacagaaattattaaggaaaatatagatgaaaaatacgatgtaatatgttataattaaatgatttattgagtgaaagaatgcgttggagaacgtaaacaatatgattaaggaggagattattccatgaaaggtattattttagccggaggatccggaacaagactttatccattgacaaaggcagtatcgaaacagattatgccggtatatgacaaaccaatgatttactatccattatctacactgatgttagcaggaatccgtgaggtgctggttatctctacaccaagagatcttccggtatttgaggagttattaggggatggaagccagcttggaatgtctttctcttatgcggtacaggaacagccgagaggacttgcagatgcatttatcatcggtgagaaattcattggaaacgatgcagtagcattggtattaggcgataatattttctatggacagagcttctctaaagtgcttcgcagtgcagcagagcgtacagagagccagccgggagcaaccattttcggatattatgtaaaagatccaagagaatacggtgtagtagaatttgatgagaatggtaaagcattgtcaattgaagaaaaaccggctcagccaaaatccaattatgcagttccgggactctatttctatgacaatgatgtagtagagattgccaagaatgtaaaaccatctgcaagaggagaaattgaaattacaagtgttaataatgaatatctgaatcgtggaacccttcaggttgagaccttaggaagaggatttgcatggttagataccggaaaccatgacatgcttcttgatgcggcagacttcgtagcagcattccagaaacgtcagggattatatatttcctgtatcgaagagattgcatacaagacaggattcatcgataaagcacagttagagaagctggcgcagccattacttaagactgcatatggtcagtatctgatggacattgctaacggattataaaatagagttgggtattattgtagaaaagcgaggaagataaaaatgggaaaaatcaaagtaacaaacgactgtaatggaataaaaggattaaaagtaattgaacctgcagtattcggagatgcaagaggatactttatggagacctataactataatgatttcaaggaagcaggaattgactgtgaattcgtacaggacaaccagtctgcatccaagaaaggtgtacttcgtggacttcatttccagttaaactatccacaggacaagctggtgcgtgtagtaaacggtgaagtatttgacgtcgcagttgacttaagagaaggttctgaaacctttggaaaatggtttggagttactttatctgctgagaataagaaacagttcttcattccaaaggattttgcacacggatttatcgtattaagtgattatgcagaattctgctataaagttactgatttctatcatccaaatgatgagggcggacttctgtggaatgacccggatatcggagtagaatggccgatgccggaaggaatgacagaggcagacttgattttatccgacaaagataaagtatggcatggcatcaaggcatatgcagagaataagaataactgcaagaaagactgatagacagttgaagtaacataaggagtaaatgatatgtctaagaagagactcgcagccagcctgctggtggtactgtttggtatattggcgaacatcctggttttcagatatgaaccggctttaagtgagaagaaggttacggtaaaggtaacacttacatccgatgaagaaaattatatggagatgttctatctgacagacggacagaaaatgccggatgatttcaaggcagaacaaagcagcggagtgaattataaaaaagctggaacagagaaaacgttagaatatgccgtaccggcagatgtttcatatcttcgctttgatttgggaagcggagcatccgagacaactatttccggcataaccattgaaagtaatggaaaaactgctgtaataggtcagaatgttttttcagaaacagtgcgtctgcaggaagtaaaacagaataatgtttcagacggtattaacctgacagcagaaaaagaggatccttacctggtatggaatacagagaactggggaattgcgaagctggtaaaggacagcctgtggcttcggtatcttctggttaaaatccttgcgtgtgttgtattagatatcattcttattgttacattaaaagcaggtaaaaagctgattgttcttccgaaagaagtgtatcagaacagaaagctgctctggaatttgtcaaagaatgattttaaaactaaatttgcaggttcctaccttggtattatctgggcatttatacagccaattgtaacggtagtggtatactggttcgtatttgaaaaaggattaaaggctggaggaatcaacaccagagcaggaattgatgttccgtttgtactctggctggttgcaggtctggtgccttggttcttcttccaggatgcattaaatggtggaaccaatgcactgattgaatacagctatctggttaagaaggttgtatttaagataagtattctcccaattgtgaaagtagtatctgcactgtttgtacatgtattcttcgtagcatttacgctggtgctgtatagtgcatatcactattatccggatttatatacattgcagattgtgtattatacctttgccatgtttattatggtattgggaatcgtgtatgcaacctgcgcgattgtaatctttttccgtgatttaacacaggtgattaacattgttctgcaggttgggatgtggatgacaccgattatgtggaacattgataccatggaattatctccagtgctgattaccatattcaaactgaatccgatgtactatattgtggcaggataccgggatgcgttgattaataaggcgtggttctgggaaaatgcaccactgactttatacttctggcttctgacagcggtattattcggtatcggaaccatgatatttaagcggttgaagattcattttgcagatgtattataggaaggcataggatatgagcgaagtagcaattagagtagatgatgtaagtaaattatataagctttacgataaaccttcagacagactgaaggaatcgttaggcttgacacgaaagaaattatataaggaacattatgcactgcataatgtttcttttgatgtaaaaagaggagaaaccgttggcataatcggaaccaacggttccggaaaatctacgattcttaagattattaccggagtcttgaatccatccggtggtcatgtagagattgatggaagaatttctgcactgttggagctgggcgcaggcttcaatatggaatataccggaattgagaatatctaccttaatggaaccatgattggtttttccagggaagagattgatgcaaagatgcaggatattcttgattttgcagatatcggtgactttgtgcatcagccggtcaagacatattccagtggtatgtttgtgcggctggcatttgcggtagcgattaatattgacccggaaatcctgattgtcgatgaggcgttgtcggtaggtgatgtgttctttcaggcaaagtgttataagaaatttgaagattttaagaaaatgggaaaaaccatcctttttgtcagccatgatctgggcagtatcagcaaatattgtgatcgtgttgtacttttaaacagaggaaagaagctggcagagggcactccaaaagaaatggtaagcatgtataagcgaatcatggtcaatcaggataaggcagaggaaatcgcagcacaccagatggacatgagttccttggaagaagaggatgaaaaggaaatcaaagaggctgcctgcgaaggacagtggaagaaccattacaatctgaatccggatgtggatgaatatggtaatggtgccgctgaaattgaagactttgccataatagatgagaatggtaattataccaatgcaattgtaaaaggaacacgattccggctgaaatccaaagtaaaatttaaacaggatgttcatgatccgatatttacctatacctttaaaaatatacagggtgtggcaataaccggaaccaataccatgtatgagaagaaggatgttccattggcaaaagaaggggagacttatgttgcaacctttgagcaggatatgttcttgcagggaggggaatacttattgtccatgagctgtaccggatatcgtgacggtgagttccaggtataccacagattatatgatgtatgcaatgtgacggtggtttcagataagaataccgtaggtttttatgatatgaattctgttacgacagtggagaagatagaagagtaagagaaagttgtagggtcaggatttgaatatagtagaaaaggtaggaaaaaataatactgaaaaccagaaaatgaaagaactgctcaaaatagtgcagcaatatactgaggatgattttcagaaaattatatctgaaaagaaggacttcttttttctatatcatctttcgcctatgcgaagaaatattctggaatggtatccttttaagaaagatgcaaaagtattagaaatagatgcagaatgcggggctgttacaggatgtattgctgataaagtattacaggtgacaagtcttgaaaacaatgatttgcaaagacagataaatgaatgcagaaatagtaaaaaagaaaatctcagagtgtttacaggaacatatgataaaatggaaaacgagttagagagagattatgattatattgtaatgatcggctcattttcgaaagcacctgattattttgctgatgaaaaaccatatcatacatttataaaaagtgcatttaatcatctgaaagacggtggagaaatactaatagcgtgtgataatcgtataggaatgaagtattggtcaggttgtcaggaagaattatattctgattattttattggaatacaggactatataggttttgataaccataagatgagaaacttttcaaaaaaagaaatagagaatatattacaggaaataagcaatctggaatataaattttattatccatatccggattataagtttccgatggcaatatattctgatgaatatctgcctaagaaggcggaattaagtatgaatataagaaattttgacagaagccgtctgcttttatttgatgagacaaaagcattcgatggaattattggtgccggacttttccgggagttttccaattcttttttgcttaggataaaaaaaggagactaaaagagaatggataaaattctttttgttaaatattctaatgatagagccaatcgattcgccatttgtacagagatttttgcaaatggggataagaagcttttaaaaaaaagagcaacaacagaaagtgcaagagaacatataaaaaatatagcatcatattatgcacctttgaaaagacaatttgaaggagcccttaatgttgccggatgccaaaaagagtatgatgaaataaactttgagatggtagaggggaatggattagataaaattattgactcatattttgaaaaaaatgagatggacaaagtttttcaaatcatatcagagtttgctcaaaaaatatatggattaaaagataaggatgtatttacaattacaccctcttttgaaaaagtttttggtatggtgcattttgaagaaacacagtatgctttaaaaataacagatattgatatgctgtttgataatattatcgtaaaggataataactggacagttattgattatgagtggagctttcaatttcctataccggtaaaatttgttatatatcgtacattagcttattggtatgcccgcctggaaaatagaagaaatatggaacaggattttttgatggaaatggttggaataactccacaagaacagattcaatttgcaaaaatggaaaagaaatttcaacagtatatcatggatgataatattccattacgagatatgccgaaaatgatgaaccataaaactgtagatttaaatcacatcctttccgcagttgaacttgaagaaactatgcaggtattctatggaaaggataggaattttaaagaagaaaattcttactttaaaaaagtgcaggaattagaagatggaaacctgaaggtgaaagtagaaattccagagggaatgcagcaactccgactagatccggttgaggagccatgtatcattagcatagaacatatttataatgcgcagggcgaagaaaaagaaaagatagaaacaaatggtgttgaactctcaaataagatttttttctttgaaacgagtgatccgcagattttattgcaggcaagagaagaagatggatgcttaaacatcgtttatagaaaaataaatttaaatgctttttcaaaagatatcattcataatatagattttatcattagggatgagagagaaaagaatcgactgggacaagctgcattacaattagaagtagaagaaagaaagaacaaagaagctttattgaagaaccaaatagagataaataatgaactatcaaaaaacaatgagaatttaaaacttgaaaaggaaaatttaaatttccagatagaacaatataaagaaatgtatgaagcaatcataaattcaaggtcatggaaaataacaaaacctatccgtgatatggcagataaaatgaaaagggttaagaaaaaatgataagagaacatgttgcaattgaagaaaaagaatatatttatagtattgataaaatttgttgctatgtcaatgatgataacagggcatatttacaaattgtaggttgggcatttcttaaaagtggcaaaaacaaaaatttgcaggtttatataaataataagcaaactgaaatgtatatgaaatatatagacagagcagatgtccaaaaaatgtataaagactataatattaacttaaattccggctttgtaatagatgtggaatttgaggtggagaatcagaacgagtgcaatattggtattggatttgaaagtggacaaatattgtttgaggcaaacttaaaggaatatatggaattcgaggtagagcctgaaatcaagtattatatcgagcaaaccatatataataatgaaattatatctattgatggctggggatttgccgcatcagttattgatatgcagaaaatagacagtgtaccagtagagttgagcgttataaatgaagatggtcagcaggaaacgattgtgttgaaaagaaagtatcgggctgatgtaaatgaaaattttgggttagagaaaagtaaaaaagaatttggatttgaggtaaagtggaaaaatacgcaaaaaaataaaggcatttatactgttgttttaaaaggcggaaaaacttctgaaaaatttattgtggaatgcaataaattagtagatcaggccagggaagaaaacagaaaatatgaaaattttttcgatatgttaaagaatagagatgaagaattgttcatagatgattggcattatctggtaaactttggatggaagaagtattgtgacagaataaaaaagcggtttcaggatacagaagaggtttataatgtctggagaaaaaaatatatcccgaatgcaagaaaattgaaaaagcagagggcagaaaagctggattatgaacnnnnnnnnnntattatagtgcctacatataaaacaccggaaaaattcttgaaagagatgattgattccgtaagaaatcagagctatgaaaactgggaattgtgcattggagatggcagcgttacagaggataccgttaaaaatgttgttgaaagttatcagaaaaaggataagcggataaagatgctttgcctttcagaaaatctcggaatagcaggaaataccaatgcggcgttgtctatcgcaacgggagattatatagcattactggatcatgatgatatactggcaccagatgcactttatgaagtcgtaaaatggatgaatgagcattataaagatgaaacagatgtcatttataccgacgaagataaagtttcttttgatttaaaggattattttgaacctcatttcaaatcagattataatttggatttgattcggagtaataactatatctgccatttatttgtggctagaaaaagtattgtggaccaggtgggtggtttccgaaaagaatatgacggttcacaggattatgattttatattgcgttgtatagaacaaagcaagcatgtagaacatgttccgaaagtattgtatcattggcgttgtcatccgggctcaacagcagcaaatcaggaaagcaaaatgtattgttatgaagctggaaaaagagcaatagaagatcacttaaaacgcatgggagaggatgactgtcaggttgtaatgacagagcacctgggattttatcatgtgatatatccaatacgtgaacagaagaaggtatcaattattataccgaataaagaccagaaagaaatactggagcgttgcatagagtcggttatacagaaaacagattacaaaaactatgagattattattgtagagaataatagtacaacaaatgaaatatttgaatattataaaacaatagagcagcgtgaaaacatccgggttgtaatatggaaggacaagtttaattattctgcaataaataattttggagtaaggtatgcgaatggagagtaccttctgtttttgaataatgatatagaagtaatcagggaaaactggttgagtgaaatgcttgcaaatgttcaacgtaaagaagttggaatcgtaggagcaaaattgctttatccggacaatatggtgcagcatgcaggtgttattattggcatgggtggaattgccggacatccattatccagacatccggcagatgattgtggttattttgcaagaggaattatccagcagaatctgaatgcggtaacggcagcatgtatgctcacgaaaaaagaagtttatgagaaagtgaatggatttgaagaaaagctggcagtggcttttaatgatatcgatttatgcctgaaagtaagaaaagcgggctatttaatagtatatgatccagaa

SEQ ID NO: 155 - DNA, 14569 bp, unidentified
  source 1..14569: mol_type = unassigned DNA
gtggaatcaaaagcgtcaaaagataaaaaattcgacagtatctatcgggcgtataaagattcaatctttaaagtggctatgcattataccaagtgtgaagatctggcaagtgaaattacacaaaggacattttttcagttatatatctattttgaaaatgtagatttagaaagtgtttatccgtggctgataacaacagctagaaattctgcgtttaactataatcgagatagaaaacgcgagatattagcaggagtatttgatctatttagagggacgaaagacagagtctgttatataaacaatatggaagagtattatctgaggaatgagcagaagagaagggctgagtgcttggagtttagaatctttgaacgtttatataaggaacatagaatatggtatgatgcagttatgcaggtatattgttttggaaaatcacaacaagaggcagcagatcaattaggaattgcagttgaagtattgaatagtagactatatagagccagacaatggatacggaagaattatgagaaggaatatgaagaagttgtcaactggttctgagaaaacagatggtgccgtttcggcaccatctgttgagttatctcgctttgtttcagtgagcagcttcttcgattagtttaataattgtattaatagagtcctgctgtgaagagtgtttcatagcatttatgtaagtgtttttgtgttgatataatttgtagatggaatttaaaagtgtatctttacttaaatcttcttcctctaaaacaacgctgaaaccttgatgttcaaaagaacgagcattcaaaatctgatctccgcggcttgcatttgcagaaagtggaactaaaagattcggtttgcgaagtgcaagaagttcacagattgcatttgcaccggcccgtgaaattacaatatcagtgagtgcaaacaagtcttttaactgattctgaatgtattcaaattgaacataaccttttaaagattttaaggagtcatccatctttccttttccacagaggtggataacatggaagtcttttagtaactcaggaaggatagaacgtatggcattattgacaacaacagagccaagacttccgcctataattaaaataacaggtttgtcatcggttaaatcgcagaattcaagtgcagcagttttgctcccttctaataattcctgacgaatcggagaaccggtaagcactgctttttctttaggaaggtgttccaaagtttctggaaagttacaacacacttttgttgcagatggaatggaaatcttgtttgcaagtccgggggtcatatctgattcatgaataatagttggcacatgacggcgttttccagccatgacaacaggaacggagacaaatccaccctttgaaaagatgatatccggttttaactctttgattaatttattggcttctcggaatcctttcagtacccgaaatgggtcagtgaaattttgcatactgaaatatcgtcgaagcttaccagaggaaattccgtggtaaggaatttcaaattgttcaattaattctttttcaatacccgtataggaaccaatatagtgaatatcatatccgagtttttttagacggggcagtaaagcaatattaggtgtaacatgaccggcggtaccaccaccggtaagaataatacgtttcataacattcctccgaagttttttctataaaataatattaaacagtattttgtcaaaggtcaagaggaatggacaaaagaacgtaagtagtgtaatgtacaggaagagatctgttgatagttgcataaggagacattatgagtgaggaaatgaaacgatttttgcaagaagaactgaaaaaagaagcggatgagattatgcgggaggtggaggcggatcaggatgtagaaagtctgacagcaccttctaagatagatgaaaagctatatgagcagattagacaatataaagaggagcaggaggtattaggagaaaaattgtcgaccgaacagcaggagttaattcgtcttggaaaaatttacaaaagaaaacaaaagagacggaaatatgtggttctggcggcagcagttatggcagcgtttgcggtgggaattacaagtgttggaggaccggagaggatatttcggaagttcagtaatataatggctagtagagatcagatggtgttgaactcagatgatgaaaatgtgacagaggtaaaaggaagcacagaggaagaagcatatcagaggataaaagatgagtttggatttgatccggtgaggatggattatttacctgaaagcatgaagtttcaagaagcaactatcttgggggaaatacaagacagctattttatatatagcaatgaaaagaaagcaagtgttctgtattatataaacgcaaattataatacaagttcatttggagtagatgtggaagatactcttgttaaagaatatgatatagaaattgatggtgtgtgtatacatattaagcagtatcaggtttcagacagcacagagaagagaagcagaggctcttttgaatatgatgggatacagtattttattattggaaatggtctaaaagaggcggaatttgaaaaaattttaaaaaatttacattttttttaaaaaatagcgttagtttttctcgacttatgtgtatatatagtataaggacaaaaaggagagaaaaaaatgaagaaaaaaatattgatgattgcaagtgtatttacgtttggattagctggaacgattacaagtgagacaatctcacatgcgcaggagggcagcaacataactcaagactattcgtatttattgactggagataccatcattggacagatgttgccagaaacaagagggatatatttgtcaacaggcacgtctactatcagcgatgcaggtacggggaaaatagctgcgggaggagttacaatagctgcacaaaagtgtgatgtttctgtaaatgttattgtggaaagattatcaggaggtagttgggaaagggtgacatcgtggacagcgaaattaagcaacacgtggtctgtaggaacagaaaaaattctcagtgttggacgtggatattattatcgtgttagaagtgttcattatgcgcatacagatgtaagcagttcgtggaccggaaatctttggagatagtaaagtatcattaatctgtcatgtctctgggggaactgtcgcagccactgcaagcgtaattatgaggaaactcataaactaacaaaaattagagagagagcttacatcaagaacaaaaccacatagctcatagagctaaaaatctacggatttgcagtggctgcgatagttcccccgggtaaaaaaggaatggaatcatccattccttttctttttgaattataagaaattcctttggaatcctataattcaaaaaatgcacttcgtgcaaagatgcgcaatcttttttacgtgatttataaaaatatataagataattttgaaatttattttccggtagcttgtcttaatgcctgagcaagctggtctgggcaggaagttggacgtggaccgcatttgataccttcaatgcgggcgattgcatcgtctactttcataccttctactaaacgggcaacaccctgtgtgttaccggagcatccgccaacaaattctacggagcggatagtgtctccgtcaagttctaattttatcatacgggaacagactccctttgttctgtattccatgaaattatcctcctctgaatgtgatattagattaatagtgtttcacatattataacaaatgggatatgaaaaaactagaagaaacaaaactttttcttttacgtgcaagtatgacccctcaaaggagtgtttcttctacggactgacaggagcagacagcaaccaatttgtgaatattttcaaaaaaactgtgaaaagtgcttgatgtatgggcaaaaatattataaaatacaaaacgtatggaacgcagaaaagtttagagtttcatgcaaatatttttggcagtgaatgctgccttattgattgagttagaagctcaaattttataagttggttactttataaccggtgttgagaacaacacatcaacttgtgaaacggtcaataagagtattaaaagtaaaatatttgctatatagactctaacataaatatctggaatgtgaagaaggacagtctcggactgtattgttcgcatgaaagtgataaagaagtagacgcaagcaagaatgatgtaaattcctgcctgcgttttttgtatgtaaaattacgcgtggtaaggaattgtagtaacctgatagaaaagaggaacgataagatggaaaaagaattacagcagagagcaccgatatatgaggcattggaacgatttcgaagaatgcgtattgttccgtttgatgttccggggcataagcatggaagaggcaatcctgaactggtggaactgcttggagaaaaatgtgttggaattgacgtgaattctatgaaaccgctcgataatctgtgccatccggtatcggtcatcaaagaggcggaggaactggcagcagatgcatttggagcaaaacacgcatttttaatggttggcggaacaacttcttccgttcaggcaatggtgttgtcttgctgcaaaaaaggcgacaagatcatacttccgcgaaacgtacatcgaagtgttatcaatgctcttgttctttgtggagcgcatccggtatatgtgaatccggatgtagataaagaattgggaatttcgcttggaatgaaagtgtcacaggtagagcaggcgattcgggaaaatcctgatgcagtggcagtatttgtaaataatccgacatattatggaatttgttcggatcttaagacaattgtaaaacttgcgcatgagcaggatatgaaggttcttgtggatgaggcgcatgggacgcatttttactttggagagaatttgccaatctcggcgatggcagccggggcagatatggcatctgtcagtatgcacaaatccggtggcagcctgacacagagttcatttctactcattggcgaaggagtaaaagaagggcatgtaaggcagatcattaacctgacacagacgacgagtggctcatatctgctgctgtccagtctcgatatttccagaagaaatctggcgcttcgcggaaaagaggcttttggaaaggtcgctgcacttgccgactatgcaagagaagagattaataaaattggcggatattatgcgttttccaaagagcttgtgaatgggagcagtatttttgactttgatacgacaaagctctcgattcatacgctggaactgggacttgccggaatcgaagtatatgacattttgagagatgagtatgatatccagattgagttcggagatatcggaaacattctggcatatctgtccatcggcgaccgcaagcaggaagtggagcgtcttgtgagtgccttggcggaagtaaaaagacgctatcaaaaagataaaacgggaatgttgacgcaagagtacatcgacccacgtgttgtcaccacgccgcaggaatcattttatgcggaaaaagagtctcttccgctgagcgatacggtaggaagagtctgcagtgagtttgtaatgtgctacccgccggggattccgattcttgcgccaggggaagagattacaaaagaaattttagattatattatttacgcaaaagaaaaaggatgttctatgaccggaccggaagatgcccagatagagtatctgaacgtgctgaaataacagggaggtgtaagcgatggagatgtggttccatgatgaacatacggacaatgtaaaattggcaatccgagtggattatcaggtgttttcggctcagagtgagatacagagaatcgatgtgcttgagtcgaaagagtttggcaaaattcttgttgtagacggagatttgatgctgaccgaaaaagacgagtttatctatcatgagatgatcagtcatgtgccgatggcagtgcatccgcaagtggaaaagatacttgtaatcggcggaggagacggcggtgttgtaagagaacttgcgaaatatgatacggtggagcagattgatgtggtagaggcagatccacttcttgtggaggtgtgccgaaaatattttccacagatggcatgcagtttgaatgatccgcgtgtgcatatttatcatgaggatggactgcggtttatccgttccaaatccgatgcgtatgatttgattatcattgattcgccgaatccgtttggcgcaggggaagggcttttcacaaaagaattttatggaaattgttttaatgcgcttcatgaagatggtattatgatcaaccagcatgagagcccgttttacaaggaggaggcattccaatgtcagagaatgcacaagagaatcattgaatcctttccgatcagcaggatttatcaggcacatatcccttcctatccgtcaggacactggctgtttgggttcgcttcaaagagatatcatccgattcatgatatggatggaattcagtggaaactgcgtgggattcagacaaaatattatttgccgagactgcatgaaggagtatttgcactcccggcatatgtggaggaattagtacaagatgttgaataaaaatattgtgacgtttataggatgcgagtctgagtatgaagatgcaaagattgtgctttacggagcgccgtttgactcgacaacgtctttccgtccaggcacaagatttggaagtgccgcgatcagaaatgagtcttttggtctggagacatacagcccgtatcaggacaaagaactgacggagtattgtgtgtttgacagcggagatctggaactgccgatgggaagtgcaaagaagtctcttgagatgatagaagaacgatgccgtgtgattttgaaggatggtaaagttccgtttatgatcggcggagagcatttggtgacacttggcagtatgagagcggcggttgagaaatatccccagcttcatatcatacactttgatgcacatgcggatcttagagatgaatatctggatgtgaaagagtcacatgcatgtgtgatgagacggtgctgggaacttgtaggtgacggcaaaatttatcagtttggtattcgctcaggtgacagagaagaatttctctgggcgaaagaaggacatgtgacgatgcatccgtttgacttgaacggtttggaagatgcgatagcagcgcttaaaggaaaaccggtttatttcacggtggatctggatgtgttagacccgtctgtatttccgggaacaggaacgccggaggctggtggagtgagctttaaagagcttttggatgcgattataaaggtgtgcgagggctgcaatgtcatcggatgtgatgtgaacgaacttagtccgcactatgatcaaagcggcgtgtcaactgcagtggcaggaaagattgtgagagaatttttaattgcattggcaaaataaatcaggataaaaacaggaggaagaaaaatgggaaaaatattaattattggctgtggcggtgtagcaagtgtggcaattcaaaaatgctgtcaggtaagtgaagtatttacagagatgtgtattgcaagccgtaccgtttcaaaatgtgaggctttaaaagaaaaactggaaggaaagacaaatacaaagattacaacagcacaggtagatgctgacaatgtagatgagctgattgcattgattgaaaaagaaaaaccggaagtagtactcaatcttgcacttccatatcaggatctgacaatcatggatgcatgtcttgcgacaaaagtacactatattgatacagcgaattatgagccggaagatacagcaaaatttgaatataagtggcagtgggcatatcgtgaaagatttgaggaggctggtatcacagcgcttcttggaagtggatttgacccgggagtgacaagcgtattttctgcatatgcattgaaacactattttgatgagatcaattatattgagattatggattgtaatgcgggagaccacggttatccgtttgcgacaaacttcaacccggagatcaacattcgtgaggtgtctgcaaaaggttcctactgggaagatggtcattgggtagagacagagccgatggaaatcaaacgtgtttataatttcccggaagttggagagaaggatatgtaccttcttcatcatgaagagatcgaatctcttgcattgaatatacctggaattaagagaatccgtttctttatgacatttggacagagctacctgacacatttaaaatgtttagaaaacgtaggaatgacttctattgaaccgatcatgtatgaagggaaagagattattccgcttcagttcttaaaagcagtacttccggatccggcgtcattgggacctcgtacagttggtaagacaaatatcggatgtattttcatcgggaaaaaagatggaaaagaaaagaaactttatatttacaatgtatgtgatcatcaggaatgctacaaagaggtgggctctcaggcaatctcttacacaacaggagttccggctatgatcggtgcgatgatgatcatgaacggaacatggaacaaagccggtgtatacaatatcgaagagtttgatccggatccattcatggaagcgttgaacaaatacggactgccatggaaaatcagtgaagatccggaattgatcgattaaatttgaagagagaaaaggtgaggagaactgatgagaagaaatgaacttccaacaccgtgttatgtcattcaggaagaacagctcagacaaaatcttgagatactaaaaggtgtgatggacagaaccggatgtaaaatcctgcttgcccagaaagcattttccatgtatgaggtgtatccgctgattgcgcaatacctttcgggaacaacagccagtggtttgtacgaggcgaaacttggggcggaagagatgggaattccgtttggaaaagagacacatattttttcacctgcctataaggaagaagaatttgaagagattttaacttactgcgatcacattgtatttaattcttttgaacagctggaacgatttggaaagagagcggctgaggcgggaaaaagtgtgggacttcgcattaatccgcagtattcaacactggaggggcatgagatctatgacccatgtgccgctggatcgaggcttggggtgacggttgagaaattcagaccagagcttttggaatatgttgatggtctgcattttcatacattgtgtgagcaggacgcgcagcctttgcatgacacactgaaagaagtggaaagacagtttggggaatggctgccgaagatgaaatggctgaattttggcggcggacatcatattacgagagagggctatgacatcgcattattggagcggtgtatttgtgagatgaaagaaaagtatgacttggagatttttctggaaccgggagaggcagtagccttaaatgccggtgtactgcttacgaaagtggaagaaattgtggaaaacagcatacagattgcgattttggacacgtccgcagcatgtcatatgccggatgtgcttgagatgccataccgtccgccgcttcaggacggctatgaggcggaggagaaggaatatacttatcgccttgcgggaccgacctgccttgcgggagatgtaatcggtgactattcatttgaggagccgctaaaaagaggtgatacactcacatttgaagatatggcaatctacacgatggtcaaaaacaatacattcaatggaatgcgtctgccggcaattgtattggaagataaggatggagaatgccgggtggttcgacagttcgaatacgaagattttaagatgagattatagaaatgaggaaacagttatgataggtattataggagcgatggaggaggaagtagctgcgttaaaagaggctatgacaattgaagaaaatgtcacatttgcgtctatggatttctgtagaggaacactgtgcggaaaagaagttgttgttgtcagaagcgggattggaaaagtcaatgccgcaatctgcacacagattttagtagacaaatttggggtggatacattgatcaacacaggaattgccggttctttagatgccaatattgatatcggagatatggtaatctctacagatgcggtagagcatgatatggatgcaagtattttcggagatccaatcggacaggtgccgcgaatggataccttttcatttccggcagatgaagagctggtagagaaggcgaagactgccaatgaggaggcaaacccggatattcacacattcgtaggacgtattgtgagtggagatcagtttgtatcgtcaaaagaagtgaaagataagcttgtagctaattttgaggcgaaatgcactgagatggaaggcgctgcaatcgcccatgcggcgtacttaaataaagtttcgtgtgtcattatccgagcaatttcggacaaagccgacaacagtgcgacgatggactatccggcgtttgaaaagcaggcaatcacacattctgtaaggcttgtgaagaatttgctgccacgcttataaaaaacatgtgacaaatcatgcaaaattcgtatgatttgttgttgaaatatgtaaaacgattcaagaacccaacttctttatttgctgtataatagcggtagcaataaatataaagaaggagggctctttttattatgttagagacattagtgcaaaatcaaattattttttatgcaatgggagtggcagcggggattggagttttaagcaagctggttgcccatattacattgagacgaatggtgaaagcagccagtagaatgaacaaaagtaaccataagctgatgagacttgtacgagcaaaatttgaacatgccagtatggtgagcgataaagtgcagaacgtggaagcatttgtgaaaaagtatgtttatgagtatcgtatttggggaaccagactccatacctttcgaaatttggaaaagaagatgacttggattgtagcagtattaggcgtagcgggaactgttgcggtatattatctgtatggatttgaggatcaagtgttcaaatatgcagcgtggactggagccagtgtggcgatactgtgtatgatacatatgtcaagtgacgaaaattatcatttacagatggcggagaattatatggttgattatttagaaaatgtctgtgcacatcgctatgccaaattgtataaagaaaaggctatgagccagacaagcatattggaaatggaagaagcgtttcagccggaggctgaggaagaagtggttgcagcagaggtggaagagattcaggaagagccggtttccgagcaggaacaggtatatgccatgaagcgggaagaaccggcaaaagaagaaaaagctgcagcggaagaaaaaagactgcaggaagtgcaggtgcgcaggattttagaagaatttttggcatagatgaaataaagcgattgcagcggagtaaataaagtacaaagctttgaaatggtgggggattgtgttcgcgatatgctatgtggcattggcagtaatattcaaattggataaaaagagatttttatagagactgaaaagaacatattgcttgcgcagtctatgcggatgtgctatattaaaggtacaaaaagaacaatcgccacataaaagtggttgaccaattgaaaataatttagaattaccacccaactcgtcaaagtatcagggtggtttttctatgtactaatgactgatcagataaatgaaggtcagtagtgataaaatgaacataccaaattgcattaagtctttaaagtcaaaatgtttattgttcatcagctccacctcccatctataaaagagtgagaggtcagccaccctatatcacgattgttctactcagagtgtatcacatttgtacaagggaatacaattgtgaactgatattcataatttcttgactttcccctcttccgtttggtagaataacaatagctatgagaccaattagaagggaaggataaacgtgggaaataaagtcacatttgactattcaaaagcaagtacatttgttgcagaacatgaagtagattacatgagcaagttggcgatagatgctaaggaactgctcttaagcagaaaaggagcagggaatgatttccttggatggattgatttgcctgttgattatgataaagaagaatttgtacgcattcagaaagcggcagagaagattaaaaatgattccgaggtattgctcgtaatcggtatcggtggttcttatctgggagccagagctgcaatcgaatttttaagacatagtttttacaatgttgtttcaaaagagattagaaagacacctgagatttattatgttggcaacagcatcagcagcacatatctcaaacatctgatcgatgtaatcggagacagggatttctctgtaaatatgatttccaaatcaggaacaacaacagagcctgcaattgcattccgtattttcaaagagatgttggagaaaaaatatggaaaagaggaagctgcaaagagaatttatgcgacaacagataaagcgagaggatcattgaagaaccttgctaatgaggaaggatacgagacattcgttgttccggatgatgtcggaggacgtttctctgtattgacagcggtaggtcttcttccaatcgcagtaagcggtgcagatatcgagaaattgatggaaggtgcacaggctggaagaaaagaagcattagaaaatgattttgctgaaaacggtgcattacagtatgcggcaatccgtaatattttacaccgtaaaggaaaagcagttgaggtacttgcgaactacgagccaagtcttcactatgtgtctgaatggtggaaacagctttacggagaaagtgaaggaaaagaccaaaaaggtattttccctgcctctgtagatttgacaacagatcttcactctatgggacagttcattcaggatggaagccgtattatgtttgagacggtattgaatgtggagaaagcaacagaggagcttttcatcggagaagagccagtggatttggatggtctgaactatcttgcaggaaagacagttgatttcgtcaataagagtgcgatgaacggaactgttttagcacatacagatggaaatgtaccgaacttaatggtgacaattccagagcagaacgaattctatcttggacagttattttacttctttgaattcgcttgtggcgtgagtggttatattttaggggtgaacccatttgaccaaccgggtgtggaaagctacaaaaagaatatgtttgctttacttggaaaacctggttttgaaaaagaaagagaagaattgttaaagagattataagaaaaaaagccagagttgcaacggagcagctttggctttaaatgtaaaaaaaggaagtgataagttgttatcgaatcaaatattgcacaagcccatcaatgatatacatgagattatgggggtggattgttccgtgtggagtatggagggaaagtgccttgccattgcgggaatgaacgaggatagaattaaggctggagtagacaaatttctgaaagaaggaaaagatgagcaggtatgtgaaaatgaggcatttttcctgattcgagataactatgatgcagtgtatgtccttgcacttcatgaggttgtagagcaggttgcggttatcggaaggctttgtatcagtcagttccaaaacctgatacacgcatataaagaacgtttggataagaatcattttttccagaatttattgcttgataatcttctgcttgtggatatttttaatcaggcaaaaaagcttgggattgaagtggagcgaagaagagttgtattcttgattgaaccgaaaaatgagacggacaatattgttcttgagacgatgaaaggtctctatgcaaccggctctaaagattttgtaacttcagtcgatgaaggacatattatcctgatcaaggcgttggagacgaccgagggatataaagaactgaatatgattgcaaaatccattgtcgatacattgacgatggaagcgatggtaaacatgagggcggcatatggcacgattgtaaatcagctgcgagatgtgtcaaagtcatacaaagaagcgggcatggcgctggatgtgggacggattttctatgagcagaaaaatgtccttgcttacaatgagctgggcatcggccgcctgattcatcagctcccggtatctttgtgtgacatgtttttacaggaagtgtttgacggaaaagcggtggatcagttcgatgaggagactctgagtacggtcaatcagttcttccagaataatctaaatatctcggaaacggcgcggcagctttatgtacatagaaatacattggtataccgtcttgagaagattcagaagctgacagggttagatgtccgggtatttgacgatgcgctcacatttaaaatcgctatgatggtatcgaatcatctgaaattcttgcaatcaaaagagtag

SEQ ID NO: 156 - DNA, 12699 bp, unidentified
  source 1..12699: mol_type = unassigned DNA
ttatattatttcaatagataattctttttttaatttttttatttctaattttactcctagattaatctgttctgctatatcttcttctaaaacaaacattaaatcatcagaaatataattatcatcgtgcttatgtaaatagccatccattcctataatcttaacactgttaacatcacacatagataaaagcttaagaaacatcaaacctgaattatcttttacatattctgtcttatttaataaagacgaataattaatttttgcaaatacattacctgatggaacattagatgatgcaataacttttttatacaaatcttttctaatctctttcattcgacgactatttcccacaaataaataatccacgggatgcaatttatattcaaaatttattgatacaagcacataatcttccagatttaatgatgctaatttattataatgtgtttcagatgttttaccaggacatatcataataacatttttgcctttaaatatgtttttaaccttgttaaaatcatctattatgctgtcttttgattcgaaatacgataaatataattgttcaatatattctttatcaaaatcaactttcttttcattatctaacatatcaaaaatatcatcaatctcatcaatagtaagattatttttttggctcagataatatgcataatccgtattgcactgatgcttagctgctaaataattaggtaaagaatacccccatggcttatcagcatatatattttctataaattgatcatttatttccaatatatttctatcattatattgtccctgataattttcattaagatattccaaaataatttctgtatttaaattaccagctcctatacctataccatgaaccgagcaatctaatataacttccctgtcaacttgttctaataaaattgttgcattcgaaaatgataactgcatattattataagaatgaaatcctattataatactttcatctaaatattgtttcatcatactaatatacttgataacatttttgcttttcattgaaccaaaactatcaacaatatgcaaagaatagacttctaattcattacacatattcataagatatatcaactcagaatcagaatattcagaaatagctaaaggatacatcataacattatatcctttttccttcatcattttacactcatgtaacgaagctttaatatcttttttcttgaatgtatatttaatatttttaatgttaccaaagctatattgttccaaattatttacatcgtactgtccataattaatagaagctattaattttagcttgatttctgaaggaaacttttcatttattgaattgatactcaaaaattgcgaattagaattttcattattattatcaaccaaataaccatattcaataaaatcaacgcccgaatcatataattttgatataattttatcattcacagaatcattaaattttcttttattgactacatagtactcatttaatgtgcaatccaggaccttaccatgtctgcttttaataccaacagacttcaaattccgcaaaatatttttagatgcatcagagaaaataccagaatctgttgaatagctaatatactgaacgcccaggcttttccatttttcaaccatactatagtcatctgtaaaagttcctatcactttattctttgctttagctttttctacaatgtctaccatagccgccaaaaccttaggatgactaatctgtcctggaactcctaatgactgagataaatcatatggtccaataaatataatatcatagccatcaacttctaaaatttcatctaaattatcaattgcctctttgccttctaattgaattataataattttttcattttcttttttaaaaaaggcatttctgtttaaagatgaataatctgctgctctgacaaaacggcatacgcctctttctccctctggataaaatttagcatattttataacttttttgacatcctcagcacatcttatctgtgaaatttgtattcccattgcccctatatctaatgcttttccaatgacattatcatctatatatggaactctgacaattggaagtattccccttaattcacatgctcttatattattttgttgattttctatatctgtaggaccatgttctgtatctaaaatcacataatcataaccagatattcctataatctcattaaacataggatcagatgttttcacaaaaacaccataaacaaattcaccattttctaatttgcttttaaattcatttaacataattatctcttattttttattgtttaatctgttcgcaacaatttctctgactctctctaaatcattcggtgtatctactgctacagtatcagaatcaacttctatgtactgtactttataaccattctctataaatctaagaatctctatatcttctattttctcaattttagcctttccatattttttcccatattcgcaataaaactttaatgcttcaggcttgaatccatatacacaaacctgtttataatagttatattcaatacttccttttggatacggtgctgtagatcttgttaaatatattcctatattctctttatttgttattaccttcggtactgtgaaattcacaacatccaccgggtcatttattttagtcattaaatttgaaacctgcaaatccggatttgtataaaatggttctattgcagcccttatagtatctggctctaacaatggttcatctccctgtatattaacaatcaaatccgctggtatcttttctgctacttcaccaattctatcagtaccagttttatgtttatcagatgtcatgattacctgaattcctaatgcctgacattcctcatatattttgtcatcatcagttgcaacatatacttctgaaaaatccttcacctttttacactgctgataaacccaccatatcataggttttccacaaatatcagctaacggtttacctggaaatcttgagcttttatatcgtgccggtattactcctattattttcattgttttacctcctaattgatacaataaatttatatatatcttttcttttaataaagaaaatcatacacattattaatattaagccatatcttaaaagcaaatttttatataaaagtaacataatcaatccaaaaaccattaaaatacatgatattccgattactatttttatatcaaataaatgtatgttatccttaatacatttttttgcaactttatcagaaaatatgtaatgtgatattcctaatataacataacatactaatgttgtatatccagcagctatatatcctaatttttttataaaaatataatttaaaaaaacattaaaacctgcgctaaaaatagatgccaacattataaatttatttttttcaaaataaaattctacattagcaaatatctggtacataaacataaaatataaacttattgctaacggaggaataacatatacagcatcatagtattcactaggtgctaaaatactaattacctccggtgaaaatgccatcataaaagccaatgctactgcaacaaacaaaaaaagcttattacacacagatgaaatatctctatatttctcttcttttaatctttgatatatccaaggtgcgaacgcgttattaattgatgttgtcaatatatttaatatcatagctaaattatgcgataacccgtatatacctgcctcagccattcctatcattttactaatcataattctgtctgactgagacaaaatcaaagtagacaaataatgtggaactaatggtatattaaattttaatgcatatatccaatacttttttgaaaaaaaatttttaccttttatatagttaattatatatataattccataaaaaacaattacaatacaagcagagctaattattctaacatcagcaccaaatttatctggagtatttataacagaaactgccgctactaaagggcttaaaacagaaacaaccaaagttaaaataaccatattcctgtatttaaactcaaatctctgtttagcagaccaaaacgaaaaagctgaatttgctaaaatctccataaacattactataatcagaactctgctgatttcaatccataatgataattttttaaaaaatagcaaatacaataataacatacacaatgtaagtgtacttacaagaccttgcattgaagataagaatccatctctgtcattttcatatttaatcattccattattaaatacaccactaaacaaatttagtgtacaaaaaataataaaaatactttcccatgagtaaaaaatacttactactccatattgctcagttgtgagtaatcttgtaaaaattggaactgttataaaactaatgcccttttgcacaaatccacatatcgtaaaccacaatgctgccttggaagcaatagacattttattatatattttttttgttttttctaacatcatttatacctttcaagaaattcaaaaccaagatattttctttctctaacaaattccaatgtttctatagccgtcgtagtaattgataaagctaaatcataaaatacactgtcatcataatttaaaacctctgtaggtatgtacttatctatgtataagcagttatatttctcacataaattactataatctgctttatccctaggatgaggctttattgttatggtgtaccccattccagtatactcttttattatatcttcatatatttgcatttgctgttccagattttgtagctgtccatcttctgataatggctgggtacacagcaaaagtgttttattacaattattatttattattttttgtttacagaatataccatatattagtttcttttgctgtaatgtcagtttgtcattaattccttttcgtggtatttctattatattttccctatcaattgccagaccatttttatcatttacttcaatatcaattacatattgatttgttccaaaagctctgtgtcctatattcaatttatttttcaatctgacttttaaactatttatatcataatccactttattcacttgataatatttattaaagtatttaaagaaattcaatccgtcctcaattaaatgatatctgatttgattatttacaaaataccagcctaaaatttcaaaatcattaaacagaaaaatattatccttatacttagtccaatctatttttaatttagtgttaatatatttattctcgtaatttttttgatttactatcttatcaaatatatttttatatttaatatttttgtagtctacactatcaaacacatatatatcatttataaaatccaatgactttatggtttcaatcttatttttgtaatctggcatctgagaacctatcaccaaatcaattttctcattttgtaccattgcttttgcaaccgcaatatataaattatataagctaaagcagcaatatactttcattttatttaccttctatattttgatttttattttctttttaattgttttagaatctttatcaaatttaactggcattaaatcaacgattttatcaatattgtatgccaaaaatatcacacaaaataataaatgcggcatctgatacatttctgttataaaatcaacaaaatacgcaacaagtattatggttaatacctttgtatacggatgttctttatattgctttaatttatgactaacaataaaaacaataattccaaataacataagtcccaataatccctgttgaaccattatattcaggtatgtattatgtgcctgtgtagtagtccaggttgttaaattgtaactaacatttccatttcctaatataggatgacgcgatattgatttgagtgccaaagcccatattatagttcttcctgtaaaagatgaatctctatttaaatatttatataatatagccgaaaaattctcctgaaaattcataaatattatcaagtaactaataacaaaagaaataataaaaaacacaaatacatttggcagattaagtttaaaagcctttaatgaaaaaaccattataataaaagcaatacctaatgccactaaagatgttttcgaaccagccatataaattccacatattgtaaatacaaacagaccaattcccatgacagacaatttgcctcttagtttatatatatacatatatgagaatgccagccatggtaaatatgtaaaaatatgtgaattataataacccattacccaatttgccttccatcctctactgtctgtatataatccacctgggtgcataacaatcgtgataaaattagcaacaattattattccaataattattgccatattctttataaaacatgatatatcattatataaagcaaactccataatcaaaaccataccaaacacataaataaaattcgaaatatctgcagaagtgtcagtatgtctaattatacatatcactatattcaaaaagtaaaacaaaatggataaccatgtaatcatgcaaaatcttatcttatataagatgcaacatattaatagaaaaaatataacaaataatctaaaataatataatatgctatttaaaagattaccaccagtttccataatccctcttggaactaaaaacgggattacgcatataatgagcattatatttatcagccttttattattttcatttatcattaactagctccttttaaaaacaaatcatatcattaattacctattctggtctgttaattcttatatcatcttttattctaagtctttttctatattttttcatcaattttgaacaaataaagctaggaacaaacatacatggatacaccatcacccatgctttcacatattttcgagtgcataaatacatggttttataattcattttatgtattccagaagctttttccttaagaatatcatgaataaaaagatggcatgttcgatttttatacatttgattcaattgtttcttgtcaaaaccaatctcatttatcataaaatcaatcatttttttataataaactccattaattaaagcagaatcaaaattaggcgtattaacatatataccagcgccaacacatggaccttttacaatccccagtttagtatcttcccctttggcacacaatgcatgtatatatgattgcaaccaatatgtatccgcatactgttctggattttctatttttttaaaattatccgtattacatataaacgaagctaaaaaaccccaataataacctgcatatttcataaataattttttatcttttgtacagatatcattcattgcttcaggttcatgcttttgacatgattcagaatcaatatatttattcctaaaatctcttgtagtaacatatattaatcccatatcatcaccgttttcaataaatttaagaattttatcaactgcattctccattataatatcatcatctgacattagccaggtatactttcccttagctttttgaagacattttatgcaatttctatcagtttttaaatttgtttcattgcaccaataacttatatttccccatttattctgatattcttttataatattaggagtgctatctgttgaacaattatcagacactaaaacctctattttttcattacattgtggcatcaaaatgtccaacatattcttaattgttctttctccattatatattggaattgcaattgttaatactggctgatttttcattttaactatcttatctctttccttatgattgtttggctattgtaggcaaattcatttttacagtaattttagcatatgttggtcttacacaattaatcataaaagcagctatacatacagccgcctttctaggcattatatgccatattccaccatataatttctttttcaagcctcttgtgtctttacaaaattccatgtgattccactctgtttcttttcgatattgtgcatataaaacagcatatggactgtcactcttctctatccacatacgtttcctcacataaaaacatgtagttgcatgaattattgccggctttttctttgcccttataatttgatttttggtataatattcgactggctttttcatttttataatttcatcataaccaaatatgtatatagatgtaagcatattatattgtggttctaacaacttaatatgtccatctaaaactatattcaatatatcctgttctaaaaaaaacattgtttcattattctctataccctgtaatattttatctacaagtttctgacctatgtttttttctctccattttttcaaatcaatcaataatacacccgcattgcaatatttcatcgaatctgacgcctgtaaaactcttttttgtattgccgtgcctacacaatcatatacacctgcaacaatctgatctttttcaaaagctgtattgtacatttcctgtatagaatccaatacaagtgtgtcactatccaggcttaataccctgtcaacatttgaaggtaatatctctgccaaagccattcttgcatatgtatgtcccaaatcatactttacttctggatacaaatctttctgttctggtttctttataaaaaaaatctttcttgaaaaatgttgtacaatattatttaatctttttttattttcatccgatatgttatcttcaactacatatatatttatatcatcggcatccttattgttttcacataaagattgtatagcaactccacacatctccgaaaataaatcgctactataataaacaatattcattggtagtctccttattcctcttctatgcctttaacaaattggttcatattccagcctgaattcataccaataatctttgctggcactccacctacaacagctccacaagtttcaatatttttaactacaacagcattagaagctatcattacatcatctgcaatttgtatatcaccaaaaacacctgctcctgcgcatattgttacaccatcaccaatcactggacactttccattatcatcttttcctaatgatattccaatagttgttccatgaaataaacagcaatttcgtccaacagtagaatttgatgaaaccactatattctgcaaatgagcaattaacagcccctttccaaatacatttagtggtatcatgacattatgtcttgaactcattatcttaaataatattttccagtaaatgcctataattttagatgcacctttaacatttgaataatattctgcatgtcttaatactgattgaaataaaagctccttccgaaagacctttttctttactcctgatggataatttctttttatccatatctttctttcaagttcaatccactgtttcatttccttttttgattctatcattatactcactcagttctttattaaaatattatctaacagcttccttaatagtcttagccatataatcaatcatctcatctgtcattcctggatatactcctacccagaatgtatctctcataattctgtctgttgtatcaagtccacctactactctgtagccttctcctgttgctctcatctcatcaaagcatggatgctttataagatttcctgcaaaaagatttcttgtctgtactccgtggctctctacatactcaactactgcctttctgtcaattccttcctttactgttataaggaatccgaaccagcttggtcttgagttctcacatggtacaggaagaattaccttatcctctatatctgcaagtgctgctcttaatctgtcaaagttatgtcttcttctctcaacaaatgatgggaacttctcaagctgtgcacagcctaccgctgcctgcatatctgttgctttaagattatatccaaaatgtgaatatacatacttgtggtcatatcctaatggaagttctccatactgcttgtcaaatctgtgtccacagaggttgtcctttcctgatgggcatacacagtcacgtccccagtctctgaatgaacggatacacttattaagaagtgcattattagtatatactgctcctccttcacccattgtcatatgatgtggtgggtagaagctgcttgttccaatatctccgatagttcctgtgaacttttcttctccattgattgtgtacttagaaccaagtgcgtcacagttatcttctacaagccagagattgtgcttgtcacaaaatgcctttactgctgaaagatcaaatggattaccaagtgtatgtgcaatcataacagccttagttttgtctgaaagtgcatcttcaagctttgtaacatcaatgttgtactgtggaatagtaacatcaacaaatacaggtactgcaccatactggatagccggtgttattgttgtagggaaacctgctgctactgtgataatctcatcacctctcttgattcttctgtctccgagaagtggtgatgtaagtgccataaatgcattaaggttggcagatgaaccagagtttactactgatacatactttactccgagatattctccaagcttcttctcaaattcatctgtataacggcctgctgtaagccagaattcaagtgctgaatcaacaagattcatcatttccttgctgtcatatactctgctcgcataagaaattctgtcaccttccttatactgcttctggttatggtacttcttgcagtattcatctacaataccaagaatctcctgtcttgcttctaattcattcttattgtcaaacatatcatatcctctttcttattttattaactctgccctactcagtaaagaattcttcaatctctttatccatacatgcaacggcatctccgcctgctgcatatacctttgaccattcaacactcttctcaattgctgtatcaaagttccatctgggcttccagccaaatgttgtctttaactttgagcagtctaactttaagaagttggcttcgtgaggtcctccgtcatatttattaatccatgaaagaccttctccccacttgttacagaaagtatcaacaagtgttcctgttgtaatgcagtcactttcatcaggtcctacattatagaaacctgcatacttcttatcactgtactgctcctttgcaatcataagataagctgcaagcggctcaagtacatgctggtatggtcttgttgaatgtggattacgcacaattatatcttccttcttaactgcagctcttacacagtcaggaacgattctgtcattggcgaaatctcctccgcctataacattaccggctcttgctgttgaaactgcaacctccatatcattgaaaaatgaattgatatagctgtgtgttacaagctctgaacatgacttgctgttagagtatgggtcatatccgtcaagaggctcattctctctgtatccccatgcccactcattattatggtaaaccttgtctgttgttacatttaaaaatgattttacacacgggttaagtcttacacattcacagatattaactgttcccataacattagtttcataagtatatacagggtctttgtatgattcccttacgataggctgtgctgcaagatgaagcactatctcaggctgtgtctcttcaaacaccttcttaagatgctcaagatctcttatatcacctattacagaattcatcttatcctctacatctatcattgaaaaaaggttaggctcagtaggtggaacaagtgaataacctgtcacttctgctcctgctttaaaaaggattctgcaaagccatgagcctttgaatcctgtatgtcctgtaacaagaaccttctttcctttataaaaacttaaatccatcttaatcctcccggcttagtcccatttcttccaaggagctgttccagttgcaagatacttctcgagcatatccatctctctcttggtatccatgcactgccagaagcccttatgcatataggacattaactgaccttcctttgcaagtttttctagtggttctctctcaaatacagtgtcatcaccatcaatatagtcaaatatttcaggattaagcaccatataacctgcattgataggtgcaccgtctgtatggctcttctctctgaatgacttaacagcgttgtctcctccgatatcaagtacacccttctgctgttcaagcattacggctgtaagagtagcaatcttgccatgctccttatggaactcaacaagcttgttcatgtctacatcacagacaccgtctccatatgtcataaggaatggctcgtcccctacatatttctggatacgcttgattcgtcctccagtcattgtattaagacctgtatcaactacagtaaccttccatggctcacaatgctgctcgtgaataatcatatcgttagagccttttgtgaagtcaaatgtaatatcactgttatgaagaaaataatccgcaaaccattctttaattacatactgcttatatcctgcacatataataaactcatcaaaaccataataagcatattccttcataatatgccagagaattggctttcctcctatctctatcattggctttggcttaaactgactttcttcacttattcttgttccgaaacctccagccagtaaaacaactttcat

SEQ ID NO: 157 - DNA, 9354 bp, unidentified
  source 1..9354: mol_type = unassigned DNA
ttaggaacgatattccttaaaatactctattatatactgtaaaccctcttccagctctatagtcggttcccagcccaacttttcctttgccagagtgatgtccggctgacgctgtttgggatcatcatgaggcagtggcttgaaaatcagtttcgacttggaattcgtcagcctaatgaccttttccgccagttccaatatggagaattcattcggatttcccaagtttaccggaccgataaaatcgtcctccgtgttcatcatccgcaccataccttctatacagtcatctacatattggaaacttcgcgtctgattacccgaaccgtatattgtaatatcctggttctgcaatgcttgaaccacgaaattggaaaccacccgtccgtcattcggcaacatccgaggaccgtacgtattgaatatacggataatcttgatccgcactccattctggcggtgatagtccataaacaatgtctcggcacaacgcttcccttcatcataacaagaacggaggccaattggatttacatttccccaataactttccacttggggatgaataacggggtcaccgtacacttcgctggtagaagcctgcaatatcttggcattcgtctttttggccagtcccagcatattgatggcgcccaatacagaagtcttgatggttttaatggcatcatattggtagtggatgggagaagcaggacaagccagattatagatttcgtccacatctgcctcataaggggtttccacatcatgcagtacaaattcaaagcggggattgctcttcagatgagtgatatttccttccgaaccggtgaaaagattatccagacaaatcacctgatgcccgtcgtttatcaatcgggtacaaagatgagaacctataaaaccagcaccgccactaaccaaaattttcttcatgtaatgttttttatagtgccttaaagcacataggacctattctgtttgttttgatgctgacaaatgtaggcgatttgactaaattatgcaagtttgcaacgaaatatttcacttgttaatgaatataaagaggcagattaaaaaatccacccctgaaatattcatttatttatccgccacatactcttctttcttatccggaatgctgaagttcttgttcgcaaacaagtctgccagacccgaaatttgctttaaacgcaacacttcgtcgcgatccattccgatattcttcattatccattcatcagacataccggctctgtccaattccgcaacaatatggcacatcaactcgatattatgcgtaccacgggcacgattatgacggatagtggacgccatacggttggaaagttccttgtcaatcacgaccacgggaagcaacccgttttcgcgctgataaattcttttggatgtcttcaacacctgataacggtggtaaccgtccaccaggatgtagttatcctcttcctcatcatagtaacagacacaaggcatggtgaaaccatcttcccagatggaaagctccagaagcttcatttcgggcggtgccactacattcggattgtaatcgtttgcttgtattttctctattggaattgcctttacattatataccggacttttatctacgctcataacatcatatttttgaattgttccattatcttgtctcttttgtatgcctcttccttgttcaaggcaaaacccatgtacttgcaggcatggtcattcttcaggatgcatatgcacatccgcttataagtgggaatttcccggaattccgcgatgtcaatatcatccagataatccatgcgcaccggcttcttgtttgtcttgtaattcgtggtatttatcacttcaatggacactcctgcatccctcagcttctggatggtctcgtcagccagacagcccccttttgtacgccagaattcaatgctgacggtaagctttttcaagtagttcctccgggtctcttccggcaaggtagaaagcaggaactgcataaagcctttccacgtatacccttcgggcagtcggaccgtctgccaccccatagcacgcgtccctccgtaaataccggtaaagttcaccccgttgacccgccctatcattcttccccaagtattcgggtcgatgacacgatacagcttcaggctctcttgtgcctcacaaagaaaagggcttgccacacgctggcgttcgatattgactccggctttataatataggtcatacaaatggttatagtcaaagccgaatttgccattggccgtccagatatccgtcgtcttccaatcataaatgggataagcattgaaaatgtcattgcctatcttcgaggtccagcggtaattgtggtacatctgatacttccggttcagatggatgctgcgccagcggttaaaactctcttgcgtacggatgcctatgagaaagcaggcacgcactccatccttcttctcatgcagccatttggcaaagtgcatctggaactcataatcccacatttcgggagtgtagaaaggaaacgtctctttagtgaggcagcctttcggcatcttccttacccaaatgtcctccaaatcctcctgccacggacgccagtaactctggtacatcgacgtacaagtcgttacacggaaaggcacacaaacacggtacacctccaatatatccttattcgcctccaatacccggtccacataatcaatggtcatgctgtactgtatctcatagtccatatggaatacacacagtttacggttcagccggttccggcggatatagtctatgcacaaattcagcaacactccactatcttttcctcccgaaaaagagacgcatatcgtgtcaaattccctaaaaatcacatcaagacgttcttgcgccagttcatacacatttttgggtgtagccataattatctgtttttcttcattttcacataacgggtccataccttgtcttccaaaaagcccagctcgctgaagacatccctatcttcaacaaagctaacagccgtcagactactctcctcgccctgcttctcaagtaccttttccagaagcaattttagcgtgtcaacattcctttccttaatataatagttgttgatgacacattcatacttcttgtgctccaccggcacaaaacctacaacatgtttattatccagagcaacaaaccactcgtactcttccgatgtccggaaagggtaattgtagttctgtttcagcacttccgggctcataaccaaaggggctacaagctcgtacagctttttatccgtaccatgtaattgcactatctgtatcatatctacatttatattatttgtaattacgtgttaaagataaagcttatttacgacggaatattctccttttaaatagatttaagaatatagccctgtaatataaaatattaataaataaatattatccccctaatttgtatatgttgattaatttgggtttctttgcaaaagaaagtcacccgaagagaaataatgaaatatttactgctttttatgacctttgccaagataggaatgttcactatcggtggcggatacgctatgatacctctcattgaacgggaaatcgtaaaaaagagatggatgagtaaagaagatttcatggaaatgtttgcgttgacccagtcacttcccggtgtttttgctgtcaatatatccatattcgtcggctacaagctgcataaagtaaaaggtagcctggtgtgtgcacttgccacaatcctcccctcttttgtcatcatgatgctgatagccatgttcttcgctcattttcaggacaaccaggtgatgatacgcatctttaacggtatccgtccggcagtagtcgcactgattgtgataccctgcatttcggctgcacgggcactgaagctgaagtattggcaactggtgcttccagccatcgccaccatactcatctggcaattcgggctatcccccgtatacattgtccttgcaggaattgcaggaggaatgctctatacattatggttaaaagataaactgagaaaattacagatatgatttattggcagctgatattggtatatctaaaaatcggaatgttcggtttcggaggcggttacgccatgttgtccctcatccaatatgaggtggtggaccaccatcactggctcaccctgcaacaattcacggacgtagtggccatctcgcagatgacgcctggtccgataggcatcaacagtgccacctatgtgggctatgcagttactcaaagcgtgtggggagctgtcgtgaccaccattgcagtatgtcttccctcgttcatcctggtattgctcatctcttacttcttcgtgaaatgcaaggacaacaaatacatcaaggcggcaatgtcgggactgctgcccatgtccgtatcattgatagctgctgctgccttattgctgatgaacaaggaaaatttcatagattacaaaagcatacttatctttgcagccgctttcggcgtgacgtggaagtggaacctccaccctatcttactgataatccttgccggagtcgcaggcttccttctatattgaagaagcggtagagacggacaccatcttgcgggcatatgcccacaccacgcaataggcaaccagcggtacgatgaacgcccacaccatcgtcgtatggtctgccaccagtcccatcaacagcggacctaccacgcctcccacgggagacatcatcaggaaagaggaagccctcttggtatggttgcccagcccgcgcaaggaaagtgcaaaaatcgtgggaaacataatagcctcaaatgcatatccgcacaacagagctgcaagcgacaccattcctacatccagcaacaccaacaaggtagtcatcacagtgcccgtagcacaaaccagcaacatcttctcggcacgcacacgtcccataatccagctaccggcaaaacgtcctaacataaataatcccagtccaccgaaagaaagcactacggaagcttcgcgggcattcatccaattctgctccaccacgtagttgatgaagaagctgttgatggaaatctcgccgacctcataggcaaacaaggctatcagcccgaaaatgaaaagccggtgtgaccacaatccgaccttattaccagcttcgtccacctccacactatgttcaatctcgggcaacttgattcttgaaaagaccagcgctaccagcaacacaattacccccatgcagatatagggcaatgcgacattacccgagcccgtctgcccatccttcgagaagagtagcagtccagccagtaccggtgcacagatacatcccagaccattgaaggattgtgcgaaattcagtcggctggcagcagtttcctttgcgcccaattctgtggcataaggattggcggcagtttcaagaaacgtcagtccgcaacctatcacgaacaatgcaaacaagaaaagattaaaagacagataatgctgcccggggataaagagcagcgaaccgatgccgtagagcaacagaccgaataccacaccccggcgatatccgaagcgactgatgaaaagtcctgcaggaatggccatgatgaagtatcccatatacatcgtcatctgtataaaggccgaatgtgtcttcgtaatatccagtatctcttgaaagtgcttgttcagtacattcagaatggcatgggcaaatccccacaaaaagaaaagagaggtaatcaaaatgaagggcacaaggtattgtccgcccaccaatggtattcgtttctgtttcataatatgataattccagacaatcgttgcaaggcgattgataattgcgggtgcaaagataaacaaaactcccggtctttacccaacattttcctattcgctattgtacggagcaactttttctctaactttactgccatcatacaatgttaagccatgaaaaatgccatcccacgatacaatttctacaaaactaagtacggaagcgaacttctgatagatgtcgttgatttgcagtatacccggaaattcttgacccagggaaaagtacatattctgacctactatgacatcaccttcatcacagaaggagaaggagaattcactatcggtaaccggacacacttggcagctcccggtgatgtattcttctccaaaccaggtgaggtgcgcagttgggacacagaccgtatcggcaacggtcatgctctaatttttgaggatacctttttgacctctttcttcaaagacccactattcgtgcagcacctcccgttcttccgaatgggaaaaatggtagacaaactccaactgccgaacgggctctatgcacgaatactccaacttctgcacgacataaaggtcgaaatcgactctttccacccacacgatacgggcatattacgcgccttactttacgaagtcctcatgctactcaaccgtgcctaccgcacctctatccctccggagacgggtaaggagccacataaagatatcagcagcttccacctcagccgattcttcgaattggttggggagcacttccgggagcagcattctgtacaattctatgccgataaactatgcatcactcccaactatctgaacgaaatcctctcttcggccataaacatcaacgccaagcagtacatactcaacaaggttacagacgaagcccagcgtctgctcacctacaccgacctccccatttcagaaatagcctccgaactccatttctcaaccgtctcctactttgtacgtagtttccgacaatgtatagggtatactcccctcgcctaccggaaaatggagaaaccgtgaaaagtgacatatcctccttcttttttattgtacaaaagttccacttaccggctatctttgcccttgaaacaataacccataaaaaaaacaaacaatgagagatgcagaaaaaacagtaggaaacatgattgacaaggaaaaaaccatctttgtcggttcggtgaatgccgaaggctttcccaacatcaaggccatgttgcaaacccgcaaaagggaagggctcaaacacatttacctatcaacgaacacctcgtcgatgcgcgtttcgcaatttctcaaaaataaccgggcatgcctttacgtctgcaacacacgcttcttcaagggcgtaatgctgtgcggcacgatggagatactgacggacagcaccagtaaggaaatgatatggcaggaaggcgacactatgtactaccccgaaggagtgactgatcccgattattgtgtcctgaagttcaccgccttcgccggtaggtattacagcggatttaaatcagaagacttcacgatagaataaacgggccatccgttccagtccatcagcaagcagagcccggggacaagcgatattcagccggataaagccctctccaccgggaccgtacatcgtaccggaattgaccatcagatgctgttgttcttgcaaacgcaaggcgacagcatctgagctgataccggaggcacggcagtctatccaaaccaaataagttccttcgagtggcagcacgggatattgtggtaaccgttctccgaaaaagcagcggaggtattcgtaattcccccgcagatatttccgcaaggcatcgagccattccccaccttcgttataagctgccattgtggcgattacgccgaacggattgacgtcgcatacctcgttgatattgatggctctgtcaatacggcggcgcacctcttcatcggctgcgatgatattggcgatttgcaacccggcaaggttgaacgccttgctcggcgaaacgcaagtgacggaattttgcaaaaagcgttcggacaaggaggcaaagggtgtgtagtcatatccttcgtaagtcagttcacaatgaatctcatccgccacgacaaacacctcattccgtaaacaaatatcacctatatgctgcagttcttccagagtccagacccgtccgaccggattgtgaggattgcacagcagcaggatttttgctttcggatcggaagctttcctttcaagatcggcaaagtcgattacgtagcggccatcctgataaatgagattattggcaaacaactcgcatccgtcattacggatagatgagtagaaacaattataggcaggagtctgaacgatgactttatcacccggcatggccaaggctttgataatggctgacagagccggcacgacaccactcgtatagataatccaccgggaatcaacctgccagcgatgccggtcatcgaaccaccggacaaccgcatcataataggcttcgggtacttttgtataaccgaaaataccgtgcgccacccgcttttgtaaggcatcgataatagcgggtgctgtacgaaaatccatatccgccacccacatgggcagtacattctcctcttcgggagtatcccatttataagaattcgtcccgcgacgcgagatgattgtatcgaaatcgtatttcataatttataaatccagttaccatcccaaagcctcaactcacaatcggcaggcgcctttatattttcgtcgagaatgatttccccatagctttcggcagtgatacagcctgtccgtggattcttcaccccgcctattgttcctttgatggttgcctgcaccgaactatattcaaaagcccggtcgcagtcgggaccaaaggtgcaattctccagtacgaggtcgtgggcatagcagagcggttgctcaccggttatatggcaattcaccaaccggagattgtgcgaatgccagccgagatattcgccgttgagttcagaatcgtagattgtcacattctccacctcccagaaggcatccttcgtagtgattttggcattgcgcaactccacattcttcacatactggaaaacgtacttgctgtcgctttccaatccgtctatgcggatgtcgctgctgaacatgaacggataagttcctccatgcagtttcagatttttgatattcagatttttacaacgccagaacacctcattggcatcgtttatctctacattctctatttcgatgtcatgcatctcgcgaaacattttgggtgcatcgatacgcgtatcagtcattttcagatggtcggaataccacagtgccgaacgcccgccgacatcgaaaaaacaacggtcgataacaaatccgtgaacatgccagaagggataatttccttcgaaccgacaatcaacagcttcgatgttgctgcattccttgatggctgattctccagcacggataactacattctccatacgtaagtcatgcaattcgaacaaaggtctttctccgccaaatgctgtatttgatattattttcat

SEQ ID NO: 158 - DNA, 7918 bp, unidentified
  source 1..7918: mol_type = unassigned DNA
gacgctatcaagatgattatctcaagcaaggacgtcagttctcaggaagaactgctgcaagctctgagcaaagaaggctttgaactgacacaagccactctctcccgcgacttgaaacaactgaaagttgccaaggcggcaaacatgaacgggaaatacgtatatgtattacccaacaacatcatgtacaaacgttccaatgaccagagtgccagcgagatgctgatgaccagcggattcgtgtccctgcaattctccggtaacattgccgttatccgtacacgaccgggatatgccagcagtatggcctacgacatcgacaaccgcgaatgtcccgccattctgggcactattgccggagacgacaccatcatgttggtagtgcatgaagccgcttcacatggcgaagtacgcgaatttctgtcgcaaatcattccgaacattaaataaataaagaacgaatcaataagaaatggataccaaaaaagtggacgtgatggtggctgacgcctctcacgaagtttatgtggataagattttggataccatcagagaagcggccaaagtacgtggaacgggcatcgcagaacgcacacacgaatatgtggcgacaaaaatgaaagaaggaaaagccatcatcgccttatgcggagacgtgtttgcaggcttcagctacatcgagagttggggaaacaaacaatatgttgcgacttccggtttgattgtgcatcccgactttcgcggtattggattggctaagcgtatcaaaatggcatctttccgcctggcacgcttgcgatggcccaacgccaaagtattcagtctcaccagcggagccgccgtcatgaaaatgaatacggaattgggatacgttcccgtcactttcaatgaactgactgatgacgaatccttctggaaaggctgcgaaggctgcatcaaccatgatatattagtagccaagaaccgcaaattctgcatctgcacagcaatgctctacgacccggctctgcatgaagatgataaaatttaaaaaacaaaggatatggaagaaaagaaaaaagtagtagtcgcattcagcggcggtcttgatacttcatttacggtaatgtaccttgccaaggaaaaagggtatgaagtgtatgcagcttgtgcaaacaccggtggtttcagccccgaacaactgaaaacaaacgaagaaaacgcttataaactgggcgcaaaagaatatgtcactatcgacgtgacgcaggaatattacgaaaagagcttgaaatacatggtatttggcaacgtgctgcgtaatggtacctatcctatttccgtaagttccgaacgtatcttccaggcacttgccatcgcacgctatgccaacgagatcggtgcagatgctatcgctcacggttctaccggtgcaggcaacgaccagattcgttttgacatgacattccttgtattggctccgggcgtggaaatcatcacactgactcgtgatatggcattgagccgccaggaagaaatcgattatctgaacaaacatggtttctcagcagacttcaccaaactgaaatactcttacaatgtaggtttgtggggtacctctatctgcggtggtgagattctggattccgcacaaggattacccgaaagcgcttatctgaaacactgtgtaaaggaaggcagcgaacaactccgtcttactttcgaaaaaggtgagttgaaagctgtgaacgatgagaaatttgatgatcccatcaaagccattcagaaagtagaagaaatcggtgccgcttacggtattggtcgtgatatgcatgtgggtgatacaattatcggtatcaaaggccgcgtaggtttcgaagctgctgctccgatgctgattatcggtgcacataaattcctggaaaaatatacactgagtaaatggcagcaatactggaaagaccaggttgccaattggtacggtatgttcctgcacgaaagccaatatctggaaccggtgatgcgcgacatcgaagccatgctacaggaaagccagcgtaacgtaaacggtacggctattctggaacttcgcccattatctttctctacggtaggtgtagaatcagaagacgaccttgtgaaaacgaagttcggcgaatatggcgaaatgcaaaaaggctggacagcagaagatgcgaaaggtttcatcaaggttacttctactccactgagagtatattataacaatcataaagacgaagaaatctaaaaagcctatcccctaacccatctctcatagagaacggttaggggatagaacaattatacgaacagatatggataataataacaaaaaactaactcgctcacgcagcgacagaatgcttgccggcgtctgcggaggattggccgcttatttcggacttgacccttcactcgtacgtatcggctatgcgttattgacgttttttaccgtatttgccggtatccccgtgtaccttataatgtggcttattgttcccgaggaaaagaacttgtataacagataaaagaataattgtataaactaacatgattaaagtaggaatcatcggcggagccggatatacggcaggtgaattaattcgtttgctgatcaatcatccggaagcggaaatcgtattcatcaacagctcaagtaacgccggaaacaaaattaccgacgtacatgaaggattgtacggcgaaacggaccttgtcttcaccgacgagttacctttggacaaaattgacgtgttattcttctgtaccgcccatggcgacacgaagaagttcatggagagtcacaaccttcccgaggagttgaagattatcgacctttctatggactaccgcatcgcttctccggaacatgactttatttacggtttgccggaattgaaccgtcgcgctacctgcaaagcaaagcatgtggctaatccgggttgctttgccacttgtatccaattgggattgctcccccttgccaaacatctgatgctgaacaatgacatcatggtgaatgccattaccggttccaccggggctggtgtaaaaccgggatcaaccagtcacttcagttggcgcaacaacaacatgagtgtttacaaggcattcgagcaccagcatgtacccgaaatcaagcaatctctgaagcaattgcagaacagttttgatgcggatattgactttatcccttaccgcggtgatttcgcacgtggtatttttgctaccatcgtagtaaaaactaaagttgcactggatgaaatagtccgtatgtacgaagaatattacgccaaagactctttcgtgcatatcgtagaaaagaacatcgacctgaaacaagtagtgaacaccaacaaatgtcttctgcatttggaaaagcatggtgataagctgcttatcatctcctgcatcgacaacctgctgaaaggtgccagtggtcaggcggtgcacaacatgaatctgatgttcaatttagaagaaaccgtcggcttgcgattgaaacccagcgccttctaagtaatttgtattttgtaatttagaattaaagaaatgaacttattcgacgtatatcccctttttgacatcaacattgtcaagggaaaaggctgccacgtgtgggacgagaacggtactgagtacctcgatctctacggcggacatgctgttatctccatcggtcatgcacatccgcattacgtggagatgatcagcaaccaggttgccacgttgggattttattccaactctgtgattaacaagctacaggaacaggttgctgaacgtctgggaaaagtttgtggttatgatgactactccttattcctgattaacagcggtgcagaagccaacgaaaatgctttgaaactcgcttcgttctacaacggacgtacacgtgtggtttccttcaacaaggcattccacggacgtacttcacttgccgtggaagtgactaataatcccaaaatcatagctcctattaatgactgcggacatgtcacttaccttccgctgaacgatattgaagctatgaaaaacgaactggcaaaaggtgatgtttgcgcagtaattatcgaaggtattcaaggtgtgggtggtattcaattgccgacagatgaattcatgcaggctttgcgtgaagcttgtacagctcataatacgatattggttctggacgaaattcaaagcggttatggccgcagcggtaagttcttcgctcatcaatataacggtatcaaagcagatattatcacggtagccaaaggcatcggtaacggtttcccaatggccggtgtacttatcagtccgatgttcactccggtttacggacagttgggtactactttcggcggtaatcacctggcatgcagcgcagcgcttgctgtcttggacgtaataggtcaggagaatctggttgaaaatgcagccaaggtaggtgagtatctgatgacggagttgaaaaagttcccgcagatcaaagaagttcgcggacgtggtctgatgatcggtcttgaatttgaagaaccgataaaggaacttcgtctgaaactgttgaaagaacaacatgtatttaccggtgtcagcggtacaaatgtactccgcctgcttccacccctctgcctcagcatggaagaagccaatctcttcctcgaacgtttcagaaaagtactttaaagtatatttgataacataatcagcaataaacaggcagccttcaagcgtttcagcgtttcttaaggctgcctgttgttttaaatacacaagcactttttttacatcaattaggttagaaaggtagaaaaaatatctacctttgcccatcgacaacccttttaataacagaatgatatgagaacagcaattatcggagcaggaaacatgggcggctctatagcccgtggattggcaaagggaagtattatccccgcctcggatatcatagtttctaatccctcacaaggaaagttggatgaactacaagcagagtttcctgctttacaaatcacccatgacaatcaggaagccatcatcggcgccgaattcatcatactcgctgtgaaaccgtggcttatcaaaggtgtgctgcgcgagctgaaactgaagagtaaacaaattatcatttctgttgctgcaggcatcaactttgaagagctggctcactacgtacccgaaccggaaatgaccatgttccgcattattcctaacaccgccatcagcgagatggaaagtatgacactgattgccagtcgtaatgcgaccaaagaacaagaacaactgatgctggatattttcaatcagatgggacttgccatgctgatccccgaagaaaaattcgcagcctgcacttccatggcttcctgcggaatcgcttatgtgttgaaatacatccaggctgccatgcaagccggtatagaaatgggggtttatcccaaagatgcaatgagaatggtggctcaatcggtaaagggagcagccgaactgatactgaataatgatacgcatcccagcgtagaaatcgataaagtatgtacccccggcggtattaccatcaaaggtatcaatgaactggaacatgacggttatacatccgccatcatcaatgctatcaaagcaagtaagcaataagactaacaattaattcattaaataaacaaccacatggacgaacaaattaagcaaatagcagaacgccttcgcgggcttcgtgatgtactggagctgaccgctgaagacattgcccgtgaatgtgacatctctccttacgactaccgtcttgccgaaacgggagattttgatatctccgtaagtatgttgcaaaagattgcacgcagatacggagtttcattggacgcactgatgtttggtgaagaacctaaaatgagcagctacttcctgactcgtgccggaaaaggtgtcagcatcgaacgtaccaaggcctacaaatatcaagccctcgcttctggtttcatgaaccgtagcgtagacccgttcattgtaaccgttgaacctaaaccggacgatgaaccgatacattacaacagccacgccggacaagaattcagtcttgtgctcgaagggcgcatgatggtcaacatcgatggcaaagagcttatactaaacgaaggagacagcctgtacttcaattcaaaattgccgcatggcatgaaagcactggatggaaaaacggtacgattcctggcaattatcatgtaacaactaaatggagaatgaagggaatctctcattcttaattcctataattatggtagaaagatttttatcacaaacctctttcactacacaagaggactttatcaaaaactttaaaataaacgtaccggaaaacttcaacttcggatacgatgtagtagacgcctgggctgccgaacaacctgacaaacctgcattgttatggactaatgataagggtgaacaccggcaatttacgtttgccgacatgaaacgttatacggacatgaccgcctcgtatttccaaagcctcggcatcggccatggtgacatggtaatgttgatattgaaacgccgctttgaattctggtacagtaccatagctttacataaactcggtgccgtcgtcattcccgccactcacttgctgacaaagaaagatatcgtgtaccgctgtaatgctgcggacatcaagatgattgtttgtgcaggagaatcggttatcacggatcatattgtagctgccatgccggattcccccagcgtgaagaaactcgtcagtgtaggtccccaagtagccgaaggattcgatgatttccacaaagggatcgaaaatgccgcacctttcgtgaagccggaacatccgaatacgaacgaagatatctcactgatgtacttcaccagcggaaccaccggtgaaccgaaaatggtcgcccatgactttacatatccgttggggcatatcgttaccggtagtttctggcataacctgacggaaaacagcctgcatctcaccatcgccgataccggttgggggaaagctgtatggggcaaactttacggacaatggattgccggagcaaatatatttgtgtatgaccacgagaaatttacccctgccgccatcctggagaagatacaggattatcacgtaacttctctctgtgcacctcccaccatcttccgtttcctcattcacgaagatctgacaaagtacgatctctcatcactgcaatattgtaccatcgccggcgaagctctgaacccagccgtatttgagaccttcaagaaactgacaggcatcaaactgatggaaggattcggacagacagaaaccacgctgaccattgctaccatgccttggatggaaccgaaaccgggaagtatgggattgcctaatccacaatacgatgtagacctgatagacaatgacggccgttccgtagaagccggtgaacagggacaaatcgtaatccgtacagacaagggtaagccactgggattgttcaaagagtattaccgcgatccggaacgtacacacgaagcctggaacaataatatctactatacgggagacgttgcctggaaagatgaggacggctatctctggtttgtaggccgtgccgacgatgtgatcaagagttccggttaccgtatcggccccttcgaagtggaaagtgctctgatgacacacccagctgtaatagaatgtgccatcacaggcgtacctgatgaaatccgcggtcaggtagtgaaagctaccatcgtactggctaaagaatataaagggaaagagggagaagcacttatcaaggaattgcaaaatcatgtaaagaaagtgacagccccttacaaatatccgcgtgtgattgaatttgtagacgaactgccgaaaaccatcagtggaaagatccgtcgtgtggaaatccggaagaacgatacgaaataa

SEQ ID NO: 159 - DNA, 6091 bp, unidentified
  source 1..6091: mol_type = unassigned DNA
atgaaaatattagtgaccggaggaaccggatttattggaagtcatacctgtgtagaattgctggatgcaggctttgaagttgtaatccttgataatctttataattcacaggcagatgtcgttgataagatagaaagtatcacaggaaaaaaagtaaccttttatgaagcggattgttgtgatgaagctgcgctggcacaaatctttgcccaacataagattgatgccgctattcattttgccggttataaagcagtgggcgaatctgtggcaaaacctttgatgtattatcagaataatttaatgagtactctggcattgtgcaaagtgatggcaaagcataactgtaagcgtctggtattctctagcagcgcaacggtttatggcaatccggcgagtgttcctatctatgaagattttccattaggacctaccacaaatccttatggtactacaaaattgatgattgaacagatcctaaaagatctgcatgtatccgattctgaatggaatatcgcattgttgcgttacttcaatccaatcggtgcacacaagagtggtttgataggagaaagtcctaatgatatccctaataatttaatgccttacattgtaaaagtcgcaaacaaagaactgccttttttacatgtatatggcaatgattatgatacacctgatggtaccggcgtgcgtgattacattcatgtggtggatttagccaaaggccatgtcaatgcagtaaaaaaagtcatggagccaatcggtgtagatgcgtacaatttaggtaccggcataggatatagcgtattggatgttgttaatacattcgcaaaagtgaatgcgattgaggtaccatatcaaattgatccacgccgtcccggggatattgcccaatgttacgcaagtacgaaaaaagcgtgggaagagttaggctggaaagcagaaaaaggattagaagaaatgtgtaaggatgcttggcatttcttacagacaacaaagaaataaagacaagtgatcgaaaaggcagcggatgggctgcctttcttcacagggggttgtatatgaaagcagtaattttagctgcaggtgtgggacatcgttttaaagaattgacaaaatataaaaataaagctttttttaccatcgggcaaactatggtaatcaaacagattattcagtatttattacaagcaggtattcgcgatattaccattgttaccgggcatcggcatgaagatttttctattttgaaaaagaactatcctattcatatcctgtataatacggcgtatggtgaatacaataatatccattcccttgctttaatcgcagaacaattgaatgaatgttggctgattcatggagatacggtcttattcaagaatatttttaaagaagcatttacacataccacgttttatacgatgctgaaacgtcccaatggagcgcctgttcgcgtagttgaagtggatgaacagcaccatattcaaggatttcatatcgatcgaggagaacgtagagtattgtccttgcttggtgtcagttattggcgtaaggatgctcagatgatcttattagaaactttgaatcatctgcatgagaaggaaaagaagcgctttgatggggaatgggaagagttgttacaagaggtagtaaaaaaagtcgaggtagacgcttatcaattggatcgcaaatatggcggtgatctaaacacgatgaaagattatcaagaaatcgtggagacgtatgatcgttattggaaatccatgcgtaagtgatgacattgcgaaacgtaaaatttataaataagagattatttactagaaaaatatgaaaatatttgaataaacacggaaaaccaccaagttgtgtcgtatgacatagtgaggtggtttttatgcgttgccaacgttgcagaaatgaggacatgaactatttttatcaagatgagggagtctggtattgtcgtaaatgcattggatttggcagaatagatgtcggaaaggaaccaataacgcgtccatgcatgcgcagacgatgtaagtgtcactacacgctgtcctatcccttaacaccaaaacaacaaatcgcagttgcctccattatgcagtacctgaaagaaggcaaagatgttttagtgtatgccgcttgcgggtttcgtgtcataatagtgacagtggcaaatagtctaggaaatataagggtttttgaacttctaccaaagttaaaaactaaaaaatatggttggtgtattgcttagagcgactataaaaatgatagttgttgtaagcagtacaccagctcaaaggaggagctagaatgtttcaagtcaatcgtgacacgagtaaagtatcatcttatgattttaagttatcatcaaggttatgtgaaagtatcgtagataaggcaaataagtaaagtgaggaatttattatgagattagtattaagaactatcttatttccagtaattcttattatgtcaatcatgcttgctttctcaaagttcattgtaagcattagtggtgtagttttaggagtaattgcatttttagttacactaggatcattggcttgttttgtgcaaaatgacccagtaacaggaatacaagctttaataattgcatttctacttagtccatatggtcttcctaaaatagcgatatggataatagcataccttgaatacggaaaagatagattaaaagaaatttaaatagcattaaacaaagacggtagagtaagaactatcgtctttttctttacacaaaatgcaaaggaggaagaagtaatgagtatgtatttgtttgacgagcagccaatacttgcaaataaaacgctcgcaagagaaataggcttaaatgaagctttagttcttcaacaaataaattactggatagaaattaataaaaggtctggaaataattattttgaaggacgatattggacatacaattctattcgagcatggcatgaaaatgattttgattatatgagtattgatactgtcaaaagaactttctccaagcttgagaagatgggatatttgattgttggtaactttaataaagatcctagagataaaacaaaatggtattccattaacgataaaaaactagaagaattatactatgaaatgaaagaaaaaaagctaaatcaagaaagagaaattcgtgaagaagctactcataatgctatgcccaatgcattagtgcaaaatgcaccaatggaaaagggcaaaatgcaccaatgcaaaaatgcagattgcactaatgcactagatgaaaatgcaccaatgcaatatagcaaaatgccccaaccattaccagagattactacaaagaattctacagagattacttcagatatttcatctaatacttccatctatccatccttctatgagattagcgatgacttagatatggaaggaatggtggacgggaataaaaaaataaaaacctatcaatcttgtttagaagaacttagggaaagtactggttacaatgaacactaccatataggcaatagagatattgctagaagctatgatgaaattattaaagtattagctgatgtaatgatgttgaatcctgatgatacggtaacgattaatcaagtaaagctaccggcatatattgttcaagaaagatttacaaaacttaattcatttcatatggactatatcgttgaaactttaagaaataacgaatcgaaaataagaaatgtacgagcgtttatcttaactgttgcatataacacaccaagcgatatggatgcttattatacagcacaggttaattatgacatgagggaggatggatattgatgataaatgatgaaatttctaatagagcagctaatatcgaagtccatgttgctaaagcaactttaaaagaaattcttaagcaaatacaaaggttgcgtgcaaagacaaaacaacatggtggacttgataacttgattaaacacgaaggcaaagaaatgaagcttaaagatatggtaaagaaaggtcagcttgaagaaatcaatgtaaaagatggtgaactaaaagaacttaaaaaagaattaaatagatgtggtgttaatttctcaataatgagagataaggagagtggtgttcattcggtgttttttcaagcaaaagatacgaaagtaatggatcaggcttttaaaaatgtacttagcaatattgaaaagaaagaaaaaactaaggaatcgattcataaaaatattgagaagtttaaagagatggctaaaaataacatttcaaaggataaagtcaaaaacaagcaaaaggaacaaagcctatgattgataaaataatcaaggacataaaagatttatttaaagtgcaagataagaagtgtttcgtattagagaacattccatatcttgcatttttctatgttggaaatattttttctcatcacataagatcgtatgttggtggagatatcatagataaaatatttcaaggattattagaaatcaatactttgagtttaattcctagtttacatttggttgatattgctgttggtataagcatttcagcacttgtaaaatctattatttatttcaaaggtaaaaatgctaagaagtttagacaaggtaaagaatatggatctgcaagatggggtaatgcaaaagatattgaaccatatgttgatgataaatttgaaaacaatattctatttaccaagacagaaaggcttactatgaatggtagaccacctaatcctaagtatgctagaaataaaaatgttcttgttataggtggaagtggttctggtaagactagattttatgtcaaacctaatttaatgcaaatgcattctagctattgtgttactgatccaaaaggcacaatcgttatcgagtgtggaaaaatgcttgaagataacggttatgagattaaaatccttaatacgataaactttaaaaagagtatgaaatataatccgtttgcttacataaaaagcgaaaaagatatattaaaactagtccaaacaattatcgcaaatacaaaaggtgaaggagaaaaagcaggagaagatttctgggttaaagctgaaaagctttattatactgccctaattggttacatctactatgaagctccaaaagaagaaaagaacttcgcaacacttttagaaatgatagacgcttcagaagttagagaagatgatgaaaattatatgaatcctgttgatagattatttgaagcacttgaaaagaaaaatccgtcacattttgcagtgaagcaatataaaaaatataaattagctgctggaaagactgcaaaatctattcttatttcttgtggtgcaagacttgctccttttgatattgaagaactaagagaactgacgaaagaagatgaacttgatttagataccttaggagatagaaaaactgctttatttgttattatctctgatacggatgatacatttaactttgttgtttcaattatgtattcgcagctgtttaatctgttatgtgataaagcagatgataagtatggtggaagattaccaatccatgtaagatttctattagatgagtttgctaacattggtttgattccaaagtttgaaaaattgattgcaaccattcgttcaagagaaatatcagcaagcattatcttacaagcacaatcccaattaaaagcaatttacaaagataatgcagatacaattgttggtaactgcgatagtacattgtttttaggtggcaaagaaaaaactacacttaaagaattatcagaaacacttgggaaagaaacaattgatttatataacacttctgaaacaagatctaatgccaatagttatggattgaattatcaaaagacaggtaaggacttgatgagccaagatgaaatcacagttatggatggaagtaaatgtatctttcagttaagaggagtaagaccatttctatctgagaagtttgatattactaagcataagaattataagctactggaagattttgataagaagaatgcttttgatatcgaagattatataagccgaaaaggtaaagcaaagttaaataaaaacagcgtgattacaagattatga

SEQ ID NO: 160 - DNA, 7360 bp, unidentified
  source 1..7360: mol_type = unassigned DNA
ttaatattccttatcaccatcaggtgtcttcatccataccttttcatgcttccacttaataagaatcatatacagccataggataagacctacacccatatatcccgcaaatcctaaccatgttgcctttccaataccgatagtacagaagaatgcgataattgccataattataagagaggctatcttaagtcctgttgcacatttgtatggtctctcccattcaggatgcttctttaaaagcaccagtgaagatattgaagtaatcacataacacaatgcacatgcgaatgccataaggtcaaagaatgctgtaatactctgcattgcaatgaatccaatacttacaacaagaataagtatgttaggaagtgttggctggttgtacttattagtgtatgagaactgctttggaaggaaattctgacgacccatagcgtatatcatacggacgcctgaataccagaaaccaagtactgatgtaccaattgggaatacaactccgacaatacccattataaggacaaaccatgcaatcttatcaccgaagcagtactgtaatgcttcaaatgtgatgaatgggtggcagtcaccgccattagtaagctctgcccaaggcattgcacctgcaagacagaagtagaaaattgtatatatagcaccacatgttataactgaaccaagaatagctttcttctggtccttaattgggaagtcgccctcctcaaccattgctggtactgtctcgaatccgaagtatggtgttatcataaatgaacatccaacaacccatgcaataccggtcgcaaagttaccaccccactgcttttcattgctgcttgtaaagaaatctgcgaaattagcaatgctccagtgtccactgaacagaaaaagcaatgaacatataagaatacctgcgataccagccataagcatgaatgactgaaccttgcctgctacaacatttttataaagactgagtacgcaccagaagcacagtactaatgaaccgacaataactgccttgccacctgtaagtcccagaccaaactgatgatttaaccattcgataattccaagtacacctgctgcaggaacggctatccatgcacacatgataagccacgctgaccagaaacctgcatgcttgttaatacctaccgtattgaataccagacacgaacctgtacttggtaacattgtcgagaattcagcatacacaaatgctgttggcagtactgccagtgtcataagtgcaaatgccaagaatgttccgggacctgtatatgacatgaatataccatcccagtaacacataaatgtaaatattgctcccgttgccattgcatatacataaatcagcttcattgatttagataatgcatttgttttcttttcgcccataatagcttcctcccttattgttgttcatgatttgttgtcacgaagatttcttatgtgcctatccaaataatctaagatacctttcggctaattccatggttccgtccatccagccgacacttaattctgctaccggacctgattcctgatgagatgcaagccatgcagtaagctgtaatcttctcatcattataaatgtgtctatttcttcaaaatccgtatcagtgaacggaagaaccttcttatatcctgcaagccatgcatttacaagctttggaacaattggcttgtcctcaataaaactaagtgctgacgcaaggtcatgtaagtgccatccaaaaccgcagtcatcaaaatcaataaccttaatctggtcgccctcaataagtagattagctaatcttaaatctgcatgtatgagtccaaaattattctcattagttccatatctttcaagtcttctcttaataattcttgaaacctctgacaatatattttctgcctccggggtcatctctggaaatgctctccagtcaccccatgcagcatgttcacctattatcgtgtcgtaagtccataccatacggtcaagcttgtctgttccgttccatatctctgtctgacggtgaagataagctgttgtctcaccgagatatctgaactgctttaccatctgctcctcgttattctcatcaggtgcttctcccagaagaaaatcacatataacgcagaaatatacatttccatccggtcctgtaatctcctgtatattcttaccatcaagcccttttataggattagctacaagaagcggtgtgtagtcattaatctgtcttaaccacttcatctctgaattaagctcatccaatgtgtgataacctggtctgcttattctaagcactccctctttttcacctgtttctttgttcttgaccatataggttgcattctccgacagcactatgagtttcgcctcacatctgtcctgccatccgtatttttcaagcgaagcatttgcaaccgcatcaaataaatcaacattttcaaatgccatgtcattatcctccaatcagaaaaggcgtacacaaatctttccgattcatgtacgcctttgtacttttcttatatttaattactgtcccatagatgttgtttccggcaatgtgcttccgccatcaataactatctgtgttcctgttatgtagcttgattcataacagccaaggaatgctgcaagctctccgacctcctcagggtcagccagcctctttaaaggcaccgcatctgcaattgcctgtatcgctctctcaggattctccgggtctgactgctttgccattccttcaacaagcggtgtccttacatatcccggacatattgcattaactcttatattcttgtctgcaaattctcttgcaagcgcctttgtaaatcctaccagtgccgccttagatgttgcatatgcaacctcccccggatcagctaccatatctcctgttacagagcttgtaactacgattgcaccaccgccatttgctatcatgcttggaataactgcttttgccacattccatgcacctttgacattaatatcaagatgtaagtctctattttcaaatgtgtcatcttcaagaaagtcttcaagaacacatacacctgcgttacatacaagcacatcaatctttccatatgttttctcagcaacttcaacaattctttcaacactcttgtaatcagatacatcaacctgaacacctgttgcctcatacccttcgctttttaactgctctgcaagttcaagcaccttagggcctcttgctgcaagcacacattttgcaccatactttgcatacactttggcgattccttcaccgatgcctttagatgctccggtaattaccgcaacttttccttctaactttcccataacgccacgcacctttcttagtttcctgaatgcaaaaaaagacacgaaagctttcaccttcgtgcccctttgcacttcgccattaactatagtaccaagtgcctgaaattgcaataacaaaaatatgcattttttctttaattcttaaggaattttcaagaaaaaatctttattcataaagtgggtacttgtctgtaagtcccttaacaagctccattgccttagcctggttagcatctacatcatcaacaagcatagcaattgcttctgcaacaacatccatatcagcctcattgaagcctcttgttgtaacggctgctgtaccaagtctgataccgcttgttacgaatggagaagccgggtcattaggaattgtattcttgttacatgtaatattagctgcatcaagaagcttttcaacttccttaccagtcttgcccttgcttaagaggttaacaagcataagatgattatctgtaccaccagatacgatatcaaagcctctgttcataagtccgttagcaagtgctgatgcgttcttaacaacattttcagcatataccttaaagcttgggtcaagtgcttcctttaagcacactgccttaccagcaataacatgcataagaggtccgccctgaattccagggaatacagacttgttaagcttgaacttctctgctgcctctgctgaagcaagaatcatacctcctcttggtccacggagtgtcttatgtgttgttgttgttgtcacatctgcataaggaattgggcttgggtgtgcaccaccggctacaagacctgcaatatgtgccatatctaccataagtaatgcgccaacttcatcacagatttctctgaacttcttgaagtcgattgttcttgcataagcagaagctcctgcaataatcatcttaggcttgcattccttggcaattcttaatacttcatcataatcaataaatccgtctgctgtaacaccataaggaacgatgttaaagtattttccagaaatattaactggtgaaccgtgtgataaatgtccaccacagtcaaggctcatacccataactgtatctccaggattaacaagtgcgaagaatacagctaagttagcctgtgctcctgaatgtggctgtacatttgcatattcacagccaaaaagcttctttgctctttcaattgcaagtgtctcaacaacatcgacatactcacagccgccgtaatatctctttccaggatatccttctgcatacttattagtaagagggcttcccatagcagccataactgccttacttacaaggttctcagaagcgataagctcgatgtggcttctctgtcttccaagttcatcatccatagccttagcaaggtctggatcatagtttaatacttcatcaaatgaatacatataacttcctcccattatactttagtgaaacaaagtgtccctagttacttatgatataattaaattacggattagtcaatttaaagttgtgaattcctgctttttttaatatttgtttctgtatatcgactgcaactccatatccctgctcctcaagttcatatgttgattgttcaagtgccatctcaaatttttcaaccatacttaaaaaatgctgcgttgctattccttttccaagaccaagtttctttgcctcattctcaaacgacttctgatttatattccttatatcatattcgccatctatgttaagcgacattttctctgtgctgctgtcatatataacagtacttaataaatcatatgccggagctaatcttattccttttaaatcctcactatataaaagagcaatatttttaatatcctgcaattattaatttgggttgtaccttatgggtatagtatatatttatccaatcagaactttttgccttcaaataaaaaacgaacccacccgaagatgagtccgtttcatagtcttaaaccggcagattcttcatactctcaagacttataacaagtgttgatgtattatgaagaagtgctgaagttgtaggctgtatgacgcccgttacaccaagtgcaataagtgcggaattgaatccgacaatcacacggtaatttctgttaatcttcttaatcagactgtcacttaatttcttaagcataagtatctggttaagatcatctgcgccgacagtgatatctgcaatctctcttgcaatctcagcaccatcacttatggcaatacctacatctgctgctgaaagcgctggtgagtcattaattccatcaccaatcataattacctttcgtccggctgcccgctctttctctacgaacttagccttgtcttctggaagaacttctgaataatattcagtaactccaacctttctggcaatagaggcggctgttctttcactgtctccggtcatcatgacaacctttgatattccagccttcttaagcccttcaataacctccggtgcttcttctcttaatggatcaattatgcatataactgctgcaagctgaccgttaattgccatataaagatgtgagcagtcatctggaagactgtcaaataactcctgctttcctgctggaattacacatgcctcatcctcaaatacaaagtgatggcttcctatgataaccttgcttgtattgataaatgttgatattccatgtgcaacaatatattcaaccttagaatgcatctcttcgtgcataaggtttcttctgccagcttcattaacaacagctttagccattgaatgtggaaaatgctcctcaagacacgcagctattcttaacagctcatcttccggcattccgttaaatgaatataccctgcttactgttggcttagcctttgtaagtgtacctgtcttatcaaatacgatagtatccgcttcagcaattgcctctaagaacttaccgcccttgactgttgcactcgcctgacttgcctgtcttattgctgcaagtaccgtaataggcatagcaagtttcaatgcacatgagaaatcgaccataagtattgacaatgccttagtagtattgcgtgttaacagatatgtaagtgcagttccaccaagtgaataaggtacaagcttatctgcaagatgctctgcttttgactcaagacctgattttaacttctcagattcttcaatcatcctgacaatcttgtcatatttgcttgagcctccggcacgcttaaccctgaatactatctcgccctcttctactacagttcctgcaaatacagaagttccctcacctcttcttacaggctcagattctcctgtaagtgaagcctgattaaccatagcctcaccactgataacagttccatcaaatgggattacattacccatccggattattacattatctccgtccttaacatctttcacagatacctgtacttctgcatcatctgtctttaaccagaccttattaacgttaagtgacatcgttcttgccaggtcgtcaaccgacttcttgtgtgtccagtcctctattatctcacctataccaagaagaaacattactgaaccagctgtattaaagtctcttcttaagatagaaactcctattgcagttgcatcaagaactggcacttcaagttttcttgcaagcagtgtcctgattcctttataaatgtacttcattgaagataccgttgttaataccgcacataccggtgccggaataaacaatttcttagtcattctccacaacacctgatctgccagcttttcagtataatgagaattgattgctcttcctgatgttgcaagaacatcttcaggaacctctacattgctgtatctgaacctagcaatagcttcaatcacggtttttcttgaacatctgtactcaacgactgcatcagcagttctctcatacactttgacattcgtgacgccctgcagattcttaagataatactgcaaagtatctgcctgtgtaaaagtcatgccagaagcatccatgtgaacgcggattcttccgggcacatcatgctttattatgaatttcat

SEQ ID NO: 161 - DNA, 8399 bp, unidentified
  source 1..8399: mol_type = unassigned DNA
  misc_difference 1614: note = a, c, g, or t
  misc_difference 1615: note = a, c, g, or t
  misc_difference 1616: note = a, c, g, or t
  misc_difference 1617: note = a, c, g, or t
  misc_difference 1618: note = a, c, g, or t
  misc_difference 1619: note = a, c, g, or t
  misc_difference 1620: note = a, c, g, or t
  misc_difference 1621: note = a, c, g, or t
  misc_difference 1622: note = a, c, g, or t
  misc_difference 1623: note = a, c, g, or t
  misc_difference 1624: note = a, c, g, or t
  misc_difference 1625: note = a, c, g, or t
  misc_difference 1626: note = a, c, g, or t
  misc_difference 1627: note = a, c, g, or t
  misc_difference 1628: note = a, c, g, or t
  misc_difference 1629: note = a, c, g, or t
  misc_difference 1630: note = a, c, g, or t
  misc_difference 1631: note = a, c, g, or t
  misc_difference 1632: note = a, c, g, or t
  misc_difference 1633: note = a, c, g, or t
  misc_difference 1634: note = a, c, g, or t
  misc_difference 1635: note = a, c, g, or t
  misc_difference 1636: note = a, c, g, or t
  misc_difference 1637: note = a, c, g, or t
  misc_difference 1638: note = a, c, g, or t
  misc_difference 1639: note = a, c, g, or t
  misc_difference 1640: note = a, c, g, or t
  misc_difference 1641: note = a, c, g, or t
  misc_difference 1642: note = a, c, g, or t
  misc_difference 1643: note = a, c, g, or t
  misc_difference 1644: note = a, c, g, or t
  misc_difference 1645: note = a, c, g, or t
  misc_difference 1646: note = a, c, g, or t
  misc_difference 1647: note = a, c, g, or t
  misc_difference 1648: note = a, c, g, or t
  misc_difference 1649: note = a, c, g, or t
  misc_difference 1650: note = a, c, g, or t
  misc_difference 1651: note = a, c, g, or t
  misc_difference 1652: note = a, c, g, or t
  misc_difference 1653: note = a, c, g, or t
  misc_difference 1654: note = a, c, g, or t
  misc_difference 1655: note = a, c, g, or t
  misc_difference 1656: note = a, c, g, or t
  misc_difference 1657: note = a, c, g, or t
  misc_difference 1658: note = a, c, g, or t
  misc_difference 1659: note = a, c, g, or t
  misc_difference 1660: note = a, c, g, or t
  misc_difference 1661: note = a, c, g, or t
  misc_difference 1662: note = a, c, g, or t
  misc_difference 1663: note = a, c, g, or t
  misc_difference 1664: note = a, c, g, or t
  misc_difference 1665: note = a, c, g, or t
  misc_difference 1666: note = a, c, g, or t
  misc_difference 1667: note = a, c, g, or t
  misc_difference 1668: note = a, c, g, or t
  misc_difference 1669: note = a, c, g, or t
  misc_difference 1670: note = a, c, g, or t
  misc_difference 1671: note = a, c, g, or t
  misc_difference 1672: note = a, c, g, or t
  misc_difference 1673: note = a, c, g, or t
  misc_difference 1674: note = a, c, g, or t
  misc_difference 1675: note = a, c, g, or t
  misc_difference 1676: note = a, c, g, or t
  misc_difference 1677: note = a, c, g, or t
  misc_difference 1678: note = a, c, g, or t
  misc_difference 1679: note = a, c, g, or t
  misc_difference 1680: note = a, c, g, or t
  misc_difference 1681: note = a, c, g, or t
  misc_difference 1682: note = a, c, g, or t
  misc_difference 1683: note = a, c, g, or t
  misc_difference 1684: note = a, c, g, or t
  misc_difference 1685: note = a, c, g, or t
  misc_difference 1686: note = a, c, g, or t
  misc_difference 1687: note = a, c, g, or t
  misc_difference 1688: note = a, c, g, or t
  misc_difference 1689: note = a, c, g, or t
  misc_difference 1690: note = a, c, g, or t
  misc_difference 1691: note = a, c, g, or t
  misc_difference 1692: note = a, c, g, or t
  misc_difference 1693: note = a, c, g, or t
  misc_difference 1694: note = a, c, g, or t
  misc_difference 1695: note = a, c, g, or t
  misc_difference 1696: note = a, c, g, or t
  misc_difference 1697: note = a, c, g, or t
  misc_difference 1698: note = a, c, g, or t
  misc_difference 1699: note = a, c, g, or t
  misc_difference 1700: note = a, c, g, or t
  misc_difference 1701: note = a, c, g, or t
  misc_difference 1702: note = a, c, g, or t
  misc_difference 1703: note = a, c, g, or t
  misc_difference 1704: note = a, c, g, or t
  misc_difference 1705: note = a, c, g, or t
  misc_difference 1706: note = a, c, g, or t
  misc_difference 1707: note = a, c, g, or t
  misc_difference 1708: note = a, c, g, or t
  misc_difference 1709: note = a, c, g, or t
  misc_difference 1710: note = a, c, g, or t
  misc_difference 1711: note = a, c, g, or t
  misc_difference 1712: note = a, c, g, or t
  misc_difference 1713: note = a, c, g, or t
ttattccgtccagctgtacacccattcgccctgctggttgatgtagccgtattgggtcgtgccgtcgtcctgcaccattcccacatacgccagcttgccgtagaactgcgtcacaaagctgaattgcagcggaatcgccagttcgccgctttcgtcgagataccctgccagcctcgtgccgtctatatcgtacactgcctgcaatcccgacgggaaatacacgcccgtctggtcataatccggaaaattccacttcgcttcgctgatgattttaccctgcatgttcacccaaccgcagcggcgctgtctgcccttctccacaacgtacatgcacaagccgttctcctccggcgtccacagccgcacgatattttcgccttgcagggtgaacagctcctcgcccgccacgctgtacatcgtgaagctgtgttcgcccgtcggcagcacatagcagccatgccggacgtctgcatagtgcgtatccgtcgtgcgcatcacaactttccccgtttggtcgatgacaccataagtgccgtcggtcaattcaacctccgcatagccatcctcaaactcgaaggcatacgcgaactgcggctcaatcaccacttcgccgcttgtattgcagtagccgtataagccgtttgcacccaccacttcaaacagcccgtcaccaatctcaatatcgcagtattcctcatggatgccctccggcaggggatattccttccccgtttcgtcaatcagcagtgtctgcacaatgttgtaatcatcatcacagactgtgacaacggcgtacccatcataaaaattggaacccatgttgtccgaatcatactttgccggaatcaccatttcgcccgtatcgcggctgacatagccccacttgccggtttcgtctgccacggcaatcaagcggctgttcgactccctatgattcacgccccgccacttcaagccgctgtaaacaccgctctgcacatcaaagaagccttccagccattccgtgccgagactgtttttccccgtcgccttcttgtatagcagccaaatgcccgtttcgcgtccgccgtaatagaagccatcatagccgctgtctgtcactacattctcatccagtagcagcacaatttcgccgtcgcggttcgcgaagccttcccggtcgccctgctgaatccacgcataattgccccggaagtcgcccgcactgtcgaatttcggcggaatcacccaattccccgcctcgtcgatatgcccccacaagccgttgtcgcccttcgcggcgtaccaatacccctccgctgacgcgcagcctaacagcatcagcaggcacaatatcccgcacagcagtttcttcatgtgttttccctcctatggtgatttctgccttcatgataccagccttgcgcccgtttcgcaagcgctccggcgcaattgttacaattgaaaaaggcagggagaacgaatccccctgcccatattgattagttactccgccagcagcggcgcgacaagcccttccagcaccgtcagcgtcaccgacccgaccctgttgtacacgattttcccgtccgcatcgacaatgaccgtcatcggcagctgcgtcgagccgcccannnnnnnnnnnnnnnnnnnnnnnnnnnnnnnnnnnnnnnnnnnnnnnnnnnnnnnnnnnnnnnnnnnnnnnnnnnnnnnnnnnnnnnnnnnnnnnnnnnncgtgaaatcagggcatttcatgccgacttcgtagccaaccggcgtgtcgtcgtccggcgcttccgtggcttcgggcgcaagcgtttccgtcgcgacgggctgacttaccgattcttccaccgtgtccgccttgtttacctgccacatcaccacgcccagcactaccagcgccgccgtccacgccgccatcacgcgaatgcggcggttcgtgcgctttttgttgtcttccggcttcatcggctgcacttcgttcgctttcagcgtaattttgcccattttcatgctgatggctttcgtcgggcaaacgtccacgcacgatgcgcagtggatgcactcatggtcgcccacatgccgaatatccatcttgcagtgcgccacgcagcgcccgcagttcgtgcatttgcttttctcgaccttcacgccgagaatcgacacacgcgcgaacagaccgtaaatcgcccccagcgggcagaggaagcggcagaacgcacggtagaagaacacacacgccagcagaatcgccaccatgatgacgaatttgcgcgtaaagaggatgttgaggatggagaacttgcccgcattgaccgggttcgccagcaagcccattgcgccctcgaacgtccccgccgggcagatgtacttgcagaagcccggcacgggatactgctgcaagctgtacgccagcgggatgatgaccacaaacaccgccaacaggacgtatttgagatacgacagcgcatgggtgaagcggcttttcttcaccttcggcgtcggaatcttgtagaacaattcctgaatcagccccagcggacagagccagccgcagatggtgcgccccaggatcagcccgtagagcatcagaatgcccagaacgtagtacggcgcgcgcttatccgaggaggccagcgcgttttgcagcgcccccagcggacatgcgccaatcgcgcccggacaggagtagcagttgaaccccggcacgcaaacgttcttgatgctgccagtgtaaatgtcgcccttgatgaatcccttcacataggcgttgtagagcagggcggcgtaaacctgtatgagccgccgggtggtgggcttatgggcgctccaccatgccgcaaatttcttagccaaggccgatacactccgtacaaatattgattgccttcaccagcacatcgaacatgccgctgttcatcacacccagcacaatcagcgccaccgccgccgccgcgatgatcacgcggatgacgttcctgcccgtcgtcttttctgaagcggctgcatccggcttgcgcttcggggcgctcctgcgcagttccaattccttcatcaacaggcggaaattccactgctcagccgccatcaggaggatgaacgccagcccaatccacgggaacgtttcaatcaccatctggcgcacgacgacttccaaatcacgcgaggcaaaattcgaccagtccagcaggaatcgccctgccatccccccgcaaatcaagcacagaatcgccgcgccgcaccatacgcccgtgcgctgttttttcactttgcggatttcgtctgtctcctccgtccgcgcacgcagcatcagtagctgattctccaccggcgcgcgaagcgattccttctgctccggctttccggcgatgatgttcgccgccagcagcgccagaaagacccacacgctccacgcaatcgaggcgaagtgcgccgtgacaatttcccggctgtaaatatcgtgaatccgcagcccgttttcgcccatgttttccggcgcgatgccctcatgatagatggtcacgcactgccaaatcaacagcgccgccatcagcaccgtcgccactcccagcagccaccgaagcatggtgcgcaccgagcgtttgctctctgccttcattccgcgttcctcccactttgccgggcgcgcagtacgcccggaacgctactgactccattatagtgcagcaaaggggatgcgtcaaacaattcatcggattttcgctgtttcttttccgtttttccgattggaacccggcggcattgtgaaaaaatcatcaatttttgtccattttgtgccgtccgctcttgcttttccgcatcatctgtgataccataaacgcacaggctgcttgttcagcccttcaccatgaaggaggaaatatataatgggttttctggcaggaaagacggcgattattaccggcgcgggctatgcgaagctcagcaatggccgctgcggttcgattggctacggcattgcgaccgcttacgccaaggaaggcgcgaatctggtcatcacggggcgcaacgtgaagaaactgaccgacgcgaaggaagaactggaacgcctctatgtcgtgaaggtggtgtgcgtgcaggcggacgtgaatgacagcgcggacaacgaggctgttgtaaacaatgtcgtcaaacaggcgattgacaccttcggccgcatcgacgtgctgattaacaacgcgcaggcttccgcatccggcgttccgctggctgaccataccaccgaacagttcaatctcgcgctgtattccggtctgtacgccacattctattatatgaaggcgtgctacccctatctgaaggaaacgaagggtgctgtcatcaacttcgcctccggcgcgggtctgttcggtaactacgggcagtgcgcgtatgccgcggcaaaagaaggcattcgcggtctgacccgcgttgccgccaccgaatggggcaaggacggtatcaacgtcaacgttgtctgcccgctggcatggacgacgcagctggagaacttccagaaggcatatcccgaggcgttcaaggcgaatgtcaagatgcccccgatgggccactacggcgattccgaggtggaaattggccatgtgtgcgtccagctggcttccccggacttcaaattcatgtccggcgaaaccatcacccttgaaggcggcatgggtcagcgcccctaaccgctcgcatctttgctcccttctgcgcaccgcggaagggagttttttgtccctcattggaggttttttcgcatgaataccgaccgaatcgcgtattttctcgccgtcgtccgcgaaggcagcttctccgccgctgcgaagaacatgtacgtctcccagaccgccatcagccagcagattgcgtcgttggaaaaagaaatgggctgcgcgctgttccaccgcctatccaccggcgcggtactgaccgaccaaggcgagcagtttctcccctacgccgagcgcctgatggggattcagcttgaattgcaggacgctttcgccgatgcgcaccgtgtgagcgccatccacatcggctacaacgggccgctggaaaaagaactgattgtcgatgcgtacctttccctgcatccgcgcctgcccaatttggtgattcacccgctgtacctctcgctgacggccatgtccgacgccctctatcgcgggcaatgcgacatggtgctgacgcttcccggcgaaatcgaccagcggaacacctatcaggaggtactctacgatgtgccgatgattgccgccgtttccgaagcgtcgccattagcggaaaagtcggttgtgtcgctttctgatttacgcgcgcatccgttgattctgcttgcccccgaccaatcgcgcagcggacgcggcgcgattcacgactgggcgcagaatctgggattttcgcatccatcgattatttatgcggattcggcagatatgcaaattttgatggtttcgctgaatctggggatttccttctttccagcgagaaagccagcctatttcaagggcgtgaagctgattccgctgacggaggatattgggcatcatcggtcggtgctggtgtgcagacggctgacaccggcgattcggatgattcgcgactgcatgatagaggaaatgaaaaagggctaaacacgcggaaaaagcagcgtggcgaaaccagctcaatcgcgcggagtccagcggagacgaccaaagtgttttctaatcgtccccttgaccccttgggtcgccactaccagcattgacttgttccgcagtacaacgaatcacacccatccccgcactcaaaaaaagcaccagcccttcgcagcatttgccgcttcggtctggtgccatttttatcaaccgattactgctggtttgccgcgttttcacccgcaatgcggcccatcgacagcgcgttcaggaaagacgaaccggacatgtagaccagatcgtacagcgcgccgttggaggcttcgcccgccgcgtacaagccaccgatgaccgtgccgtccgcacgaagcacctgcgcggaggtgtccgtcacaacgccgccaatcgtgcctgtgtactgaggcgcaatctgcaccgcgtagaacgggccaaccgtcgcgaaattcatgaaatccacgcgcgcgccaaacgccgcatccacgccggtttccttcgccgcattgtagaccgcgatgcagtcaaggaacgcctgcttatcaaagcccagcttgtccgccagttcttcaagcgtgtccgcagaggtcactgccgggtcatcaacgttgttcgccaaaatcgccgcatagtcctcacggtcagagccgtagatgcagtagtacggcgccgcatgacggtaaatcaggctcggataattcagggaatggcagtattcattgacgaagcggacacccgtgttgtccacaatcggcgcctgactccacgggccgcccagagaggtcagctccgcgttcgtgccgtcgcccacgacataggacatgcccaagcgcgcacccttctcgtaaaccgccgcgccgatggcctccgccatcagaatgccctcgccggtctgacccgcggagccgtagaagtacgccacctgcgccgcgtcaacgggcgtgaagcgttccatcatttcctgattgttgccgaagccgccagtcgccaataccgtgcccttggcgtagatgttgaaggtctgaccgtccttttcgaccgtcgcgccgatgcagttgccattttcgtcggtcagcagcgccgttgccttcgtctccatccagtattccacgcccagctcctgattcttcgcatagagcaggtcggtgggcttgccgttggaggcatagtggaagcgatccacgccctcaatcaggtcgaagctcatcggacggccgaactcgaagccgttctcctccagccagtcaatcaggcccgccgcctgacccaccacgaagcggatgcggtcttcatccatgccgctgtctttgcggaaatactcgttgtggttgtattccacccacagatcgacgtaggcttcgcaggtatcctcgatgccgtacttcttctgctcggaggattccggcgccgcaatgccgccgcccgccatcgcagacgtgccgccgatggtcgccagcttttcaatcgcaatgacctttgcgccggcttccgcagccgccatcgccgctgctccgccagccgcgcccgtaccaatgaccagcacatcgcaggtcaggtcggtatagttttccttctccgccgcctcgaccttcgccaagtccgcgttcgtcagccccagctccgccagtgcagccgccgcggccgctttcaccgcgtcggatgtcaccgtcgccgccgtcacgccgtccacctcgacggagttgtttgccagcatctgctccgccagcaccttcgccgccgctccaccgatggaatcagtctgcgatgtcgcgtcgatttccacgttcaccagcttgtcgccgtccacgctcagcgtgaccgtcacgtttccgccgccaaacccttccgccgtcgcactcgctgtcttgacctccgccagcgccgtcgcgcaggccatcgtcagcaccatacacaggctgagcagcagcgccgtcagcttcttcatgatgaaaacccctttcctttttttgaatgtccccgtgcagggaagacactctggttgctcttcgcaactttgtgaaaaatataccatacttctctccaaaacacaaacatcaattcaggaagggggctataaggatttcttatactatttccagatgaaaatgcgcggcgcaagcaaatagcgcaaatgaattggaaaatcgtattatttttctccgcaattttcccttacccctggaaaaacgcaccgctttatgcgtctaatccattgaaatcaccatgaaaatgaaaggagggcaaagcatggagcagcaatcccccaatgaacgccgcttagaagattggatgcgcacctacggcaccgccatcctgcgcacatgcttcgtcatcctttccgacgcgcgtgaagccgaggatgccatgcaggacaccttcctccgcgcctggcgcgccatggacaccttcgagcagcgcaacggcgcgagcgtcaaaacgtggctgatgcgcattgccatcaatgtctgccgcgattatcagcggaaacggtggtttcggcacatcgacatgcggcacgcgctggaagacttgccgcagggcatgatgaccgtgctgccagaggatcgggaattgatgctggacatcctgcgcttgcccgacgacctcaaaaagccgctgattctctactattatcaggacatgaaccttcaggaaaccgccgatgcactgggcatcagcaagtcgacggtgcatacgcggctcaaaaaagcggaacaggcgctcaaactttcgctgacaggaggtgactgctatgtctga

SEQ ID NO: 162 - DNA, 10119 bp, unidentified
  source 1..10119: mol_type = unassigned DNA
atggcacgttacttttttattgttatatttattctgatttctacacagtttaaagctcagttatcagaaacaatccgtgtagaggagtcggatctttcgttttcgcgtatggaagaatttgattgtgttacgtggcaaaagagttctgaatttacggaacagataaatgcccctaaacttcctgtcattatagaatcattcgttattccttttgatgcgcaagttaccaatattgatgtggttgtgaaagggaaaaacttgttgaatagaagtttgttgattgtacctgttgatcctcctatttcaataggaaattattttgcaacatcatcgctaaaaccggatggtgacatttataattcatctcttgtttaccctacagaaaatgtgaagatcatttctgatgtatacgaacatgggtatcatgtagtgacagttgaagtttgtcctttcgaatatgttcctctaaataaagcattgtctttattggatttgacatttacaataaattatatgcaatcacgtggagttattgaatacccacaatatcaatcttctaaatcggcaaaccgtgcctatcgttttgtttattctaaagtgaagaacaagcaagacatgaatcgtttttcaaatcagagaactggtatagtatccaatgagtcattgaatatgaatgaaaggagtttaggtacttctaatacgatagtaaatataattcctgagtatttgattgtgactaataatgagttaaaatctacctttcaacgtttggcagattggaaaacgaaaaaaggtgtaccaactgtcgtaatgacaatagaagaagtacaggaacaaaatgaaggatgtgatcttgctgagaaaataagaaattatctaaagaaatgtaggcaaagttggggaggtgacttctttgttcttttaggaggagatactaatattattccagagcgaatggctactaatgggccagatcgtaaagatagttataataaaaacactgatgtatatacgaaagattctactatgagggcacaagatttatattttacagcattagatgggaattggaatatgaataataatcatgtttacaatgaatattatcaatatcaaaaagggaataaatatccttctgatacaatcaatattgatcatgctgatttcggaagggatatatatttaggacgcgctcctgtaaaaaacatcagtgaggctgagaacttcgtgaataaagtattgatatatgaaaaagctaatactaatattgattattcttatgttctcaatactcttaacgtagatgcattcattgacaagaatgaaaatacgggatatttgcgtgatgatgcaagaagttctatagatggttattatagttcttattctcgattgcatccttggtttcttttcgaccattataattgtacttgtaataagcattcacaatatgtaacgaattctcgtggggaagaattgaataaaaataattttatggctgcgctccaaaatggtggaaattcaggattaaatcattttcatttagtttatcatatggaccattcttctccaagaggaatgggggcttcttcattggataaaaatgaggcaatatataatatggatgtagatcagttgataaatggaaattatttacaaatagtattgtcaagtggttgtgaaccggctacttttaatgaagattgtattgcagagcatttcattaataatcctaatggtggtgctgttgcatatataggtaatgcagacagaggatggtcaaatgagtattttcgacttgatagtctgttgatagctttgtattccgataaattagtctatcataatttgggctatgtttttcaatatacgattggtaaaagggacaataataattgtcggttaacccttttaggagatccggaaatgcctgtatggacagcagttccacaaacgttgaatgtatctgttacccctaatgctataaccaatggtgagaacacaatttctatacaaatcaataatttgcctaccaatcaagaagcactggtctgtttaatgaaagaaggagaaggatattctactttaactataaatgatcgggcggtacatttttttacttttactccgtatacatccggtatggttgatgttacggttactacaaataatttccgtccttttgaaacaacgattcccgttagtgtaaatccgaaagcggttcttcatatttcagatttagtgtttgatgatgataaacagggagatagtaatgggaatagtgataaacaactggatgcaggagaaactgtcgaactttcggttacactaaaaaatgaaggaagtgttgcttctgatattgtgactggagaattgatatgtagctctccggaaattaacctgattaaaaatgtagcttcatttggtgaaatcggtgcaggaggtagccgaacatcagataggaagtttgtatttactattgataaagattgtcaagaatatctcatgaacggaatagatcctatcgagtttatccttactataaaagacggggcaagttctataagtgaacattttcaagtggatatctttactcctaaaatagaaatagggaatcaaaaaattacttggacgagtaatggaaacactacaatagaagcgggtgaaacggtaaaaatgaatattgatttgatgaatgtgggaaaatctgaggcaacaggactgaacgctgtgctgatttcgcataattcgcaggtgtcatgttcatctacgccaattgtgtatccttctattgccttttctgagactaaaacaaatacaattgcttttcagttccagacatcaagcagttatgcggggatattgagtttcacattacaagtaagtaatgagtatggaaggacttggaactttccagtaaatccattgtcaagaccctctgttattaaaacatcgactcttgattttcagccttatgcttcttctatcaatgtgtattggacacctgtcaaggaggtggccggatataatatataccgtagtgacaatggagaaaatggcatttatcggagattgaatagatttccattgaaggctgcatattatttagatgatagccttgccgaacgaacattgtattattataaggttgcagcaatttcaacaaacggaaatgaaagtgaatggagtgcggcttaccggacatggacttcttatccggttgttagtccattccccaaaagattagctaccggtgtttattcatctgtatcttgtccaaatattgcagatgtggataatgacggcaaacaagagatattctggatctatgaagatcggtatgatactcatacaagttacataatgggatttcgtccttcgggcgaagagttatatgatatcgatggaaatgtgaccacagtaagtggttttgctaaaacacctacaatgttgactgggcaagtggcttttggagatttgtccggaaatggggaacaaaatatagtagcatctacttgggaagatgataaaaaatatcaggaaaaaagagcagtctattgttattctccgtttgatagggatggggaccataaacctgatttgttgtgggaaaagcgaatttcttattcaatgtttcaaagtccggtcattgccaatttggatggtagtgccgatggtacaatggaggttattgtaaaatcgcatcaaacttctgatatttttattttagatcatgacggaaatgaagtgagacgtttgaatcctaatgttcatattacgactggaaaagaccataattattcagcattaacagtggctgatttggataatgacggtaagatggaaatcatagcttcgtatgattctttaggaatttatatttggcggcaggatggaactccttttacgacgaatccgttttggggaacaggaattcccagattagcttctgctccggtggtgtgcgatttaaatgaagatggtaaaaaggagatattgttttctcaacggcaaatggcagaaagtaaggtatttgctattagtttggatggggataaaacagttgcagggtgggatggaagtcagacaattccatatacagtcaatgctgttggatctactttagatcatactttatcagtgggtgatataaacaatgacgggcacttggaggtggttatattggggcatgaaacggtaaaagcatggacacatacagggaagcttatttttagcaaatcgattaaaggcttatttccacaagaaaattatgcgtctaatatgaatactccaattttggccgatgtggatggagatgctgtacctgatattgtattctgttgtaacaattatatttatgctttacataatgacggtagtgatataatcggatttccgataatatcggatgagaaatttttagatactccttgtgtggcagatattgataatgatggtaaaagcgagttaatagccggtaatgaacatgaattgtatgtctggaaaaccgatggtgttcctacggccatagagtggggtgttaagcgtgggaatccacagaatacgaatgaatatttcccaaccgtttgtcaaccaacactgataaattccaatgaagtatgggacggggaatcaccctgcggaaatgtagtgttgcagtcgggacgattacttattcctgccggtaaaacgatggtgctgaataaaacttcttctgtgatcgtccgttccggtgctgtgcttgaagtagatggtggaagtattttgaatgcaaggcttgtcgtgcaaaaaggcggtacggtcatcgtcaagaacaatggtttaatcaagttacgagcaggctccgactttgacatggaaaaaggggctatacttgatttctcttttggagcaattgacataccttgataaaagaacagaatcagcagtaggataaatataattaagagatgaaccacaaacactatcggttcatctcttaatttttacttgtcccgtctttttccgtgaaatacttatgcgttcagcgcctgctctatatcggcaatgatatcttcggcattttcgatgcctacactgaaacggatgaggtcggggcgaactccggcttccatcagttgctcgtctgtcaattgccggtgagtatggctggcaggatgcagcacgcaggtgcgtgcatcggctacatgcgtaacgatggcagctaatttcagcgaatccatgaatttaatagatacgtcgcgtccgcctttcagaccgaaggagatgacaccgcaggaaccgttcggaaggtatttctgagccagttcataatatttattacccggaaggccgcaatagtttacccatgccacccggtcgtcattcgacaggtattcggccactttctgtgcattacggcaatgttgaggcatgcgaaggtgaagtgtctccaatcctaaattgagcaggaaagcattttgcgggctttgtatactgccgaggtcacgcatcagttgggcagttgctttggtgatataggccattttaccgaatgccttggtataggtcagtccatgataagattcgtccggagtacacaatccggggaatttatcggcatgggcatcccaatcgaaattgccgctatcgacaatacagccgcctacactcgtggcatgtccgtccatgtatttggtggtggaatgtaccacgatgtctgctccccattcaaaaggacggcagttgatcggagtagggaaagtattgtctacgatcagaggtacaccgtgattgtgagctatgcgggcaaacttttcaatgtcgagcacttcaagagagggattcgagatggtttcgccgaacagggctttcgtgttcgggcggaaagcagccgaaatctcttcttcgctggcatcaggactgataaaggtaacatcgataccgagctttttcagcgttacaccgaagaggttgaatgtgccgccatagatggctgaagaacacacgaagtgatcgcctgcctgacagatattgaatatggcatagaaattggctgcctggccactggatgtcaacattgctcctacacctccttcaagagcggctatcttggcagccactgcatcgttggtggggttttgcaaacgggtatagaaatatccactgtcttcaaggtcgaaaagacgggccatctgctcgctggtttcatatttgaaagtagtactctgataaatgggcagcacacggggctcaccctttttaggagtccatcctgcttgtacacacagggtttcgggcttgaattgttttgccataattgttattgtagttacagttttatttctttaaaaagttatatcgatgcaaaagtagagaaaataattggtttaaaacattatctttgcgagtgaaattaacgagaaagaagaaaaaatgaaagccgacagcataacatcacctatacgcaagcaggggtttcgtgcttctatgacagtgaagtggtaaatttgaagttcagttcttcgtaggaagttcagtggttaaaatccctgcctgcgtatagctgagaaccgttgtgggctattttgcacacgacacgacaaacatcaaatgactatcgaaatatgagtttattaaacaataaaaaagttgcaattatcggtggcggaccagttggactaacaatggcaaacttgttacaacaaaacggtattgacattaccgtttacgaaagagatgaaaacccaaaagcacgagtttggggcggaacgcttgaccttcacaaaaattcaggacaagaagcaatgaaaaaagtaggattgttgcaaacctactatgatttggcgctacctatgggcgtaaactttgctgatgagaagggtaacattatagcaacaagaaacccgacactcgaaaataagtttgacaaccccgaaataaatagaaacgcgttgcgaaaaatgttgcttggcagcttgaaaaatgacacagttgtttgggatagaaaatctattgggcttgaacaagaaaacggaaaatggctgctacattttgaaaataagccaactgcattggccgactttattattgtttccaatggtggaatgtctaaaataagaaattttgtttcagataatgaagtcgaagaaacaggtacttttattattcagggcgacattcctgaaccagaaacgaactgccctgaattttataagttgtgcaacaacaatagactaatgaccgcacatcaagggaatttattagttgcgaatccatttaacaacggaatgttaacttacggtgtcattttcaaaaagcctgaagaatggaataatggaaaaggattagattttaaggacacaaaaagcgtttccgagttcttgacaaacaggttttcaaattggagcaatgaatacaaggagttaattcgttcaacaacttttttcgttggtttaacaataaaaatatttccgctagacaaaaagccttggaagagtaatcgtccgttacccataactttaattggcgacacagctcacctaatgccaccttttgcagggcagggcgtaaacattggactaatggacgctttgattttgtcagaaaatcttacaaacgggaaatttggaacgatacaaagtgctattgatgactatgaacaacgaatgtttgtttacgcaacagaagcacaagcggactcgacaaagaatgaaatagaaatgcgaaatccgagctttacttttcaacagctaatgaatgtataactcgacagacaaaaaaaacagcccacaacaatcggcttgaaacgcaaggcggggtaaacgtcttcgattgaacatttttttctaattttacggtatcggcttcgattgaaaggtagtggtaaaaacccgccctgcgtcaagccgccggacgttatgtgccatttttgaatgacaatgcgaatagatacagacaaacaaatgaatttacttagtgataagaacgttgcaataattggtggtggacccgttggactgactatggcaaaattattacagcaaaacggcatagacgtttcagtttacgaaagagacaacgaccgagaggcaagaatttttggtggaacccttgacctacacaaaggttcaggtcaggaagcaatgaaaaaagcgggattgttacaaacttattatgacttagccttaccaatgggtgtaaatattgctgatgaaaaaggcaatattttatccacaaaaaatgtaaagcccgaaaatcgatttgacaatcctgaaataaacagaaatgacttaagggctatcttgttgaatagtttagaaaacgacacggttatttgggatagaaaacttgttatgcttgaacctggtaagaagaagtggacactaacttttgagaataaaccgagtgaaacagcagatttggttattcttgccaatggcgggatgtccaaggtaagaaaatttgttaccgacacggaagttgaagaaacaggtactttcaatatacaagccgatattcatcaaccagagataaactgtcctggattttttcagctatgcaatggaaaccggctaatggcatctcaccaaggtaatttattatttgctaaccccaataataatggtgcattgcattttggaataagttttaaaacacctgatgaatggaaaaaccaaacgcaggtagattttcaaaacagaaatagtgtcgttgattttcttctgaaagaattttccgattgggacgaacgctacaaagaattgattcatacgacgttgtcatttgtaggattggctacacggatatttcctttagaaaagccttggaaaagcaagcgcccattacccataacaatgattggggatgccgcacatttgatgccgccttttgcagggcagggagtaaatagtgggttggtggatgccttgatattgtctgataatctagccgatggaaaatttaatagcattgaagaggctgttaaaaattatgaacagcaaatgtttatctatggcaaagaagcacaagaagaatcaactcaaaacgaaattgaaatgtttaaacccgactttacgtttcagcaattgttaaatgtataaaatggaataaaacggcacataacaaacaaattggcaatagagccggtgaagtacttctattgaacttttgtgcaatgttgaagattagtaattctattcaacatttgtgctaaaagtcggctccatcgccaatttgccaaacgttgtacgacatagtaaaaccgaaccaaacaaaatgaaagtcagagaagaaaagttaagaacaattatagaatggtcggagaaaaacgaagatgtaagagttcttcttctgacaagttcacttgtaaatcctttagcacttgttgacgaatttagtgatttagacattgaatttgtttttgaggataatacaaattacatttcagacaaaagctggacgcttaaattcggaaatccaattgctatgattgaagaagacgaaagttgttttaaccataaacacgcaatgaaaatgctactttatgaagacggtgtgaaagtagattttaaactttacagcaaatcaaaatttataaaggaaacgcaagagaaagaattaccagaagattgggatattggttataaaattttaattgataaagatggtattacaaagcaaatgctgaaaccaacttatcaaatttccattatcaaaaaaccgtctgaaaaagagtttcaaaatctaataaacgatttttggtgggacacaacttacgtggcaaagtgtcttgtgagagatgaaatattctatgcgaaatttatgtcggaaaccgttattcgcacagaatatctaattcctttaattgaatggcacattgcaagtgaacacaattggaacataacgaccaataaatatggacgacttttcaaaaagtatcttaaccaggaaatgtgggctaaaacagaacaaacattttcagggagcgatataaaggaaaattggactgctctattttcaatgactgatttagtttcagaaataggaactgaattgtcaaaaaaattagagtacaaatacccggataaattagaaaatgacatacgaaaatatttagctggactaaaacccaaaacataa

SEQ ID NO: 163 - DNA, 14259 bp, unidentified
  source 1..14259: mol_type = unassigned DNA
  misc_difference 4121: note = a, c, g, or t
  misc_difference 4122: note = a, c, g, or t
  misc_difference 4123: note = a, c, g, or t
  misc_difference 4124: note = a, c, g, or t
  misc_difference 4125: note = a, c, g, or t
  misc_difference 4126: note = a, c, g, or t
  misc_difference 4127: note = a, c, g, or t
  misc_difference 4128: note = a, c, g, or t
  misc_difference 4129: note = a, c, g, or t
  misc_difference 4130: note = a, c, g, or t
ttatgcctcctgtctgtgggccgcaaagcgggtgcctgcggcacggccctcggcgatgtcatagagcagctcggggtgggcgccgttcgcgatgaccatgtcagctccgctggaggtcaccatccgggcggcccggagtttggtggacattccgccggtacccagcgccgaaccggctccgtcggccagcgccatcacctcgggcgtgatgtcctccaccagcgggatgagctttgcgtccgggtgggtgtgggggttggcagtgtagaggccgtcgatgtcgctcagcagcaccagcaaatcagctttgatgcagcaggtgacgatggcggcgagggtgtcattgtcgccgatggaggtgatctcgtcggtggcgacggtgtcgttctcgttgatgatgggcagtgcgcccagctccagcaggcgggtgagggtgttctggatgttctcgcggcggctggcgtgctcgatgtccacaccggtgagcaaaatctgcgccaccgtgtggtcgtaggcgctgaacagccggtcgtaggtgtacatcagctcacactgacccacggcggcacaagcctgcttggaggacatatcggtagggcgggcggaaagcgacagcttgcccacacccatgccgatagcacccgacgacacgaggatgacctcatgtccggcgttcttcaaatcgctgagcactttcaccagctcttcggtgtggcggatgttcagccgcccggtggagtgggccagtgtggaggtgccgactttgactacgatgcgcatagatcaaccctttcccatctctttggtcttgttgtaggaggcgatgacggcgtccatcaccgcgccccgcaggcccttttcttccagcacccgcacgccctggatggtgctgccgccggggctgcacacggcgtccttgagtgcgccggggtgttggctgctctcaagcaccagctttgcgctgcccaggaccatctgggcggcgtactcctgcgccttggcacggggcagaccgcaggccacgccgccgtcggccagcgcctcgatgaactggtacacccaggccgggccgcagccggacacgcagctggccgcgtcgatgaggctttccgacacagcatccagccgcccggcgggggccatcaatttcaggaactcggcctcttcctcggcggtgacgttggaggtgcagtactggatcataccggcccccaccgaagcgggcgtgttgggcatgatgcggatgacggggcagtcgctgcctgccatctcctgaatgcgggcgatggacaggcccgccgccatgctgcacagcacgaagcggctgggccgttcggccagcgtgaagcggagcggtgccagcagctcctccatcatctggggcttgacggctaagaagatgaggtcgcagcggcctgccacctcgtcgttgatggtggtgttgcagcccagctcagcggccagagcctctgccttggcggcggtgcggttggccagccagacgttctgcgggtctgccgccttgcagacggcccgggcgatagccccgcccatgttgccgcagcctaagaaaccgatggtattcagcataagaaaaccctctttcccaatcaaaagaacaggggagatgccccctctgcgtctccattgtaagcagggccgggggagaaatcaagaggaaagccggaaaatgtcaaagcttttcggaaagctcctgatagacgcgctgcggcggagcaggcttttttgctgtccaaatcttaagaaaacataaaaagttcatgaaaaagtcgaaaaaggtgcttgcacctgcacgggcagatgaggtatcataatagatagaagttggaaaactccgcacagaacggggcaaacgcgaaaggatgggcattctcgtggcacagacgacaaaacgcgcgctggaagcatcgctcaaaaagctgctgctccgcaagccgctgaataagataacgataaacgacattaccgaggactgcggcgtgaaccgcatgaccttttactaccatttcaaggatatttacgatttggtggactggatcctggtggaggatgccacagaagcactggaaggccatcaggactttgagacgtggagcgacgccttccgcgatatgctggaaaaggtgcaggccaaccgggtgctggtgctgaatgtctaccgctccatcagccgggaacaggtggagcagtacctctataaaatgcttgaccctctgctgcggatgtttgtagagcgtgaaaacatctcggtgcaggaagaggacaagcagttcatcattgatttttataagtatggctttgtgggtatggtgctggaatggatacgccgcgatatgaagaccgaaccagccatcatggccgaacggctcaacatcatgatgcacggtgatctgaagcgggcgctgctgcgcttcagcaccgacggcagagcatcaaaaaccgacgactgataaaaatttgaacaggcagagcaggatgatagaaaaactatcaccctgcttttgttgtttatagaacctttgtcggaaaaatgttaaagtattgtcaaaacaaagggctggcaaagacccacacaaggaggcagacttttatgagtatcgcgttggagtcgttgaaccataaggtacagcgtaccgctgtcggaacaatggtggatgtggcactggctcatgtcagcaaagaccgtcagaaggcgtttgccgagatggtggacgtcgccaagcagttctatggcgactcgttcagcgaggagacgtatgagcacgcccgcgcagtactgaccgatgcggacagcaagtggtcgaagctcatcaactgtgtgctcgaccagaccgcgcccagcgtggcacgcaccacggcgctcaaccttggctatgaggcgttcttccgggggacaaagaccatccgcgagaaccgcacaaagtaccactgcaacattccgtggctgatcctgttcgaccccacttcggcttgcaatatgcactgcgtgggatgctgggcgggcgagtacggccacaaaaacaacctcagctttgaggatatggacaaaatcatcaccgagggcaaggagctgggggtctatctctatatgctcaccggcggcgagcctctggtgcggaaggcggatattctccgtctggcaaaaaagcacaacgatgtgcagtttgcgatttacacgaactctaccctcatcgatgagccgttctgcaaagaggtcgtagaactgggcaatatcgccttcatgctctcgatcgagggaactccctctaccaatgatgcccggcggggcgacggccactatgccgctgtcatgaatgcgatggacttgctcaaggcccacgggatcctttttggcacctccatctgctataccagagacaatctcgaagccgtcaccagcgaccactttatgcggatgctctgcgacaagggtgcgcacttcgggttctacttccactatatgccggtaggcaatgaggctgcgccagagctgatgcccacgcctgctcagcgcaagtacatgatcgagcgcatccggtatctccgctcagagaagagcgatattccgttttatccgatggacttccagaacgatggcgagtttgtgggcggatgcatcgcaggcggacgcaactattttcatatcaattcggcgggcgatgcagagccgtgcgtctttatccactattccaacgccaacatccacgacagcagcatcctcgatattctccgcagcccgctcttcatggcctaccacaacggccagcccttcaataaaaaccatctgcgtccctgcccgatgctggaaaaccccgagcttctgcgccagatggtgcatgacaccggtgctcacagcaccgacttgcagtcgcccgagagcgtagaccacctctgcgacaaatgcggtgcatatgctgccgactggcagcctgtagccgacgagatctggtcgcacgtcaccctcagggagagccggtacgagaattacaaggactgggaaccggcgcattccactgctcacgcgaaatgactttatcggtctttcaaagataaaaatgtgcagaaaagcccccatcttcaccggctgaggcaagatcggnnnnnnnnnntgaggcagccgggaggatgggggctttatcttgttattttattcttcgccggaatcaatgacgatttcggtttccgttccttcatcttctacaggcgcgggagccgggtcgccgggatcgccgaactcgtcgtggtagacggtcatctggtcgagctggccgttgcggcgcaggccatggaagaccagcttcttgatgacgtcatagatgacggcgaacagcggcacgcccacgatcatgcccacgaagccccacagaccgccgaacagcaggatggagaagagcacccagaagctcgaaaggccggtggtgttgcccaggatcttcgggccgatgacattgccgtccagctgctggagcaccagaacgaagagcacgaaccagatggccttgatggggctctggatgaggatgagcagcgttgcaggcacggcaccgatgaagggaccgaagaaggggatgacattggtgacgccgatgatgaccgacaccagcagcgcgctcgggaacttgaagatgatgcaggcaaagtagcagagcacgccaatgatggcggagtccatgatcttgccgttgatgaagccgccgaacatcttgtctgcgtagaggacttcctcctggatgagctgcgcccagcggggcttgacgacgctgtagaggatcatcttggcctgtttggcgaactttttgcggctggccagcaggtaaacagcgacgataaggccgatgagcaggttcttgaaccaggtcaccacattcatgacgccgacgcccacaccgctcaggatgccttgtatattctgcagcgaggggagcagggtggtgcgcagagtggtcagattgtcagcaatggcatcgtaggcatcgttgaaatagcccatcagtgtctcattatccaagaagacttcctgtgtgttcacccaccgcatgaaccgggtaatgctggtctgcgcggtgtagtagagggaggtgacgcttgtgatgagctgcggcaccaccatcatcacgagggcgtagaccaccagcacaccgaacagcagcgtcgccgcaatggcaagcatattggccatgctgtggagcttttcggggaagattcggtgcagaaagccctcaatggtgttgcacaccggcttgagcagataggcgatgacggcaccgtagatgaagggcatcaggataccggtcaccttggagaccgcgtcgccgaacccgtcgaagcggtagatgaagaagaagaacaggatgcttagacttatcgcaccaaagcccgcgagcattccgtagatatagggcttgatgtgcggctttttgtccatcatgtgtgactccattcctgccgcagacggcaggagccggtacggcgatgtttagattttgttgctgcggcgccagatgtgcatcttctcggcctctttgataagctcctcgcggaagtcggggtgtgccacattgatgagggcttcggccttctcccaggtggtcagacccttgaggttgacgcagccgtattcggtgcagaggtaatgcagattggcgcgggtatcggtgatgatgctgccgttttccagcgtgggacggatgcggctctcgagctgaccggtcttcttattaaagaaggtagaagacaggcagatgaagctcttgccacccttggaaaggtatgcgcccagcacgaagtccagctggccgcctgcaccggaaatgtgcttgacgccggcgctctccgcattcacctggccgaacaggtcgatgtccaccgcattgttgatggagatgaagttgtccagcgcggagatgctgcggatgtcgttggtgtaatcgacgggagcagacatgcactcggggttgttgttgaggtagtcgtacatcttctgggtgccggcaccgaaggcgtagacctgacggcccttgtccagctgcttgtgtgcgccggtgatcttgccggccttggcgatgtccacgaaagcgtcaacatacatctcggtgtggacgcccaggtccttcaaatcgctctgggcgatgaggctgccgatggcgttgggcataccgccgatgcccagctgcaggcaggcaccgttggggatctgcggcacgacgaggtttgcgaccttcaaatcgacctcggaagcggggccggcagcggccatctggccgatgggcggattgtcgccctccacgatgccggtgacctgggagatatggacacagttctccataccgccgaggcagcggggcatattggtgttgacctccacgatgatcttccgggccttctcacagacggcacccagatgggaagcgctggggccgaagttgaagtagccgtgctcgtccatcggagtcacctggaagacggcgatgtccagcgggtcgggactctcgcggtagtagcggggcagctccgaatagcggatgggggagtagaacgagaagccctgtgcgatggctttgcgctcaatgccgcccatgtgccagctgttccaggtcatgtgggcagcggggtcgtcgatctggaagatctcaggcacccacatcaggatgccgccgcggaaattgacgttctccagttcgggcaggcgcttggcaagggcggcgtccacggccacgggggtgttgacgcaccagccgtaatccacccagtcgccgctcttgaccagagaagcagcctgctcggcagtcatctttttctgggcatacatttccatgaaatccattataaaccatcctctcctttaagaacataaaagaattgtaaatttattatttacaattctacgggacaaaatcttagccggaaatttaccgtttcttcccagtccggacactgtcttatcacaccccggcggtatccttggggtcggcagggcagaagcctccggcagcggcacacctgcacagcttagttataacattaacaaacattataatcaagccctcttccgcgaaaaaatgtctcgcaggacaatttgactaaatttcttaggtatttgtggcgattgtttggtatagcaaaaacaatttttttcgaaaaagtacttgataaaattttgacgatatggtttactaagggtgtaccaagatgatgcgccccagtgcgacgttaattgactaaaaattaacgatattgcgatggcgatgcggcctggtacttgaagcaggaactgaaaagtgctatcatggcaacaccaaatgcgcttttccaaagcgcgcaaataaaggagaccataccgatggcaacagcagtttaccccgggtccttcgacccggtcacgagaggacatctcgacatcatcaagcgagctgcaaagataaacgaccagctcattgtggcagtgctcatcaacagcgcaaagaaccctctgttcaccgtagaagaacgggtggcgctgctgcgggagtgctgcaaggacatcccgaatgtgacggtggagagcttcgacggcttgaccgtggacttcgccaagaagcgccacgcttcggtgatggtgcggggcctgcgggcggtgacggatttcgaaaacgagatacagctcgcccagacgaaccacgcactgatgcccggtatcgagacgatgttccttgccaccagcatcaagtggagctacctttcctccaccatcgtcaaggaggctgcccgctacggcagcaacatctccaagttcgtgacgcccaacgtagagaatgccatccacgccaaagtggagcagctccgggcggaaggaaagatgttctgataccttttataatgcagaaaggcctttgggctttttgataaatagttttacgaaaccccgaaacatataaattcaggaggctattaacatgaagaaaattgttatcgcatctgcttgccgtaccgctattggtaagtttggcggcaccctggcaaacgtccctgctgcagagctgggctccatcgtcatcaaggaggccctgaaccgtgctaacgtgaaacccgagcaggtcgatcatgtttacatgggctgcgtcatccaggctggtctgggccagaacgtcgctcgtcaggcttccctgaaggctggcctgcccgtcgagactcctgctgtcaccgtcaacgtggtctgcggctccggcctgaactgcgtgaacatggctgctcagatgatcgaggccggcgatgctgacatcgtggtcgcaggcggcatggagaacatggacatggctcccttcgcaatgatgaagggccgctacggctaccgcatgggcgctcccatgggcaagagcgagatcgtggataccatggtcaacgatgctctgtgggatgcctgcggcttcaacaagcacatgggcatgaccgctgagaacgtctgcaccaacgagacctatcagaagaagtacggctacagccccatcacccgcgagatgctggatgatttcgcttaccacagccagctgaaggctgacaaggccatcaaggacggcgctttcaaggatgagatcgttcctgttgtcatcaagggcaagaagggcgacaccgtgttcgataccgatgaaggcccccgtctgagcgctcccgaagtgctggcaaagctgaagcccgccttcaccaaggacggcatcgtcaccgctgcaaactcctccgctatcaacgatggcgcagctgctctggtcatcatgagcgaagagaaggccaaggagctgggcgtgaagcctctggctacctgggtcgcaggtgctctggcaggcgtcgagcctgaggtcatgggccttggccccatcgctgctaccaagaaggtcatggctaagaccggcctgaccgttgctgatatggacctggtcgaggccaacgaggcattcgcagcacagtccatcgcagtcggcgaggctttgggcttcgataaggacaagctgaacgtcaacggcggcgcaatcgctctgggccacccggtcggcgcttccggtgctcgtatcctcgtcaccctgctgtatgctatgaagcatcgtggtgctcacaagggtctggctaccctgtgcatcggcggcggcatgggctgcgcaaccatcgtcgagatggactaatttccctttggagggtcactccggatattgatacagcccggacagtgggcgagaccggagacttgccccttgtccgggggctgttttgaataagatataacctgaatggaggttttcacaatggcatttgtaaaaaccgaggtgcagggcgcagtcgagatcatcaccatcgaccgcccgaaggcactgaacgccctgaaccccgaagtcctggcagacctgaaggctgcttttgaggcagttgaccagtccgccatccgctgcatcgtcctgaccggcgaaggcgacaagagcttcgtggcaggcgctgacatcggctccatgagcaccatgaccaaggccgagggcgaggctttcggcaaactgggcaatgatgtgttcctgatgatcgagagcttccccatccccgtcatcgcagccgtcaacggctttgcactgggcggcggcaatgagctggctatgagctgcgacatccgcatctgctccgacaacgctgtgtttggtcagccggaagtcggtctgggcatcaccccgggcttcggcggtacccagcgtctggctcgtctggtaggcatgggcatggcaaagcagctggtctactctgcactgaacatcaaggctgacgaggcctaccgcatcggcctggtcaacgcagtgtatccgcaggctgagctgatggagaatgtcctgaagctggccaacaagatcgccaagaacgctcccatcgccgtgcgcaactgcaagaaggctatcaacgacggcatcagcctccccatcgagaaggctgtcgaagtcgaagagaagctgttcggcgactgcttcgagactcatgaccagaaggaaggcatggcctgcttcctgagccgtgaaaagccgaagcccaaggcagtgttcacgaacaactaaactaaaccataacgcctctgcaacgcctccccggaaaggggaggcacggagaggcactacattcagaagatataataaaggagagatttcctatgaagatcggtgttatcggtgctggcactatgggccagggcatcgcaaaggcatttgctcaggtcgagggcaacacggttgctctgtgtgacatcaagcaggagtgggccgagaatggtctggcaaagatcaagaagggctatgaaaagctggtcgctaagggcaagatgactcaggagaaggctgacgctatcgtcgctgctatcactccgggcctgaaggaagacctgtgcgctgactgcgacctcgtcgttgaggctgctttcgaggatatgaaggtcaagcagaccacttttggcgagctggataagatctgcaagcccgagtgcatcttcgcttccaacacctcttctctgtccatcaccgagatcggcaagggtgtcagccgtcctctggtcggtatgcacttcttcaaccccgcagaccgcatgaagctcatcgaggtcatcgctggctgcaacactcctgctgagaccgttgagaagatcaaggagatctccgttgccatcggcaagaaccccgttcaggtcaacgaggctgctggcttcgtcgtcaaccgcatcctgatcccgatgatcaacgaggctgccttcatcaagatggagggcgtttccaacatcgccggcatcgacaccgctatgaagctgggtgccaatcacccgatgggtcccctggagctgggcgacttcatcggcctggacatctgcctcgccattatggacgtcctgtacaaggagaccggcgacagcaagtatcgtgcatgcccgctcatccgtaagatggtccgcggcggcaacctgggctgcaagtctggcaagggcttctacgtttacaacgcggaccgcaccaagacccctgtcgacgagctgtaaattagtttgaaatttctctcggtcgtcccgaagaaaacggccgggaggaatttgtttgcacaggacatgagtgtagctgccctgtgctgaaagaaaaacatccgttaggaggatatagcgatggattttactctgtccaagcagcagcagatggtgcagaagatgtaccgcgagtttgctgaaaacgaagtcaagcctctggcaaagaaagtcgatgccgaagagtatttccccaaggagaccgtcgagaagatgggcaagctgggtatgatgggcatttacttccccacctccgttggcggtgcaggcggcgacgtcctgtcctacgtcatggctgttgaggagctgagcaaggtctgcggcaccactggtgttatcgtttccgcacacaccagcctgtgcgcagcacctatttatgagaacggcactcccgagcagaaggaaaagtatctgcccaagctgtgcagcggcgagtggctgggtgctttcggtctgaccgagccgggcgctggtactgacgctcagggccagcagaccactgctgtggaagatggcgattactgggtgctgaacggctccaagatcttcatcaccaacgcaggctacgctgacgtgttcatcgtcatcgctgttaccgataaggtcctcgacaagaagggccgtcccaccaagctgtgctccgccttcatcgtggagcgtaccgacccgggcttctccgtcggcaaggctgaggataagatgggcatccgtggttcttctacctgcgagctgatctttgaggactgccgcatcccgaaggatcgtatgctgggcgtacgcggcaagggcttccagctggctatggctactctggacggcggccgtatcggtatcgcttcccaggctctgggcatcgccgagggcgctctgcaggagaccgtcgcttacgtcaaggagcgcaagcagttcggccgcagcatctccgctttccagaacacccagttcgagctggccgagatgaaggcccgtatcgaggctgcaaagtatctggtctacgctgccgctctgaagaagcaggaagctatgaatggtgcaaaggtccgctacagcgtcgaggctgctcaggctaagctcatcgcagcccgcaccgcaagcgacgtgacccgccgctgcctgcagctgttcggtggctacggctacacccgtgactaccccatcgagcgcatgatgcgtgatgccaagatcactgagatctacgagggcaccagcgaagtgcagatgatggtcatttccggcgcgctgctgaagtaagggaggcaagatttacaatgaaagcaatcgtttgtgtaaagcaggttcctgatacctccggtaaggtggctgtcaaggcggatggtactctggaccgtgcctctatggcaaccatcaccaaccccgatgacctgaacgctctggaggccgctctgaagctgaaggacgagaccggctgcgaagtcgtcgtcgtcaccatgggtcccccgccggccgagggcatgctccgtgagctgctggcccgcggtgctgataaggctgttctggtctctggtcgtgagttcggtggttctgataccttcgcgaccagccagatcctcgctgctgctgtcaataagatcggtgtcggccccgaggacgtcgtgttctgcggccgtcaggcaatcgacggtgataccgcacaggtcggtcctcagatcgctgagaagctgcacctgcctcaggtgacctatgttgctgacatccagaaggatggcaacagcctcacggtcaagcgtatgctggaagacggctacatgatggtcaaggtgcagactccctgcctgctgacctgcatcaaggagctgaatcagccccgctacatgagcgtcaatggcatcttcacctgctacgacaagccgatggaagtgttcgattacaacgctctgaaggacgatccgctgatcgaggtcgataccatcggcctgaagggttctccgacgaacgtctttaagtccttcactcctccgcagaagggcgcaggcactatgctgactggcgacgataccactgcacagctggctggtatcctggccaagaagcacctgatctgatgaaaggagcataggattacaatggctgattttaacgaatacaagggcgtctgggtcttctgcgagcagcgccagggcgcactgatgtccactgattttgagctggtcagcgaggcccgcaagctggctgatgagctgggctgcgaagtcaccggcctgctgctgggcgacaacgtcgaaggcattgcaaaagagctgggcggctatggtgccgataaggtcatggtctgcgacagcccgctgctgaaggattacaccactgacgcatacgccaaggtcgtctgcgacatggtcaacgagtacaagcctgaggtcctgctgatcggtgctaccaacatcggccgcgaccttggcccccgctgcgcagctcgtctgcacaccggtctgaccgctgatgctacccatctggacatcgacactgcaaagtatgtcgagttcctgaaggagagctccaccatcgacctgtccaagcagaagttcgattacgaggaccgcaacctgaagatgacccgtcctgcttttggcggccatctgatggctaccatcatctgcccccgtttccgtcctcagatgtctaccgtccgtcccggcgtcatgaagaaggctcccttcgatcaggccaaggccgatgcctgccagatcgtgaagcccgcattcagcctgaccgctgacgacatcaagactgaggtcctgagcgttgagaaggcagctgagaagctggtcgacctcatcggtgcagacgtcatcgtctctgttggccgtggcatcagcaaggacgtcaacaagggcatcgagctggctgagcagctggctgcagctctgggcggcggcgttgtcggcgcatcccgtgctgtcaccgatgccggctggatgaccgctgaccatcaggtcggtcagaccggtaagaccgtccatcccaagatctatgtggctctgggcatctccggcgctatccagcacaccgcaggtatgcaggattctgagtgcatcattgccgtcaacaagaatgagtccgcccccatcttcggtgtggctgactacggcatcgtgggcgacctgttcaaggtcgttcccgaactcatcaagcaggtcgaggcagcaaaggctgctcagtga

SEQ ID NO: 164 - DNA, 9049 bp, unidentified
  source 1..9049: mol_type = unassigned DNA
  misc_difference 2920: note = a, c, g, or t
  misc_difference 2921: note = a, c, g, or t
  misc_difference 2922: note = a, c, g, or t
  misc_difference 2923: note = a, c, g, or t
  misc_difference 2924: note = a, c, g, or t
  misc_difference 2925: note = a, c, g, or t
  misc_difference 2926: note = a, c, g, or t
  misc_difference 2927: note = a, c, g, or t
  misc_difference 2928: note = a, c, g, or t
  misc_difference 2929: note = a, c, g, or t
  misc_difference 8202: note = a, c, g, or t
  misc_difference 8203: note = a, c, g, or t
  misc_difference 8204: note = a, c, g, or t
  misc_difference 8205: note = a, c, g, or t
  misc_difference 8206: note = a, c, g, or t
  misc_difference 8207: note = a, c, g, or t
  misc_difference 8208: note = a, c, g, or t
  misc_difference 8209: note = a, c, g, or t
  misc_difference 8210: note = a, c, g, or t
  misc_difference 8211: note = a, c, g, or t
ttagtaggtgatgccctgagccatcatggcagtagcgaccttcaggaagccagcgcagtttgcaccgaccatcaggttgccctcggagccagcggccacggatgcatcgtaggaagcgtggaagatgccctccatgatgcccttcagctttgcatcgacctcttcgaagctccagctcagacgctcggagttctggctcatctccagaccggaggtagccacgccgccggcgttggaagcctttgcgggtccgtacaggatgccgttggacaggtagacctcgatggcctcgggagtgctgggcatgttagcgccctcgcagaccacggtgcagccgcccttcaccagagcctctgcggactccttgttgatctcgttctgggtagcgcagggcagggcaatgtcgcaggggacagtccagaccttggtgcagtcagcaacgtaggtcgcatccttgtgggtctcagcatactccttgatgcggccgcggcggacttccttcagatccttgacgtaagccaggtcgatgccgttggggtcgtagacatagccgttggagtcggacatggtgacgaccttggcacccagctgggtagccttctcacaggcatagatagcgacattgccggagccggagatgaccacggtcttgccctcgaagctgtcgttgcgcatgcacttcagagcctcagcggtgaagtagcacaggccgtagccggtagcctcggtacgggccagagaaccgccgaaggtcaggcccttgccggtgagcataccgccctggaagctgttggtcagacgcttgtactggccgaacatatagccgacctcgcggccgccgacgccaatatcaccggcggggcagtccacgaactggccgatgtggcggtacagctcggtcatgaagctctggcagaagcgcatgacttccatgtcgctcttgccgtgggggtcgaagtcagagccgcccttgccgccgcccatgggcagggtggtcaggctgttcttgaaggtctgctcgaagccgaggaacttcaggatgccctgattgacagaaggatggaagcgcaggccgcccttgtaggggccgatggcgctgttgaactggacgcggtagccgcggttcacctggaccttgccctggtcatcgacccaaggcacacggaaggtgatgatgcgctcaggctcgaccagacgctcgatgagggcggccttctcgtactcgggatgcttctccacgacgggctggatgctctccagaacctcgcggacagcctgcaggaattcgggctcgttggcattgcgcttttccaggccctcgtagacacgcttcagatattcattcgtcagcataatgatatactccttttcccttaactctattgtgtggaggcttcggctttcccgtttcccacggcgggtgcgataagcctctgaccactttgctattataaagctttatctgccgatttacaagatggcccgccccgcaaaaaaccggaaaatctttcaaaatacaatggaaaagatgaatgcacttcacgaaaaagacgggacacatcaaaaaattgcgataaaacctgcttttataaagaaacaaaaaatccctgcaccggcccggaacaggcagtgcagggaggaaaagtcttacttcagcagcttctcgcaggcgtcagcggcaccctcgaggaactgtccgccgtaggtctcgatcatgccggcgtcggacagcgcagccagctgcgggtcgatggggcatttggccagaacgggcaggtgatgctttgcggccacctcgtccacatggctgtcgccgaacacattgatgtgcttgccgcagtcggggcagacgatatagctcatgttctcgacgatgcccagcatcggcaccttcatcatctcggccatgttcacggccttggccacgatcatgctcaccagctcctgcgggcttgccacgacgacgatgccgtccacgggcagactctggaagacggtcagggggacgtcaccggttcccggaggcatatccacgaacaggaaatcgacgtctttccagaccacatcggtccagaactgcttgaccgcaccggcgatgacggggccgcgccagacgacggggtcttcctcgttctccaccagcaggttgatgctcatcacgtcgatgcccatccggctctggatgggccagcagcccttgtcgtcagccatggcacggccatggatgccgaacagcttggggatggacgggccggtgatgtcggcgtcgaggatgccgcagtggtagccgcggcgtgccattgcacaggccagcagggcgctggtcatgctcttgccgacgccgcccttgccggatacgacgccgatgaccttcttgacgctgctattggggttgggtgcgtcatgctggggcgcagcattgcgggaagaacacgctgccccgcagttggagcagtcatgggtacattcttcgctcattgtctcgttgcgcacggccgtggtaccggggtgcgcttcctccttgcattcttagatccggtctggcggaacattcccgccagatacaatatatatcatatcataaaactgggaaagaaacaacccacggccccgctcatatttcccagagcagtttacatatttataaaaagatacactggggaaagggaggggtgcgctgtgcggcagagctatctgaaaaacgcagccctgatgaccggggcggacgtcctgctccgtctggcgggcatggggctgcgcatctggctggcgaacgccctgggcggcgaggggatggggctgtaccagctggtgctggcggtctattcgctcttcgtcacactggcgacggcgggcgtctcggtggcggccacccgcctgatggctgaagagctggcccgcagcccggcggaggcccggnnnnnnnnnngatctgcccgggggatgcttcactgtctcctgctggcgggggccgggctgggtgtgctggcactggcggcgcagttcgggctggcgggtctcgccgcaaaatggtggctgggcgatgtccgggcagcgggggcgctgcgtgtctcgtcgctgggcctgccgtggatggcggtgtcgtcggtactgcggggctttttcatcgcccggcggcaggtggagccaaacgtcctgagccagctggccgagcagaccgtccgcatcggcatcgtctactttgcgctggagcgggccgacgtcctcggctgggacgttggcgggcgctgcacggcagtgctgggggcaacggcggtcagcgaggccgtcagtaccgggctgatggcacttttttaccgcaaagaggcccgccgctgcttcggtacgcggcctgcctgccgcccgcaggagccgggaaagcgcctctgggacatcctctggccggtggagggaggacgttgtctcgccagcgctctccacaccgcggagaatatgctggtgccggcctgcctggcagtctatctgcagttttccggcgggcgtgccgaagccgtggcccagtacggcaacctcaaggggatggccctgcctctgctgacctttcccttcggactgctggggagcctttccgtcctgctgatgcctgagatcacccaggcccacctctggggccagaacgggcggctggcggctctcatcgacaggatgctccggctcaccggctatttctcggcgctggcaggagcggcgttctgggtgtggggtcagccgctggccgaagccctctacggcagtgccgaggcgggcagctaccttatcatcctcggcccggccatgccgctgatgtacctcgagagcatggtggacggtgccatgaagggggtaggagaacagaaagccgtgttccgctacagcatgtgggactcctgtctccgcattgtgggcgtgctgctcctgctgccccgcttcgggatgaagggctttctttttgtgatattgctgtccagcttctacacctgcaccgccaacacggggcggctgctgtccagctgcggcctgcggctgcaactctggcggtggctgggcgcaccgggctttgcgggagccgtcagcgccggggccgggctggccctgcggcatcttttagcggactggctcaccggcggagtcctcttgcagctggcggcggtagcgctgggcggcgcggggatggcagtggtctgctttgcggcggcgtggccgctgggcctcggcgaagagctgcgggccgtggcggcaggggaaaggcggcataagaaaaatgtccaaaaagtgaaataactggacacggggaagagaatcgagtataatactaaagatattatggggtgataggcccttgaaataaaaacggcagctgacatcttcggatgccggccccgatgaaaaagaggatattctgtgaaggaaaagaaaacaaatctgctgcaggtactggcccgccgggctctgctggtggtgctggacggagccatcgtagccttcagcttttatttcgccctgctgctgcgcgcagacggtgctgtcgaggcctcctggtggccccacaaccgcgccctgctctacgcgaatctgccctggatcgtggcagtctacctgctcagctttctggccgggcggctctacaccatcctttggaagtatgccggggagcgtgacctcatccgtctggccgggatgatcgccgtcccgacgggcatcgtctatctggtcaaccgatgcttcatccacggtgtgctcttcaactcggccaacgccatggcggcggtgctcattttcctgttcatcggcgggagccgtctggcctggcggctcttcctgaaccacccgctgggcgagcgtctgcgcggcaacaccagcaaggaccccaaccgccctgtcatgatcgtgggtgcgggcgaggctggtgcgtgggccatcaatgtctgcaagaccaacaccagctacggccatgtcatcgtggccgtggatgatgaccccaacaagctgggccagaccatccatggtgtcccggtgcgtggcacgctggaagaaattcctgacctgtgtacccgctataacatccacaccatcatcgtggcgatcccgaccctgaagggaaaccgcctgaaccacgtcatcgacctctgcgtctccacccactgcgccgtgcagatgctcagcgatccccagctggtgggtgcaggcacacctcagcagggtgcgttccgtgagctgaacaccgccgatttcctctcccgtgaggaagtcacactggacatggagaaaatttccggctacctcaccggcaagaccgttctggtgacgggcggcggcggcagcatcggcagtgagctctgccgtcaggtcatgcgcttcaaacctgcaaaactgcttatcttcgatatttatgagaattgtgcctatgaactgctgatggaactgcagcagaagtatggccgtgatgtgccggtcacggtgctggtcggctccatccgggacaaggcccgtctggacgaggtatttgagacgtaccacccgacggtggtgttccatgctgccgcccacaagcatgtcccgctgatggagatcagccccgccgaggccgtcaagaacaatgtctttggcactaagaacctgctcaccagtgccagtgaacacggcgtggagcggctggtgcagctctccaccgataaggccgtcaaccccaccagcgttatgggctgcaccaagcgcctgtgtgagatgcttatccagaccttcgcaggcaacaccgacatgaagtgcgtcgccgtccgcttcggtaatgtgctgggcagccacggcagtgtcatcccgctgtttgaggcgcagatcaaaaagggcggccccgtcacccttaccgatgccaacatcgagcgctactttatgaccatcccggaggcggcacagctggtgctgcaggccggtgcgctggccgagagcggcagcatctatgtgctggacatgggcgagccggtcaagatcatggaccttgcaaaacagctcatccgcttctacggctatgagccgggcgtgaacatggatattaagatcgtgggtctgcgccccggcgaaaaactctacgaagagctgatgatggacgaggagcaggacaagatgcgccgcaccgtccacaataagatcttcgtggctccgccccggaacatcgacctgggcgagttctaccagcagcttcaggagctggccgtcgccgccgagcacaacgacgacagcgtggtggagcagttggccaaaatggtgcctacctttacccccacccgcgaaaacctcaagctgtaaaaccgctggctgcacggcacccttgctgtgtaaaaatatatgagagggatgtacaatcatggaaaagaaaccgtttttgactgagtcgatggctcaggacatcattcaggacgtacccacccccttccacgtctatgacgagaagggcattcgcgagaacgcccgccgcatcaacaaggcattcagctggaacaagggcttccgcgagtattttgcggtcaaggctctgccgaaccccgtcatcctccagatcctgaaggaagagggctgcggcgtggactgctcctctctgaccgagctgatgctcagcgaagtgtgcggcttcagcggcagcgacatcatgttctcctccaaccagactcctgtggaggacatgaagaaggcttacgagctgggcgcttatatcaacctcgatgacgccacgatggtggacttcctcgaccgcgtggccggtgtgccggagaacatcttctgccgttacaatccgggcggcaccttccagttgggcgagagcaaagagggcttccaggtcatggacaagcccggcgacgccaagtacggcatgaccgaggagcagatgatcgacagctacaagaagctggctgcaaagggtgccaaaaactttggcatccacgccttcctcgcctccaacaccatctctgacgcctattatcctgagctggcaggcatcctcttccagctggctgtccgcgtccagaaggccaccggcgtgcatatcgcctacatcaacctgtccggcggcgtcggcatcccgtaccgccccgagcagacggagaacgacatcatggccatcggcgagggcgttcgcaagaagtttgaagaaattctggtccccgccggcatgggcgatgtctccatcttcaccgagatgggccgcttcaccaccggcccctacggcgctctggtagctactgccatccacgagaagcacatctataaggaatacatcggtctggatgcctgcgcggccaacctgatgcgccccgccatgtacggcgcttaccaccacatcaccgtgctgggcaaggaagacgcaccccacgaccacaagtacgatgtggtcggcggtctgtgcgagaacaacgacaagtttgccatcgaccgtatgctgcccaaaatcgacatcggcgacatcgtgtatatccacgataccggtgcgcacggctctgccatgggctacaactacaacggcaagctgcgcagcgccgaggtcctgctctgcgaggacggctctcaccgcctcatccgccgtgccgagactccccgcgactactttgcaacgctggacttcctgcccttcatgaagccgctgctgggcgagtacaacgacgactgagcacgcttctgactccatcaaaccagaataaagcgaggaacgacgcagatgttttttggattccaactcacctgtggcctgatgctggtcttttacggctattcggtcatgaaaaatccacgggtctggggcgaccagggccgtcaggccgtcaaggccgaaaatttccccgagtactgccgccagaacggcctgtttttcctgaaagctggcttcatcatggcgctcattggtgcgctggacgcgctggtaacgctttcgggtctgctgtacgtcctgctgtacctgtttgggctggcgtttgcgttctacccgctgacccgctggtgcaaggagaacgagggcttctcgtggccctggccccgcgtcgagagcgagaaaaagcgcatcaagaaactgcgccggcagcaggaggccgaaaaggcggaacgagaagaaaagtaaatagcaaaaaataagaggtcgctgtaaaagcaacctctcagtctcacttcgttcgacagctccccctaccgaggggagcctctggcgaagagattgggctnnnnnnnnnngggaggtggcacggcgaagccgtgacggagaggttgaacacagcggcctctttttgttttcttaaatcaaaccattttctttgcagtagtggtaaataccatcctcagcacagggacgacagacctcgctggcgatggctttcaaatcggcagaagcgttgcccatggcaacgctgtgaccgacagcctgaaacatttctatatcgttgttgccgtcgccgaaagccattgcatcctcgggcgtcaggccgtaataggccagaactttctggataccggctccttttccgccggagatggggatgatgtccaccgccctgtcccaccaggcagcgatttttgcaccgctcgtgcctttgagaatggcgggccagtcgctttcgcggcagcccatcagcaactggaaaacttcacctcgggagacttcatcgaacttatcggaaatgaccggcgctcgtccgccgatggcgtaatatgctgccaaatcgtcatccgttccgttggagaggagctgcgtccgtcctgcaaccgacaccggacgaccaagcgctgcggcgttttgaatcagcgtctgcacatcctgcggcgggatggggctgacgaaaatatcgccggtcatgttgtagcagaatgagccgttgtaggtaagaaagacgtcgaactctacgccgtcgaatttcggcacaatgagaggggaacgcccggtggcgatggccagcaggatgccgttttgctgtaagcggcgcagagcgtccagtgtccgctcagtaatacgctttttctccatgtcgataagggtgccgtcgatgtcgaaaaagatgatgcggggcttgtgcat

SEQ ID NO: 165 - DNA, 8355 bp, unidentified
  source 1..8355: mol_type = unassigned DNA
ttaatccgtatcgtattccacgccgccctgcgcggcatccccgccggcgggcgtcccggtatccgaaggcgcttccggttccgccggggcatcggcgggaacatcgcctgcgatatagagcacgatggtagttcccacctccaccatgctcccggcgtcctcgctggccgacacgacgcaacccgccgcctcagagccgtcgttgaccacagtaaagcaggtggcgttcagacccttggtggccagctcctgcacggcgctgtcctgcgtctggccgatgacgtcgggcatctccatcatctgggggcctcggctgaccacgaggctgacggtgtcccccttctggatgacctcgcccgcctccggcgactgccggatgatgcggcccttctccaccgtgtcgctgtattccagcgtgacgtagaagagatactcgtcgatataactgcggttgttgcgcacctcggcgtcatagtcgcggcccacgaaattcggcgtcagggtgacgttttcgttcaccggctcactcgccgcctcgctgacggactccggagcgatcacttccggcggcttctcgctctgacggctcagcaggccccagaggatcagcaggatgaggacgctgagcagaatgacgatgcccgccagaagatttcggacgctcagcagctcagccttcgcaggcgctttcggttcctgcggcgcgggggcgggcgggtccagcgcttccatgctgcgggacaattcctccgcatactcccgctccgagagggcgcggaaaagctgctgcaccgtctggatgcgctccaccggcttgagccggagtcccagatacagcgtttcggagacgtaagccggcaccgacggcgtcaccgtgcgggccttggggttggagtcggagacgaggcgctgtgccgccgggacggggctcagcccgcagaccatccggtagaacaccgccgcgaggctgtattcgtcggtgtagcggccctcgaactcggcggtggaatactgctccggggcggaatagccctcgtacagctgctcatgaaggccgctgcccgccgtgcgcagccccactgtcgcgtagccggtgagccgggcgcggccattgtccatgatgcggatattggccgggcagatgccccggtgtacgaggcccacctgatgcatggcctccaccccgttgaacaccggttccagcatggcgcaggcctgctggggcgtcacggtgccgtgctcctccagccacttctggagcggacggccgccggggttctccatgacggcgtagaccgtgttgttctcttcgaagacgtccagcacggcctccaggccgttggccggggtaatgcgctggatgaagcggtagaggtcggcaaaatccatccgggtggtcttgaacagcacttcgctgcccggcttcgggcggaggatgcagtccctcccccgctctgccgccagcgtcaggggcatatactccttgatggtcacccggaaagggccgttgttctccacgccccggtagaggatgccctcgccgtccacgctctggatgtcgcccacggtataccggcctgccagcacggtgcctgccggaagactgcccgacgggttgcgccctgcaagttcccggccgcagtggggacactgctcctcccccgcttccagctcctgcatacagtatggacaaatgcgtcgttgctccatgtcggcccctccccgtgatgttttgtactgtttattatagcatagccgacgggaaaatggtaccctaccgccatgaacttcagaagcacgggatcattcagtatatccactcttttcgttcatgcacaagacgatgtatttttcagttttcacattatttcaaatattcttctgcacttttgcagatctctgcttcgattttttcagcagtctccttattttctgcactaattgaaatataggtcttgagcttcggctcagtgccggaaggacgcaccacaatggagcagttatcttccagaaggaacttgagcacatcggacttgggcagaccgtccagacccggagcgtagtccaacagcttgacgacctttttgccgccgaactccttgataccgccccggaacgcctgcatgatgcgctgcatagaccttataaccgttgtacttgctggggttgtgagaagccgtgaccatgacacccgccgaggtgtgcagatagcgggtcgcaaacgacacagtcggcaccggcatcaggacgggccagatattgaccttgacgccattggccgcgaacactccggcggccacttttgcaaacacatcgctcttgatgcggctgtcatagccgatggccacggacggctctgcaaagttctttttcagataatcggccaggccctgagaggcctttgccacagtatagatgttcatgcggttggtgcctgcgccgatgacgccgcgcagaccgcccgtaccaaaagcaaggtcacggtaaaacgcatcttcgatttttgcatcgtccagcgttttcagttcagcggccacgtcggcgtctgcggtggccttggccagccagcgctcatattcctttttaatatccattttctcaacctcttacatccaaaaattgtgcctgtccgtgaagggtcagtatctcggaatccgccgggacaaagatgcagtcacctttatagaaagtgatgctgccgccgtcgtaggaaatagtcccgcagccattgacacagagcagcacacggaacgcaataccatctgcccggtagtgtactttctgccgccgctcggtgttgacgatcatgcggtagacctcaaaatacttgcagcgggtcagcagctcagaggcaatgccctgccggtatttcagcacccgaaggggctgcttcggctctgcgctgctcttcaggttcgctacatccagcgccttgtcgatgtgcagctcccgctttttgccgtccttgcccacacggtcataatcgtacaggcggtaggtcaggttggaattttcctgaatttcggctaccaatgcgccggctccgatggcatggatagtacctgcttcaataaaaaacaggtcgtccttcttgaccggaacccactgcaaatccttcatcagggttccttcggcgatagcgtcccgcacctgctgttcggtacgttcccgtttcaggccatacacgagctttgcgtccttgctggcgtccagcacataccacatctcggtcttgcccagctgtccgttttcgtgctcctgtgcgtaggcatcggtgggatgcacctgcaccgacaggtctttcttggcgtcgatgaatttgatgaggatgggcagagtattttcgcctttgtaccgttcgcccagatactccggatgcgctctcagcacctctgccagctcctgcctcccgaactcaccgctcaccacatagcttgggccgtccggatgggtcgaacactcccaggtctctgccagcgggtccatatcgatgttcttttcaaattcgtcattcaaacggctgccgacatggtgatgacatcgccggccttcacattctgctccatgccgtccacgacggtcttgccctcgcctgcaatgaccgtccagacctcgtcccggtgctggtggctatggtagttcatccggtggcctgcattcagggtcactttgatggtcatggattccttatcaatgtcaatgaccttgaagctgccccaggatttttccgcgaacataacccggtggtcgagcatgttgacgaagggcttgatgtagctggactgctccttatcggacaccagaatgccctccgggctggcagagaccaccacatccttcaggcccatgcagaggatgggaacgtccagttcattgaccacgtggacattctcgcacttctcattgagcattgcctcgcctacgacgtggccgtccattgcctctgtcagggtgttccaggtaccaaggtctttccaggtgcctgcaaagtgcatgacctcgatctccggctcatgctcgaccaccgcgtagtcaaagctgattttattgagggtgtcatacttattgaacaggtcatcataatccacgaagtcgatgagctcatgggcgcggttcagcacatagcccagcttgaaggcgaacacgccgccgttccagagagcgccctttgcaatgtaatcctttgccacttcctgcgtgggcttttccttgaacatggacaccttgctgacctgctccttgccgatggggatgatgtagccgtatttctcgctggggtaggtcggctcaatgcccatcaggaccagatttgcactgctgacagcggcacggtctcccagtgctttcagtgcctcaaagtagtcgttctccacataggggtctaccgggcagacgacaacggattcttcctcaccgacgccctgcacgtccttcagataggcggcagccagcgcaatagccggggaggtatcccggcggcaaggctccacactgatgcccacttcctcgcccagctgattgcggatggccgagacctgagacttggaggtcgcaatggtgaccgttgcatcggtatcgaccgtcttgatttgacgatatacgcgctggatcatagattccagctcaccgtcttctcggtggaagatcttgatgaactgtttggagcgaatatcgttggaaagcggccacagacgctggccggagccgccggacaataacaccagattcataactatactcctcttctaacaaaaaaggccgtggccctgcacggacacacgaccctttcaaatcgtttattttaacgttctgcacgcatcgggttgttcaggaagtcctcgtaggacaggcgtagaccgtcttccagctcggtcttgtaggtccagcccagattggtggccttggacacatccagcagcttgcggggcgtaccgttgggcttggtggtatcccacttgatctcgccggtgtagcccacgaccttggcgaccagctcggtcagctccttgatggtcagctccttgccggtactggcgttgaccgtctcgttgccggagtagttgttcatcaggaagacgcacaggtttgcaaggtcatccacatacaggaactcacgcagcggagaaccatcgccccagcaggtaacgctgggcaggccctgctccttggcctcgtggaaacggcggatgagcgccggcaccacatggctgtgggtgggatgatagttgtcgttggggccataaagattggtgggcatgacggagatatagtccgtgccatactggcggttcaggaactcgcagtacttcaggccgctgatcttagccagtgcataggcttcgttggtcttttccagttcgctggtcagcaggcagctctcctgcatgggctgaggagccatgcggggatagatgcaggaggagcccagaaattccagcttcttgcagccgtttttccatgcagaatggatggcgttcatctccagcgtcatgttgtcatacatgaagtcggccagagcctcctgatttgccacgatgccgccgaccttggcagctgccaggaacacatactccggcttctcctgcgcgaagaactcttccacagcatcctgacgggtcaggtccagctccttgtgagtgcgggtgatgatattggtgtagccctgacgctgcagctcacgaacgattgcagagcccaccatgccgcgatgacctgcaacataaatcttagcattcttttccatcataataagattgccttctttccaaattacagaactgccttgagtgccttttcgcgctttgcacgctcacggtcgtgcttggccataatctcgaccagctgctcgtaagtagtggactgcggattccagcccagaacggtcttggccttggtggggtcgccccacagattgtccacatcggtggggcggaaccactgaggattcacgcagaccagcatcttgccggtggcagcatcgtagcccttctcatcaatgccggtgccttcccagcggagggtgatgccattggcagcgaaagccttctcggtgaagtcacggaccgtgtgctgtacgccggtagcaatgacgaagtcgtccggtttttcctgctgcataatcagccacatgcactcgacataatccttagcgtagccccagtcacgcagggagtccatgttgcccagctccagatgatcctgcaggccctcggcaatgcggccggcagccagcgtgatcttgcgggtcacgaagttctcaccgcggcgctcagactcatggttgaacagaataccgttgacagcgaacatgccataagcatcgcggtactccttgaccatccagaagccatactgctttgcaactgcatacggagaatagggatggaacggagtggtctcacgctggggaacttcctcgaccttgccgtacagctcagaggtagaagcctgatacaccttgcaagtcttggtcaggccgcaaacacggacagcttccagcacacgcagaacgcccagtgcatccacatcgccggagtattcaggtgcgtcgaaggagacttgaacatggctctgtgcagccagattgtagatctcgtcgggcttgatctcgcctaccagacggatgagtccggaggaatcagacaggtcgccgtcatgcagatggatagcatttttctcgatcaggtggtcgatgcgagcggtattggaaatggaagcgcggcggacgatgccgtggacttcataccccttctccagcaggaactctgccagataggagccgtcctgacccgtgataccggtgatcagtgcttttttcataatttcgattctcatttaaaacgtgaagtttaaaacttatgttggttgattttgccgtacaaccatatttaaaaaggatatttgtcctttcagaagtgcataagcagtcagatattaacactatcttggcttcttcggtttgggatgaaatagaaagagccgcgcaggctcaaaacttgcgcagctcggaaagttttattgcatttttgtctttttcggagaggatatattcccgcataggccaaggctcggtctgccagataaaatcagaatcatagcgcactgctcttgccgcttcaccgcagaagtcattatccacgcaccactgcatcagagtgtcatcttccagtgtcaggtagccatgggcaaagccacgcggaattaacatctgcttctgattttcaaaggagaggatctcgccataagcatacccaaaggtgtctcccggtcgaagatcaacagccacattgaagatcgaaccatacaggcaggacaccagctttgcctgcgcgtgctctccctcttggaagtgtagtccgcgcagcgttccggctttcctgctgaagccttggtcgatctgaaccacacggaagtcgattgacttgtccaccggcacagaaagccagcctcggaagtcctcaaatcgttgtgtttcaattgtttccggcttatctaccattgctttctgtactcccttggactgctgccttccaccttgcggaacattcgactaaagtagttcgcatctgccataccgaccgcaacgcctatttcatccacagtcatgtccgtaaagcgaagcagttgcttcgctcttgtgatcctttttgatatgaggtagttgttgatcgttgttccataggtttccttgaagattttggatagatagaacttgttgataaagaacttctctgccaactcttccagcacaattttctctgtaaagtgttcgtccagatactccttcacagctgccagttccagccgtttccggctcacagtcatactctctggatgccaagactgttccatcagtaaggtgagtaaagtccctagcttctcattgattcgcatatctcgtatgtaatcggaagatgatgccaaatcgtagatatccgtcagaagtgtagtgaacggttcaatatccgccgggtggaacacaggtcggccgccacgctctttgtatttctcatacacggctggaaggaacggtgaatagaagtggcaccattgaagagaccaaagattatcggaagtcgaatgactgtatgctttccggcagtcgatgaacacacagtccccggctgatagctcataggtcattccttcataggtaaggcttccggtgcctgacagaacaacaaagcaaagaaatgaggtcaggtttgttctggtcgatgtatgctggtggatagcctgcaacgatccgacctcttgcagatgcagtaacgatgtccgggcaaacgcagacggtgtgtacaagattcgggaggagctcacggacgaagactgtgggttgaacaattcttggtccat

SEQ ID NO: 166 - DNA, 25693 bp, unidentified
  source 1..25693: mol_type = unassigned DNA
atgagcaatgctacaaaagaaactgtcattgttcttgatttcggcggtcagtacaatcagctgattgcaagaagagttcgtgagtgcaatgtgtattgcgaaattcttccttataccgttgatattcagaaaatcaaagacattaacccaaaaggcattatcttcacaggcggtcctaacagcgtttatgacgagtcatcaccgcattatactcctgaaatttttgaactcggaatcccgattctcggcatttgctacggttgtcagcttatggcatacacgctcggaggcaatgttgtttcggctacagacaattcatcaagtgagtacggcaagacagttacaagatataataacaatgatatactctttaaatccgtaaagagtgaaggaatttcatggatgagtcaccgtgactatatcaatgaagctcccaaaggattcagcattacagctacaacggatgtatgtcccgtagccgcaatgtcatgtcctgaaaaaaagttttacggtgttcagttccatcctgaagttaatcatacagataacggtaaagatatgctccgttcattcctttatgatgtttgcgaatgtaagggtgagtggaaaatggaaagttttatcgacacaactgttgcacagcttaaggagcagattggtgacaagggtgtagttctcggactttcgggcggtgtagattcatctgttgccgcagcacttctcagtaaggcagtcggtaaacaacttacctgcgttttcgtggatcagggacttatgagaaaagacgagggcgactttgtagagcagacctttacaaagctttttgatatgaactttgttcgcattaattgtcaggaagagttccttgcaaagcttaaaggtgttgaagaacccgaagaaaagcgccacatcatcggcacagaattttataaggtgttctggaacaaaatccgtgaaagctacggcgagggttactttgcacagggtacaatttatcccgaccgtatcgaaagcggtaaaggcgatgccgcaaaaatcaaaacacatcacaatcaggttggtatcccggaagatattgactttgcaggtgtaattgaaccgcttaaagaccttttcaaggatgaggtaagagtagtaggtgagaagcttggacttccgcatgacctcgtatggcgtcagccgttcccgggtccgggactcggtgtgcgagtaatcggagaagttacagccgaaaaggttcgtattcttcaggaagccgatgcaattcttcgtgatgaaatggataagtgcggttacgcagataaaatgagccagttcttcgcagtcctcccgggtgttaaaaccgtaggcgttatgggtgacgcaagaacatatgacgaactcatcgctctccgtgccgttacaaccgatgattttatgacagccgactgggcaaaaatcccctacgaaatcctaggcagagtctccaaccgcatcatcaacgaagttgaacatgtcaacagagtagtctatgatataacaagtaaaccccccggaacagtagagtgggaataatatcaagtgttattgtgcaacacccattatcctgtaatgtgtaaattttaatatccttgagcgaccttgaagagcaatcttttaggtcgttttttctatgcccaaaagtccagtgtttatcggacttttggcaataaaactatggttttattcggagtgtaaaaaaacagatatgagataacaaaaattaccccaaagagagtagagaaatttgcacaataacaagactaaaatgccgaaagcctgtatttatgcgggtttccggcatttatttaaacagttgcaggaggctttgctatacaaatatttatattttgatacctaaaccgtaggtgacttaaaaaacgccgctaatttctgcgccgtttttatcatatactgaacctccaatatgtacagcgtcttttgcaagacctgcatatccatgcataatgacagatacgctgttaaaggaaaaatctgtgaataaattttgtctgttaatgctgacagatttatgatacaatagtgctgttagtttgaattgaaaagtgggtagaagtataaagaatggggaaactgaattttacaaaagcacttaaaaacgcattaccgtattattaacgcttatacttgtcggtataatgacttttgttgcggaaatattgggtgagggggagataatctttcctgaaataacggcacttgcaattggttatatggttacacaaaagcaaggttggaaagtaaatgacagacgaatgattgcgttaattgcgatttgcgctgttgcgggtgtgctgacagtccgatacataaaagtcgggctttatcttgaaatattgattgcatttgtatttgcacaaattctctttatgctttcgggaacaacatttgcaccgatgatttcggcaattgtgttgcccgttatgatgcagaccgagagctttatatacccgattgccgcatttttgctgacaattgcggttgtattattccgtagatttcttttgaaagttaaaataagagataaagaggattttcagtcggtaaacctgcatgcaaagagcgatgtgattgacacagccgtaagaacaatctgtgttgccgttgtgggattcttcgcaatttggtcgggctttaaatttgcaattgcaccgccgttgcttgtggcgtttacggaattttcccgtccgaaaaataaggctcgcaacaagccggtaaagacggttttgctgataacagtctgtgcatttgtcggagcggtttcaagatatgtgctgaatatgactctcggattgccgttgacagttgccgtattaacagccacggcgataatgcttgtaattgtttactgcacaaaaatgtatattccgcctgccggagcattgacaattttgagtatgattattccgagtgaaagcgtacttttgtacccgttgcagatacttgtcggaactgcggtaataatgctgatttcacggcttttgtttatgaaacggcaaaattaaaataatcttaatttagttatattattctatagaggaaattaaatggatatatttattacaattttagttacattttttgcaggaatgggcgcaggtctcggaacaggttttgcaggaatgagtgcggcggctgtaataagtccgatgctcataacttttcttaatatggatccgtatatggcagtcggaatcgcactttcgtccgatgttctggcgagtgcagtttcggcttatacataccataaaaataaaaatctcgatgtcagaaacggtttgattatgatggcgagtgtgcttgcgtttacgattgttggcagttatgttgcaagcattgttccatcagctacaatgggcggattttccgtgtttatgacatttttgctcggcataaaatttatcatccgtcccgttatgacaactaaagaagctatgctcggtgtgtcggcaaaaaagagggcaatccagtctgtaatctgcggaatgttaatcggctttatctgcggatttataggtgcgggcggaggaatgatgatgcttttgattttgacgaccgtgctgaattatgaattgaaaaccgctgtcggcacaagcgtattcattatgacattcaccgccctgacaggcgcagcttcgcactttatgattggtggcacacccgattggtttgtgttcattctctgcatagcgttcacccttatatgggcgagaattgccgccgtctttgcaaacaaagctaagcccaaaaccctgaaccgtgcaacaggcattgtcctcgtggtgttaggtgttgttattatgggatttaagcttttagcaaaataaaaattgacagtttaaaattcaggtcggacaatagatttgtaaaatacaaaatttctgttgcccgatttttcaacggttatgttggggctaatcgagtagggcgaaacgagtgcacgctttgaacaatattcagggaagtatgcttttttaacaattgcattattatttcacaaaaaacaaaggagctgcgaagaacgaagtcttaaacttcatttcttcacagctccttaaattttcgtgtcagatgtgctgtactcagcttattcccataagctccataacttcaataagttgttttgcagcgttatcggaggtcacaaccttgctttctgttatgacacgaccgaccgatttgcctttatgaataaatcctgaaaccattttgtccatccgatgactgccgacaaggagtcggaaggcatatcttcaaagaacttttcaaaatccttcatcgctctgccctttccgacccataagatatctctctgctccaaatctatcacgcaggttgcgtaactcagttagggggcagactgcttttaaaactatagcttttgagtaggggtgcaaaatgaatttttagttattataattcattaacggaattatatccttccgacttaatctatcatttgtggagttataattataatttattatagcatacaatcgtttgataacgataataattataaacttttaggttttgcacatgagttgcgaacttttattggacaaggcagatagacacgcataggagaataataatcggtgcttttaggtttcatcagattcaaaataaatctaatgccgtaaatgcccattgcatatacaggtgcgttcaccgtagtgagcggagggtttgtatatcccgaaagctccgtgttatcgaatcccataacagaaatatcctcaggaattttgtaaccgttttcttgcagagctctcattgcaccgattgcaatatgatcacttgccgcaaaaatagctgtggggagattccctttgctgatcatttctgacatcattttataaccagatgatgttgaaaatttgtcctgtataataaacccatcatatttaatgtttagttcatcgcaaatgtctgtgaaagtgttgagtcgtttatcaggaaatatcgttccgtcctcaagctgttcaatgcctccgataaagccaactgttctatggcctaaatcatatagatatttaattgcatcggacactgcctgacgaaagtcgagcgatacggatgtgatttcaatattctcaacggtcatatcaagaaaaacaattttattattcaaagaatgcagtaattttatttcttgtttactaaactttccgaggcagattatgccatcaacatcagaaagtacattctgatagtcattgtctgttttaaatgttcgtacaatacttatattattttttgaacagtagtcctcgataccctgtctcatcaaaaagtaataattatcttcaatttcctgtttggaagagaaccattgtagaattccaatgcgacatgaaggtgctgatgtaaccctttttttctttacataattaagttctttagctgctgcaaatattttttgctttgtttcaagcgaggtgctgagggtagtgtcgttattaagcactcttgaaacagtagctactgatacatttgcctttttggcaacatctctgattgtagccaattgaatcacctcactaccattatagtgaaatattactaaaaaatcaagttgtgtttagtgaaaaacagagaaagcaaaaatgtttaccaaaaactattgacagtttacgaaacaaaacatataatttacttaacacaaaaacaaaagaaacattattattaaataataacgaaatcttttgtgcaggttgtcacggcgtttcatttaaaattaaaaggaggaataattatgaaacagacatcatcacaaccaagacttgatggcaaaatcccgggtagaatcaaatacacctttgctttaggtgccctcggcaaagatatgatttatggtatgattgccacattttcaatgatttatttcacagacatcatcaaggttaacccggtatttatcggcgtaatgttctttgttgcaaagttatgggatgcctttaatgatttgtttatgggtatgattgttgataacacacgcagcagatggggtaaatttattccatggcttgtaataggtactctggttaattcaattgtatttgttgttttattcacagacttccacctcgatggcgttggactttgcgtatttgcaacagcagcttacatactctggggtatgacttacacaattatggatattccttattggtcaattattcctaacctcacttcaaatcctgaggagagagaaaaagtttcggtacttccgagaatctttgcaagtatcggacagtcacttgttattgcaggctttggtgttcaaattattgaggctctcagcggcggcacaacaaatcaggcaggttatcacagatttgcaatcataattgcaattgtatttattcttacaatcggtattacagtaatcaatcttccgaaaaagagagatgattctgttccggaaaagaaagttaagtttaaagatattttttcaatcatcggcaagaatgatcaacttcgttgggcggtaactcttatcttcctttacaacatcggcattcagtgcattatgggtgttgctacatattatttcaaatatgtttgtggcaacgcaggaatgatgtcatcatttatgatcagcgcatcaatctcagaggttgtaggtcttatcgtatttcctaaggttacaaaatttctttcaagaaaaacttcgttccttcttgcgtgtcttttacctgcatttggtcttgtaatgcttttgttcgtaggtatttttgctccgcacaatgttgtgctcacatcaatctcaggtgttattgtaaaacttggtacaggtcttgaacttggttgtgcaacagtattccttgcagatgttgttgattacggtgaatttaagcttggaacaagaaatgaaggcgttgtattctcactccagacgcttatcgtaaaatttacagcagctcttacagcactcggtattggtgcggcacttggaagcacacagtatattccgggtcaggaacagtcatttgcaacagtagcatcaatcagtacacttatgtgcattgttcctgcggtttgtatgcttattgcttatgttgtttacagaaagaaatataaactcaatgacggtatgatgaagaaggttataaacacaatcagtgcaagaagagaaggcaagattgatatgacacaacagcttgatgaaatcggtaacacagagccttctatgttccttcctacagttgcggaaaaggcaggtaaataaaatgattgatactaaaacagcaattgaaaaaattacaaacggcgaatttgataatcttttcactgatatatatatagattcatcaatgattgattatcagaaaaaaagatatgttcatgcaattgagcagtatgaaacaattttttgccctgataaagtagcaatattcagtgctcctggcagaagtgaggtttgcggtaatcatacagatcaccagcacggaatggtgcttgcaacatcaattaatcttgatactattgctgtgtcggccaagaataacaatgatgttgtaagatttgtttctgacggttatgatatgattactctcgatataaatgaccttgaagttaataatgatgaggcaggcacaacggtcagcctcatcagaggtgttcttcgtggacttaaggatcatggatacaaaattggtggattcaatgcttatgcaacaagtgatgtacttgttggtgcaggactttcatcgtcagcagcttttgaggtagttgtcggaactattatttccggtttatataatgatatgaaaataaattcagttgagattgctcagatttctcagtatgctgaaaatgtatttttcaaaaagccgtgcggacttatggatcaaatggcttgttcagtcggaggaatggttaacattgactttaaagatccgacaaagccaattgttaagaaagtacctaccgaatttgaaaaatacgattacagtctttgtattgttgacacaaagggtgatcatgttgatcttacagatgattatgctatgattccatcggaaatgaaaaaggttgcaaattttctcggagaagattatctgagagattgtgattcaaacgaattttatattcgccttgacgaaattcgtgaggctgttggcgacagaccggtacttcgtgcaattcatttctttaatgaggagcataacgttaaaaatgccgtttcgtcacttgaaaacggtaagtttgttgaattccttgacgcaatcagaaaatccggtaattcatcgtttaagtatcttcagaatgtatatacaacaagagatattcaacatcagaacatctcggtagcccttgcactcagtgaaagccttcttcgcaattacggcgtgtgccgtgttcacggcggtggatttgcaggtacaattcaggcgtttgtcaaaaatgattttgtaagtaattacaaagaatttataaataaaattttcggagaaaactcatgccatgttctcaaagtgagaaaatacggcggaataaaagtaatgtaattatgtaggttttgtttttattaaggaggacaaaatgaaaattcttgttttaggcggtgccggatatatcggttcgcatacagtttacagacttattgaaagcggtaatgaggttgttgtattcgataaccttgaaacaggtcatatcgaggcggttcatcccaaagcaaaattttataaaggtgatctcagaaacagaagtgaaattgacagcgtttttgataaagaaaaaggtattgatgctgtaattcattttgcagccaattcacttgtcggtgaaagtatgaccaaccctctcaaatattatgataataacctcaacggcacaaaggttttgcttcagtcaatggttgctcacggaattgataagattgtattttcatcaacagcggcaacatacggtgagcctgagagaactcctattcttgaaaccgatccgacaaatccgacaaactgctacggagaaacaaaaaaatccatggagagaatgttctattgggttgaaaaagcacatggtttaagatatgtttctctcagatatttcaatgcatgcggagcacatatcagcggaaaaatcggtgaggcacataatcctgaaacccaccttattccgattattcttcaagcggcacagggtacccgtgaccacataagtatttttggtactgattatcccacatctgacggaacttgtattcgtgattatatccatgtcactgaccttgcacaggctcatattcttgcagttgaatatcttatgaagggcggtaaaagtgatatattcaatctcggcaacggtgtaggtttttctgttcgtgaggtaattgaaaaagcaaaagaggttacacagaaagatattaaggttgttgaagaaagcagaagaagcggcgatcctgctgtattgattgcatcaagcgataaggcgaaaactgtacttggctggaaacctgagtatgatgatctgggaacaattattaaaacagcgtggaaatggcattcaacacatcccaacggttatagtaagtgaggcggtatttatgaagaacagcgtttacggcttaatattaagacttgtttcatacggaatcaatacagggcttattgaaaaagaggatataatctacacgcaaaataggcttttatcgttgttccatatggatgaaccagatgacagttgtacttgccttacagcagataacgaggatactcttgaagaaattttgtcgggacttcttgattatgcatacgaaaaaggaatcattcccgaaaatacagtaacatatcgcgacttatttgatgtgaaacttatggcttcacttgttaagcgaccgtcagaagtaataagagaattttggcagaattatagctgttctcctaaacttgcaaccgatagctactataaattcagctgcgataccgattatataagaagatatcgtataaaaaaagacttaaagtggaaaacatcaaccgaatacggtgatattgatatcactgtaaatctttcaaagcctgaaaaagatccgaaagctattgcagcggcaaaacttcaaaaacagtcgggctatccgaaatgtttgctttgtaaggaaaatgaaggatatgccggaagagtaaatcatcctgcaagagataatcacagaattattccgctcaccattgacggagataactggtttatgcaatattctccgtatgtttattacaatgaacattgtattgtatttaacggtgagcatacaccaatggtaatcaatgattccacattcagaaaactgtttgattttatttcacagtttccgcattatataatcggttcgaatgctgatttgccgattgtaggcggttcaatacttacacatgaacattttcagggtggcagatacagctttgcacttaatagggcagaggttgaaagaaagtttattgttaacggctttaatgatgtggagtgcggaattgtaaagtggcctatgtcagttgtaagattgacaggtaaaaacaaggacagcattatttcattatcttctcatattctaaagagttggagagcgtacacggacgcagatgttggcatttttgccgaaacagacggtgaaattcacaacactatcactccgattgcttttacaaaggatggaaaatttgtaattgacctcgttctcagaaataatattacaagtgaagagcatcctctgggagtatttcatcctcatgcgaaattgcatcatattaaaaaagaaaatatcggccttattgaagttatgggacttgcagtattgccctcaaggcttaaagatgaaatggctattttaaaggatgctattcttaatcacaaggatgtaagtgaaattccgaaaatcagcaaacattccgagtgggtaaatgaatttgtttcgcagtatgatgaaatcaatgaaaataatattgattcaataattcaaaatgagataggaaaggtgtttcttaatgttcttttggatgcaggtgtattcaaaagaactcctgaaggacaaaaggcttttgataaatttataaagacgctgtagtaaaggaagtgctaaaatgtcaaaggtaagggtagtgaattttgaacctacatccaaaggtgaaaacactcatctttatataatagaaaataacagcggagcaagcgtgacattatgtgatttaggcgcaagtgtcgtttcgataaaagttcccgacaaaaacggtagtattagagatgtagttctcggttatgagcacattgacggttatgaatttgacggaacatacttcggtgctactgtcggaagatgttgcggaagaattgcttacggcaagtttactcttaacggagaagattatcagctacctgtaaacaatgggagtaaccatctacacggcggatttaacagctttagccgcaaagtgtggcttgcggtagttgatgataaagttccaaatacagttctatttatgcttgatagtcccgacggtgatgagggctatcccggaaatatgaaagtttttgtacgctacacttttgatgatgaaaatgtacttacgataaaatggtcggcagtttccgacaaagacacaatatgtaatctgaccaatcattcatatttcaatcttaacggacataaaagcggtaaagttacagaaaatcacaagctgaaaataaatgcaaattccttcataccgataaattcaaacctcaatcccacaggagagataactcccgttaagaatacatcgtttgattttaccgaacccaagttaattggaaatggtattgacagaaaaaacgagcagattggttttgcaaacggtattgatcatatgtttgtgctgaatcattctgatgaagaatttgtgcttgcggccgaagctgagggtattgatagcggaatcacattaaaatgctatacttctcagaaaggtgttcatgtatatacagcaaattatgtcgatgttttgtccaatatgggaaaggattcagcaacatacggagaaaacccagcgttttgtcttgaaacccaaggctttcccgatgctgtaaatcacaagaattttcctacgacaatattaaaagcaaacgaaaactatacacaaactacgaagtatatttttggtataaacaaataaaataagctgatttctaactcctttaaaaataaaatctctctaaaatcaaggaccgcctattttttcttgggtggtccttgatttttaaatctatgaggatgtttcatgttttacagtattacaccgtcttaaacatattctgttttagcggttatgtgcaattctgcctgaaaatcaccctgttctgtttgcaccgtaaaaccggaacattcctcttgcacggctgtttttacaaactgcatttttcaaatgcaaaaataaaattattgattctgtattgtctaaaaatcctttgttgtatactgataaggcagataagaaaaatcacggcaagggaatttctatagtaaaaagtattgcccagaagtatgggggagatgtagttatttcggagaagaataatgaatttatagtttcggtaattttagacaaccgaatttttacctaaaaacccactatttttacctgattaaaatcaaatattctaaaaaatgctattcttctttaaggcgttatgccaagaaaaaggatagcatttttgttttgtattgaattttatgttttagccgtatttgcgttaattccgttattatactttggccttgtgttgcaggaatttgaaacttttattatcaaaaaatttaaataaggtttaaagctaataaggtttgaagctgcttccgtaaataagaattatagagtacaatttttgtcgatttttttacattttttgcacaattgaagtttacagtgctgttttgagatatgatttaacaaagtaaaagggaaaagcaagccgtaatatttaatataaatcaaaaattaaggagagttgaattttgaaaaaggatagaaatttgcgtagcgttaatactgacggaggggtgaatttgcaattcaaacttttgtcggcaatcggaattataattatcgtgtccggacattgttatcatggcggaatggaacttgcttataactggtttccgccgtattcgtataatttggcactgtttgtatttatatcgggatatttttacaaaaccgattatgaagaaaatgtcggaaaatacatatggaaacgaacaaagcggcttcttattcctgcgtatctgtggaatatattttacggtggtatggttgcatttctcggtttgtttggatttactataggtgcaaagcctgatttatacaatctttttgttatgccgtttgttgacggtgaggcttttcaatataacctcggttcatggtttgtgtacccgctgtttttggtttgcataataaatgtgctgttcagaaaatttttgaaactgattcaccttgacaatgaatttatagttttgatagtgtatctcgcaatcggaatgataggaattaacactgcaatagaaaatccgactgcaattaacggtatagtgaaacttcttgtcagaacaatgttttttctgccgtgttatgaattcggtcgcttttataaagctgtgcttgaaaagaaagacactctcaataatgttgcgtactttgcaattatatttgctgtacagctgatacttttaactttttgcaaagatttggagtacactccgtcgtcatttactaaattcaacaacggttttataattccgtatatctcgtcaatcacagcaattgcattttggctgagagtttcaagattacttgtacctgccataggaaacagcaaacttgtaaggcttatagctgacaacacatacggaattatggtaaatcagcttgtaggctttatgtgcctaaaatttgtattctacggattaagccggattacttcaggctcattgtttggtgactttaatgttgaatcatttaaatcaagtatatggtactactatcttccaaacggtttgcaacagtgggcttttgtatatcttatatttggtctgtttgtaccgatattaattagcattattttaaataaaatctgtcatattgcacacagttctatttttaaaaaagtatagttattttgagaataacggggatgcagattaatgagaaaataatttcaatatttttattaaattgtaaattcataatgaaatacagatacaaaaatcttccataggtaagcccacccataagtcactgaaattgtaccaaaacaatagatattatgttgtatttgctttttgtttgtgatacaatttaaagcgaaaatagcaacagccttaatgatgttgcaagaatgatcgacctttcgggtacagaagttgcgagctatgtctatgacgcttggggaaatataaaagacacccgaggcgagccgacaattcgtgaattaaatccgattcgctatcgtagctatgtttatgataccgaaacttcactctattatctccaatcccgttattatgatccttttgtaggaagatttttgaatgcggacgcttattgtgatacaatgtcaagttctcctttaagcaccaatatgttcgcttattgtgagaatgattctattaattacgctgactatgatggatttaggataactgtaaatgtaaagcgaaccaataacagctatgatttaaaagtcaaattaccatggagtgacatttccaattattttaattatcttagtatagcttatggaatagttggacttgttgcatgtttcattcctgaacccgcagtttctaaggctttaggtattgctgcaggaataacttcattggtttcagctattgcatcaacattgatttctaattacaaaaaaataaaagtataaattttaaaatgtcatttaattatcagaaagttaaaaagactgcgtatttctatattattaatacatggtggttaaaagtaagaataagattcacagccaagtcaatacgaatatacaacttgaaatggagtgttacacattgaagcctatgtcaatatttttagaaattttgtttttatttggcttaataatatatatagtatatgtttttgtaattaaaaaagactactctgtatcaaggattattatctttgcaatcttattgttgtcttttgtaattaatgtaattaatatgttatacttgttttttcaataacatttttgcaagattttattcaaaataattttaaaaaatttaataaaaaactacctaacggtggtggtcggcaaggtcctggtggatggaagatagcaataaatgttgcgaaacatgccggtagtgatttgaaattattggataaaacgggcaaaagaatagccaccttatgggaagatggtagtgtaaggggaaaataagatgaatacatcagaaatattaaaagaaatgaatattaccttttatgatgaaaaagatagtttatttgatttctttttaaaacataagggaactaaagtattggatatatttccaaaaacaataaatgacaatgaaaaatattgaacagttgaggtgttttatcaaaaagttttagatcattgtatgaaaaagcaggagtttgaaaacatagaaaatcgtttttcatattttgttaagattttatggctttataatgaaacctatgttaatattctttctcctgaaatttttaataattattattataaacgcaacaagaagattttaaaaaagaatagtatagtgaacttaaagtctattgccggtactgatgaatttttgttgatcaaagataaagatgttttaggttcagcctgtattattgcaactcgtgatatttctccggttgttttttatttcagaaattctaaaatcctgtttttattaaatggatgcacaggactactttattatggctttccaaaagatatcttatttaccaaacgagtggcaaataattgctcattgtatttgcataaagcagaggcaaataaatagaagaatagcaatacttaattaattgaaaaactattattatttctattaataaggtaaacatttttgcaactttcaataaggttgggtagaacatttgcgttaaggaggctcgaaagagtttccttactggttgatggaattgaatggaacggaaaaacaggaagagaacatataaaatcttggtattaaaaggtagcatagatgattatgaatattgatattaaaacatatagctatagcaaaattaaaacatttgtgaatctcagatatttatcaatgcgaatttctgacttaatatttaaaatgttaagctattttgcatacaactttttaatggtattaattataacctttcagatatttatgatgcaagttaacccatttgaaggtttctcggtttttgatgatcgtgtagtaccatttcttattactgcaggaattttgtcttgcattgtgtcaattgtaaccgtatttatctatcactataaaactaaatggagtgtgatactaaacaggggagtgacattcttttatgtttcaattaccatgcttttactttcatgttttattgagtttaagattacggcatttaatgtgatatatgttatatttaagattgcaatatatgttctttgttattttatatatgtaaagtatttgtttgagaaaaagttgccaaaaattgaggagatagttcacaatggaagatcgtttcctgcaggaatgatagcagttgctcttaccatcgctataaaacctgttataagcctcttaggtcaaaatggtgttataagttttgtgatatttaatgatttgattgcactaactgaatatattggtgctgtctgcttaatcattaatataatagacgctttagttaaggcatattatgcaaaaatatataacatcaattaacttactaagacactttttacaataaggtagggtagaacatttgcggtaaggaggctcgaaagagcctccttttttttgcctaaaattcctgtaaacccattttcgtgttgcaagaatgactgatgaggacggtagaatagagagggggagagatgttgaaaatataataaaaacttaggtgcaaatacacttaagtttcaagtaagtgcttgatattttgcaaaaatggtggtatactatacttgaaagtcaggggaaaatacccgtaagttttaagtgagtggaggactacaatgcagaacattattaagcgtgacgaatatcttaacagaattattgacagaaaagaaaacggactgattaaggtaattaccggaatcagaagatgcggtaagagttttctgctgttcaatctgttttacgattatctgattgaaagcggtgtaaaagaagaacagatcattacgattgccttggatgatgatacctttgtaaagtaccgtgatcccgatgaattgtcgaaatatattcgtgggaaaatcgtgaactcagatatgtactatattctcattgatgaggtgcagtacgcaatcacaaaggatgaacttaaaaaccctgagaacattaagctttacaatgtactcaacggtcttatgcggcttcgcaatgttgacatttatgtaacaggcagtaattcaaaaatgctcacgaaagatgtactgactgcctttcgtggcagaggtgatgaggttagagtttatcctatctctttcaaagagtattattcttttgtgggcggagataaatccgacgcctatgaggaatacgctttatatggcggtatgccgcttgttttaacaaaaaagagcgatgcggagaagatgaactatttgcacactcttttcacagaggtttatttcaaagacattgtggagcgttatgatattgagttgcctgatgtgctcagcgaattaacggatgacctttgttcttctgtgggttcgcttaccaatgcaagcaaaatatcaaataccttgcagacggtgaaaaatattaaggtttcaggtacaaccgtttccaactatctgaattatctaattgaatcgtttctgttcatcaatgcgaaacgatacgatgtaaaaggcaagaagtattttgaatatccatcaaagtattattgtgccgacatcggacttcgcaacgcaagacttaatttcaggcagcaggaagaaacgcacataatggagaatattatatacaatgaacttctgtgtcgagagtattccgttgatgtcggtgttgtagaaatcgtggaaacgagtgtaggaaagaggtcaaaaaaacagtgcgagatagattttgtagtaaacaagggttctaaaaaatactatattcaatccgcactaaatgtttcggacccgtcaaaacttgaaaccgaactcagacctttgaagaatacaaaggatttctttaaaaagattattatcagcaaaacttcaatgaagtcttggacggacgaggacggaatacttcatcttggactttatgagttcttgctgaatgtaaattccctcgaattgtaaactaaataggctcaatgtcaatagttacggaaagccgaaaaataagaatgtatgaaatttataagcaacagaaattgtaaaagagcaagtgatacacaactaagaacaaggcacagcttacggaaaaatccgttcagctgtgcctttgattgtgtttgtgaagttgtaatgctgtttttattacggctttgacaagaaaagtgtgcaagctattttttaacttacacactttattttacaagctcactgcaaaacttttaaatttgcaatttctttccgattcttaattccatcaattagatctcatcttgctgatatcagtattattaggtattggaatttctcattatataatgcatttcattagtcaaggaattatatgattcgattactgcgttatctccgaatttcaaacacaatgtttgaggtgaaggtcatatcatcctcattgaatttcatatttatttcaccgtcatattttttaactactcttttaatgcttttcagtcccgttccatgtattgcgtcagatttttttgatgatgctatgcggttgttcttgacggctacaatattcttgaccgaatttgtaagctgtattgacagatacttatttttgcggacgaaagccgaaaaatctataaatccgttctttgtattttgtgccgcttcaactgcgttttcaagaagattgtcaagcagagcagttatgtcgggttcgctcataaagctaaaatcagcacttctgatgtcaatattcatcttcactccgaacttgtcacagaaggatttgtacctgttaacgattgaattgaccataggattgttgcagtaatcaacagatctatttatgctgaagtcttcaataaaatcgtctatgtactctgtaacagccttgtctttggcaatgctcttaatggcgtttaaatgccgttttatgtcgtgcataacaatttttgagttttcattttgctcattaagtaaatcataatactcagctgtagatttttccttttgcctttcatattccaatttcatattgtgtctttgagttttcaaagtaaattcatatacccaaaaaaccgctatatttgagaaaagtaatagcaccatacttattattaataaatatatgtatttttgttctaaatcaaaattgtgtagcgcatgtgatactgcatacagtagcagaatacttgaggcaggtaaaaccaagagaggtatagaaagagaataactttctgatttatgttcttttattgagaattttgatacaaagtaaattatcaaaaaatataacagtttactgatagtcgcttgaataatgagacttaaagaattatccatggaagtgaaaaaatccgtaccgaataatactgttgaaacaaacaagacaatactttctgtgattgccataaatataagtaatatgctacagtggaaaatacaggatttaatacttatgaaataacaaaaataaagtaaaaagaagttacacgcaaaaaatgcaattaaattaaccaatgttaaattcaataatcgagataaatacaataatacatacacaataacaactgaaaataacaaaaattttttgcttgattttctttcaaatttgttttcaaaataaaacagtgatatcagaatttctgcaagaaaaacaaacgcatagcaaattgtatataccatttttatacccctatgtatgcaaaatatgcctttttaaagtttgaatagttcctttgagatataggtagagtttcactttttaaatctacattaatattaagctcagtcttattaaaatccgagacatacctcagattaacaagataactgtaatgtggttgtgcaaaataatcgtaatcctttagtttttctttccaataacttaattttttatttgtataatacttcttctgacatgttataataacagcctttctttcttcaatagttatatatactatatcacttgtgaaaacagagtaacactcgtcataatattcaagagttattatttgagtattggaatgaaaataattaatagccgtatttagcgctctgaaaaaacggttattgtcaataggctttgacagatagcgaaacacatccaaatccatagcgtcatcaagataagcgtcatgcgaggttataataaaaataattatattagagtttaccttttttaattgtgcggacaaagtcagaccatttaccagaggcatttcaatatcaatgaacgccatatcataactgatattactattcagcagctctacaccattgtaaaacaaatcaatatcaaaaactattctatgtttatctgaaaatgtattcagattgttttttatttcatcgacaatacatttatcatcgtcacaaattaatactttcaaaagaaaaacctccttgaaataatgtatcaattataacatatatttcaaagaatgtcataaaatatcatttattaaatgtaaaattttaaattttgtatcaatgcatcaataatttaaaaacacatcactttggacgaattcgacatcgtttttgcagaaattatgtttaatttttaaatatgtgctaaaatttctacaaaaggaggagcattattatgaagaaaataaaaaaccttattcgcaaaatttcacctgcaattatcgcttgctttacattagcactctcaataaatgctaattcatctacttgtttttttatgtatcagcctaaggtacctgcaaagcttgacaaatttaaaaagataaagtaatggaaaaattcagctcaaaatttgtggagttttttgtatccaacaatcttataaaaaacgaagataaagagatttacgaatatgcttttaatattattttatcatcgttaatacatattgcaaccgttatgataataggtttatgctttaatttatttattgaaagtttagcattctatttttcttttatcgctatccgtaagtttgcgggcggctatcatgctaaaactgccacaagatgttatttgttttcatcgttaataaacattatagttctatttttaataaaactattttgttatgtgagtatatactttttgatgatactaatcgttattgaaatactatgtgtaattctgatttcgcatatagcaccacttgattctgataataatttactaaacggtaaggaaaagaaattctatggtaaaatatcatgttctatatctaccgctttactttgtatttctatagttacaattaatttgaattatataaaaataggtatttcaattatgtttggagtttttatgagtgctgcagtcttattagctaaatatgttcagaatgtttttcatagataataaagatgatgaacatgtatttcaatatcagaaggttaacctaagttttacagaaaagagttgagtccaatggaattaatttgtttaaaaaatcaaaattgtaatcaaaaacaaaaaggagtatatgaaatgaaatctaaaatgaaaaaaacagtagcaattatcgcaactgttgcggcagttttgtcatttgcagctataactgtaagtgcaaaaacatacacttggacgcatactgtgtctgttgcaagcatacctggttctaccgatagtataacagcttcgatgggtggaaaaggaagaatgtctgatacattttcaagttacccaactatctttgatggttacaaagtatccaataacaaagcaagagccgtcaatgatagtaccggtgttagttatggatggaaatcttttaccttaaatagtaatggtggacctgttacggtaacatatggttcgtctcttgttaagggatcttattatgtacagtatcaaaatgtgagtaaaggtggctttagatcttcatctgttttttcaaaaacctattaaagaactaatcaagtatgctgtggtagtattgccacagcataccgttattaaggcattgtggtggaatagatggaactttttaaactaagttttttatcgaaagcatatattaaaggaaataaaaactgcaagacaattaaaatcgtaacttgtatattatttgtggcgattactgtaatatcaagctttgcaacagtgactgtaaacgctatgaaggagagcaaagaagattacaaatcaagagcactttttctttctccgtggataaagccgcttacagatgatattatcaaaaaaatgtcatcaatagaacacattgaatatattgatgattgcacagctttatacggtataaattcctatgacatagctgacacggatgacaacgattttaaatcggaatttataaatcataaattcacttccgtggatattgccggactgtatgagcacgaagaaaagagcgtaattgcaggggaaagccttgactctgcgccgatatacagttgtattgttccaagcatattttatccatttgaggataatgatggcaatatgcattacaacaatcttgattacatagatggtacaaaactcataggcaagaccattacggtcaaaggttgtgaagataaaatatgtgtttcttataatatagctgatgaaaacaatcaaatttcaggcactgaggcttatctgtcatcacctgaatttaaacttaatattgttggaacatattattgttctcgtgccaattcaggctcgttcagaaatatatttgtttcaagagatacaatatttgctataacgaaggatgcttttaaaaagtcaaaaatagatattaatgacaacgacaacgatatagcaaaatggtggaacaccccctctttacacagctatatggtggttgcagatgattatgacaacatttccacagtgtttaaagaagtgtcgggaatgggatgtgatatagccaattctccggaatggttgatgagtgacagcacaatattacttgcaaatttgttcggtaagattggtatgttttttatagttgctatttttgttattgctgtaatcataatgatacagtcagctgttacagaaacaaagagaagaaaagaatttatcggtcttttaaaagctatgggatataaaaacaaacagatttttgcctgcctaagtcttgaacaattttatataatcttaacttcatttgtgattggaaatgtaatctctactgctattgtagcaactacaaattatatctttatgcatggctcatatgcacagatggtttatgtaattgattggaatatattttttgtatttatggctattgctttggtaatatcgattttgataccaattatttgtttggtagtaatgttgtgtatgcttaataaaattcagcctagagaagcaatgaactgaaagaggtgacattatgagagctattgaacttaaaaatgtatcaaagatttataaaaacggtgttaaagctcttgccggtgtatctcttacagttaaacaaggtgaatttattgcagttatgggacaatcaggcagtggcaaaagtaccttgctgcaaatagcaggactgcttgatgattgcacatcgggacaaataattataaatggaaatgatgtgtcaagacttaacaaaaatgtgcttgccgatataagaatgaaatccttgggttttgtgtttcagtcatttcatctcgatacacatctcaaggcatatgaaaacattatggtaccaatgctgataaatgctgaatacaaaaataaatctgcaatgaaggaaagagcaatacagcttgccgaaactgtgggtttgacaaaccgtatcgaacattatccgggtgagctttcaggcggtgagcagcagagggtggctatagccagagctttagctaataatcctgattttattcttgcagatgagcctacgggtaatcttgacagcaaaaatgaaattatcatatttgaggaacttaaacggctttcaatatcaggcaagggagtgcttgttgtgagtcacaacgatgctgttaaagattatgcggacagagtattaactatgaaggacggaatattggagcatacagatgaaaaataagaacctcaatatgcctttaaaaacatccatattttcaaatagtttttatttgtgatttactgtacttttgctgtgatttcaactgttcttattctcgttaccataagcattatattacctttaagttcgaacacaagcggtaagatcggcaaccatgtttcaaatagaaaagcaattattgaaaaagtaaaagaggaaaccgtaactacggtacttgtgaatgaaaactggttttcggattataagactgaaattaacggcgaaaatatttcgtccaataacatagataacagagataaggttgcaataatcggaagttctcttgctctcaaactgttttttacaacagatgcagtcggtaaaaagatttgcattgacggaaatcaatatacaatttgcggtgtgatatgcgaaaacgaaagtttaataaataagttttctgctgatgacaaacagagagtgtatgttccatatacaacatccgaaaattatggtgacagaacggttgatatgattgtttacgataactcggtatatacgggagcaattgttgagcaaatggatttgccgcagtattattcggttaatctgaatgggaaaaatcaaacgctctcgtcatttgaacatattatataccttgcaatatttatcggatttagcattattgcattgaagttgtggtataggttcagtagaaaattttttgaggagataaaagaaaatctcaaattaaactactttctgaaatcgctaaaaagtattccgctaaaatatgttgcacttgtgcttgtttttgcaggaatacctgccgtgcttttgattgtatttaatatttgtgatttcagcatttttatcccctcaaaatatataccgaatgataacattttcgacatttcaaattacctgaatgtgcttgtcgataatgcacaaacactaaactcacaaagcctaacaggaaatcaaatgcttgtaaatctgttctcaagaacatttacagcgtcactgtggctgacaataatatttttgattagtattataaccgtgcttttaaatttgacagaattaaaacttcataaacataaaaacaccgacaagcagtaa

SEQ ID NO: 167 - DNA, 6231 bp, unidentified
  source 1..6231: mol_type = unassigned DNA
atgggaaccgttttcaataaaaaggagcttttggtcctcttgcaggattttcactgccttacggggctgcgctccgccgtttttgattcgtatggaatcgaagtgcttgcctatccgccggaactgccagcttattgccgcttgatccgcagtgtgcctgatggcaagaccggctgttacctgtgtgaccaggcggcttgccgcaaggcaacgcggcaaaagcagacgatcatctacccctgccatgcggggttgatcgaagtgatcacgccggtccaaatcgatggtgctgttgtgggctttttgctgttgagccacattgtacagggggccgatgagcagagcgagtggagctatgcgcaaaaatgctgctcggcttacgcaattgataaagcggcactgcaaaaagcctataatgccttgccgcgcacgccctatccggtgctgaaatcagcagcggatctgctggctttggcggcggctgcattgtaccaaaagggactgacgcggctggcagcgggcagtgcgcaggaaaaactgagccgctacctggcgaaacatctggatgagacattgacaaacgaaacgatctgccgtgatctttcgttaagccgtaccgggctgtactatctttcccggcagctctatggctgcggcatcaacgagcagatcacgcacctgcgcatccaaaaagcgatgaagcttctttgcgatacgaatctgtccaatgcacagatctgccagcagatcggattcctggatgacaattacttttatcgtgttttccgtaaacaaaccggtctgacaccacgccagtaccgtgattctatcttagcagatacagcaaagactgagtagagacgattgttttcaatactggattattgttcaaacaattctgatggaagcggcaatgttgaattgtggccggtgacgtgctataataaacctacatacggtaagccggcacggcgcaattttgaccgctgccttacggaaaattcgcagctgcggagtataaactgttatgaaaaaatataagatcgcggtggccgggaccggctatgtggggctttcgattgccacgctgctttcccagcaccatcatgtgacggcggtggatatcctgccggaaaaggtcgcattgatcaacgcgcgcaaatcgccgatccgggatgattacatcgagaaatatctggctgagaaggagctggatctgaccgctacgctggacgcaaaggcagcctacgccgatgcggactttgttgtcattgctgcacccaccaactacgacagccagacccagcactttgacaccgctgcagtggaggcagtcatccgccttgtcacggaggtcaatccaaatgccgtcatggtcatcaaatcgacgattcccgtgggctacacggtgtcggtgcgggaaaggctcggcagccggaacatcctgttcagcccggaatttctgcgagagtccaaggccctgtatgacaacctctacccgtcccgcatcatcgtcggcaccgacccggaggatgcgcaccttgtcgcagccgcccacgaatttgcggcactgctgcaggaaggtgccatcaaggagaacattgatacgctcttcatgggctttaccgaggccgaggccgtcaagctgttcgccaacacctatctggcgctgcgcgttgcctatttcaatgagctggatacctacgcggagagcaagggcctgaacacgaagcaaatcattgacggcgtatgtcttgacccgcgcatcggcagccattacaataaccccagcttcggttacggcggctactgcctgcccaaggacacgaagcagctgctggcaaactacgccgatgtgccggaaaatctcattgaggccattgtggagtccaaccgcacccgcaaggacttcatcgctgaccgcgtgctgaagctggccgggtactacggctacgatcaggaaaatgagtttgacgaaagccgcgaaaggcccgtcacgatcggcgtctaccgcctgacaatgaagagcaacagcgacaacttccgccaaagctcgattcagggtgtcatgaagcgcatcaaggccaagggcgcacaggtcatcatctatgagcctacgctggaggacggcaagaccttcttcggttcggcagtggtcaacgatctggacaaattcaagcggcagagtcaggccattctggccaaccgctacgatgcctgcctcaacgatgtgcaggacaaggtctacacaagagatctattcggcagagactgaaacgcctttcttccgctttttgacagtggagtaaggctctccatgccattaccgcacaatatccctgtgacttttaaagagaggaacgcctgttatatgaaatatgattatctggtagtcggctccggtctgtacggtgccatcttcgcccatgaggccaaggcccacggcaaatccgtgctggtcgtggataagcgccccaacattgcgggcaacatttataccgagaacatcgagggtatcaacgtccataagtatggtgcgcacatcttccacaccaacaacaaaaaggtctggaactatatcacccggtttgccgagttcaaccgctttacaaactctcccgttgccaactataagggtgagctgtattcgctgcccttcaacatgtatacctttaataaaatgtggggcgtcgtcacaccggaggaggcagccgccaaaattgaggagcagcgccgtgagatcacccacgagccgcagaaccttgaggagcaggccatctcccttgtaggccgcgacatttatgaaaagctcatcaagggctacaccgaaaagcagtggggccgcgattgcaaggacctgccggcatttatcatcaagcgcctgcctgtgcggctgacctttgacaacaactatttcaacgcgctgtatcagggcattcccatcggcggctacaccaagatgatcgccaatcttctggacggcatcgaggtgcggctgaacaccgattacctcgaaaacaaggccgcgctggacgcactggctgacaaaatcgtctacaccggcccgattgacgcttattttgactacaaactcggcacgttggagtaccgctccgtccggtttgagaacgagctgctcgacaagcccagcttccagggcaacgccgccgtcaactatacggaccgcgagacgccgtggacccgcatcatcgagcacaaatggttcgagttcggcaaggacgagaacggcaacgacctgcccaaaacgatcatcagccgtgagtattcctccgagtggaagcccggtgacgagccgtattaccccgtcaacgatgctaaaaacggcgcactgtatgccgagtacaagaagctggccgacgccgagtcgaaggtcatcttcggcggacgcctgggtgagtataagtattacgacatggatcaggttatcgccgccgtgctggaccgctgcgaaagcgagctgcactaaagtacagccaagcgaaagcacaaaattcaaaaggcagcaaagcagaccccaaaagctaaaatcggggtttactttgctgccctttttatttgctcaatccgctggcgccgcttgccacaacgccgccgtccataagaatgtctgctccggtcaggaagcccagccgctcatccagaagaagcgcaaacaaagcggcgatttcttccggctttccgttgcgcttgagagcagagtattttttgaatacatccgcctgcctgctttccagtgcgcccatcggcgtgtcaaagttgccgggtgtcacactcaggcaacgcacatttttctcgccaaagcgtgcggcatcggtcttagcaaaccaaattacaaaatgcttgctgatggcgtaggccagacccgggcgagcgtccttaggggcgatgcctgcccgcgccaccagctttttgatgaatttttcacggtcggtgcgcgccagcttgtacgcacccttgggcatgataaactgcggggcaaggtaggcgctcatgctggaggtgtcgatcacacagccgcccggtgccatgacctcataaaaggcatcgttgatattcaccgtgcccagcgcattgccgcgcaaaatcttttcaacatcgcccatgtgagggctgaggcccgcgatgtgcaataccgcttttacttcgccgcattcggcggcgtatttggccagcgcaaaacagctttcacggtcggaaacatcacagctgaacgcctcggcctcgccgcctgcactgcgcagatcgttgactgccttttccagcttggacgccgtgcgccccaccaaaatcgtgtaatatccttcttcacagacgagcttcgccgtggcaagccccatgccgctgccgccgcctgtgataacacaaaccttcttcatgcgatttttccctcctgcttgagccaaaccgccaaatcatgcagtgtttctttgtagggacgcggggcaaagccaagctcattttttgccttggagcagtcaaaatggttgttgcgctccagattgtaaacggcaaactcagtcagtacagcaggcttaccggtcttggcggcgcgggcctccatctgcttggcggcaaaatgcgcaaaagaaagcggcatgtaaaacaggcagccgcggcagccggtttctgccttcagcatttcgcagagttccttcagcgaaacctcgtcattggaaaggatgtagcactcgcccttgcgcccgcggtcagcggcggcaatcgtaccggcggccaggtcgcgcacatcgacaagattgaacgagccctgcataccgatgggcatctcaccgttcaaaatctggatcagcgtgcgggtcgtctgcccgatggcggggtcgttggggccaagaataccgctgggatgcaccacgcaggcattcagcccgtcagcggcggcgtccagcaccttctgggtcgccattgccttgctgcggctgtaccagccgaccacgcgatcatcatcgtagggaacaaagctgtatacctcatggatgctctcgcccttaggcagctcggggatggcgccggtgctggaaacatagacgaactttttgcactccgggtgatttttggcggcattcagcatattttcggtgccgcccacattgacggcgatgagtttttcactgtaattcgggttgatcgtcaccatgctcgcgcagtggatgcagacagtctggacgcccggctccacggcaaagaatttctcgcagtcctcggcactgcagaggtcaccctcaaaaatttcgacggccttcggcatgaattttacagcggggtcgcccttcagcacaaaagcacgcacagcatcaccgcgctccaaaagctgtgcgcagacattagtgcccataaatccggcagcaccggtgacaagatagatggttttcatagctgtatcctccgttttcccgtagggtgttttttgtttcgatgctcctaaggatacaccgccaaaataaacctttggtaaacgggaatgtttatctttcgtttatctttgcgctgtactataatagaactaaggaggatacacggatgtttcgtattttgattgccgaggatgaccccagcacggcgcgtctgctttgcgccatcgtaaagcgagcgggctatgagccgctgattgctgccgacggtgtgcaggcactggaaatgctcgaccacaaccatatagatctgctgctctgcgatgtgatgatgccccggatggatggctttaccctgaccaggaccatccgggaaagcggcagcatgctgcctattttaatgctgacggccaaggatatgccgcaggacaagcacatgggttttatcgttggcactgatgattatatgacaaaaccgccggaccggcaggagcttgtgctgcgcatcaaggcgcttctgcgccgcgcccgcatcgtggatgaacacaaaatcacgataggggatgtcgagatggactacgacacccataccgtgcggcgcggccacgatgcacaggtgctgccgcccaaggagttcaacctcctatacaagctgctggcttatccggaaaggacctttacccggctggagctgctggatgagatctggggcatggacagcgaaagtgacgacaaaacggtaaatgttcatatcaatcggctgcgcacccgcttttacgattggccggagtttgagatacagaccattcgcggcattggctaccgtgctataaagaaggtgtaa

SEQ ID NO: 168 - DNA, 28423 bp, unidentified
  source 1..28423: mol_type = unassigned DNA
atgttcgaaatacaagcaaataaaaccatacaggaaaaattacatatactggcggatgcggcgaagtatgatgtggcatgtacatccagcggtgtggatcgaaaaggaaaggaaggaatgctcggaaatgcacgatcctgtggaatctgtcacagctttgcatcagacggacgctgtatctctctgctcaagattctgatgacgaatcattgtatttatgactgcaagtattgcgtgaaccgagtatcgaatgatgtcaagcgtgccacttttacgccggaggagatctgtgaactgacgatcgaattttataaaaggaattatatagaagggctgttcttaagctccggtgtgatccgtgatccggcatacacgatggagcagatctgtataaccttacagctccttcgtacaaaatacaggttcaacggatatattcatgtaaagacgattccgggtgcgccggatgaactgcttgcggcagccggattcctggccgaccgcatcagtgtgaatctggagctgccgactgcggagagcctgaagaagcttgctccgaataagagcttccagacgatcatgactccgatggggaaggtgcgtgatacgatcgcagagacaagaaccctgatagggaaagatgcaagaatggaacgcagtctggggaatcgttacctgccgggaagtatattcgggaaagaacagttacggctgaccggagcacagagtaatgggggcggctctctttggaagaaagctgcttcctttgctccggcaactcaggatacatggaagccacgggcatttgcaccggcaggtcagagtacacagatgatcattggggcatccgatgagagcgactatatgctggttcagacgacacagaagttataccagaactatgatctgaaacgtgtcttttattccgcatatattccggtaaatgaggattcggcacttccagcgcttgagactccggttccgcttctgagagaacaccgactgtatcaggcagactggctgctgcggttttatggatttcaggcagatgaattgttgtcggaggagcgaccgaattttaatgtccgcatggatccgaaatgcgactgggcgattcggcatctggaacagttcccgatcgaagtgcagacagcttcttatgatacgctgcttcgagtgccggggataggaccgaaatcagcaggcaggatcgtaaaggcgagacggtacggacatctggaatttgaccatctgaagaagatgggcgtggtgttgaaacgggcgcattattttattacctgtggaggacggatgatgtataagataccgatcgaagagcagtatattaccagacaactgataggcgagcatgcaaaagaaaactggcaggtagagcataaggaagaagaatataagcagttatccttttttgatgctcagggagtatttggagttccgaattgatttgtggataaatgtaaaatcctatttaagaatagacgattgtatgaagaaatattgtcaggatagattttatagatagatgaggatatagatgggagaatgtaaatatgaggatatttacctgtaaacatcaattagaagatatgatgacctgcatctatgatgcatgggtctatgcactccgggtcggacatgataaggtgcagttacggacggagccgatcgtgcaggcaactttatttgacgagtatgtccatgtggatgccgatgcagaaaagacggaaaaggttctgcgttccgttcgaaataagattgggatgcaggcatatatcgatgtgtattatgcctgtctgatggaagaagatgtactggacgatatctaccggtttttgcggatcggatttcaggcaggaccaagggtgatcgggatgcttgccgagtctccggtcagccggatgctggagattcggcgggcagttggaaatgaaattcatcattttcgggaatttgccagattcaattcgatcgataataaggtgtatgtctgtcatctggaaccgaagcatgatgtgatctatcaggtggcagagcattttgcagaccggatgccggatgaatattttatgatccttgatgataaccggaagtatgcggtgatccatccgggaaaacattactcagggcagcaggcagatagagagagagagatttcagaacagaaccaatatatgaaggaaaaggctcagaagatgtatttgcgggagttgtccgatgaggaaatgaagacgctccgacagacggaattattgaaggatgaatataccgaactctggaagaccttctttcatacgatcgggattgaacagcggaagaatccgacctgccagcggaatctgatgccgatatggaagcggaagcatgcggtagaattcatgcagtaaacaaaaaagaataaaatttactaacttttagtaaaaatttagcaaaaactattgattagtttttattctcgtgtataatgatgatagtggttatcgtaacagagaatccggtaccgataaatgttgtgataaccgaaggttaagaatttattttacaggaggattatgatatgaagattttagtaacaggtggtgctggttatattggaagtcatacctgcgttgaattattagaagcaggatatgatgtagtagttgttgacaatctgtataatgcgagtccgaaagtaattggtagaataaaagagataacaggaaaagacgtaacattttatgagaaggatatccgtgatctggatgcaatgaatgaaatctttgcaaaagaaaagccggatacagtaattcattttgcaggcttaaaggcagttggtgaatctgttcgtaagccactcgaatattatgagaataacattgcgggtacattaacactttgcaaggcaatgcgcgagaatggatgcaagaacattatcttttcatcatctgcaaccgtatatggcaatcctgcatttattccgatcacagaggaatgtccaaagggtgtctgcacaaatccttacggctggaccaagcatatgcttgagcagatcctgacagatatccacacagcagatccggaatggaatgtaatcctgcttcgttacttcaatccaatcggagcacataagagcggactaatcggagaagatccaaagggtattccaaacaacctgcttccttatgtagcacaggtagcggtaggaaagcttccttgtcttggtgtattcggtgatgactatgatacaccggacggaacaggtgtcagagattatatccatgttgtagatcttgccaagggtcatgtaaaagcgatcaataagatcaaagagaatccgggtgtaaagatttacaatctgggtacaggaaaaggatacagcgttttagatgttgttaaggcatttgagaaggcatgcggcaagaagattccttatgagatcaagcctcgtcgtgcaggtgatatcgcaacctgttattctgatgcaactcttgctaagaaagaacttggctgggaagcagaatacggaattgatgagatgtgcgcagattcatggagatggcagagcatgaatccggatggctatggtgcataatgaaaatattcagtaaataagtaacagacaggcaattgtaaacgtgccggaatacagggcatagagaagatacaattgcctgtttgtttaagatagaaaggggttagtttatatggctgaatatacagcttcaaagaccagatatacagagacagaaggaacggatttttaccgtcattgcggtaaaagtggtctgatgcttcctccaatcgcactgggactctggcataattttggtagtgtagataattatgaaaatatgaaacagatgtgttttaccgcattcgatcacggaatcacacattttgatctggcaaataattacggaccggtatatggaagtgcagaggaaaacttcggcagaatccttcgggaagaaatgagtgcttacagagacgagatggtgatcagtacaaaagcaggatatgatatgtgggaaggtccttatggcaactggggcagccgcaaatacctgatcgcgagtctggatcagagcttaaagagaatgggacttccatatgtagatatcttctatcatcatcgcatggatccgaacacaccgttagaagagacgatggaagcacttgcacagattgtaagaagtggtaaggctttatacgtaggtctgtcgaattatgacggcccgacgatggcgaaagcagagcggattctggatgaactgcattgtccgtttatcatcaatcagaattgttacagtattctggatcggacagttgagaagaacggactactgaagcagacatatgcatccggaagaggactgatctgcttttctccactggcacagggtatgttaaccgataaatatctgcagaatattccaaaggacagccgggtggcaagagacggacggttccttcatgaggatcaggtcgtatcgatgcgtccgcttctgacagagttaaatgatattgcagcaggctataatatgagcttgtcagagcttgcgattgcatggctgctgaataaaccggaggttacaaccgttttgatcggtgcatcgaagccggaacagatactcagtaatctgaaggctgctgagaagcagagaacaaccgagatggaagcagaggaactggcactgatcgaaaaggcggtcaacctttatcacgcatagatgataagtgttatttgacttcacttcaaaaaagaatataatataaaagacagttctgaaaagtattttctgacagagaatgcttttgaaagtattgacggaacagaacggatcatattgtatgttattttgaaagaggaagacggtattgcaggcacatcagacagatttctcaagtggaaatgtatatagaaatattatagaagtagctgtaccaatgattctggcacagctacttaatcttttatataacgtggttgacaggatctacatcggacggatcccggaagtcggtacaactgcactgacaggggtaggtctgtgctttccgatcatttcactgatcaccgcctttacctatctgtatggaaatggaggtgcaccgctttgttccatggaacgcggtaagggtaatgatgaagaagcagagcatctgatgggaaatgcttttactttattgatcggaacaggaattgtattgacgattatcgggctgatcttttataagccgattctttatctgtttggcgcaagtgatgatacattcccatatgcaggctcctatattcggatctatctgctgggaacggtatttgtcatggtatcggtaggaatgaatccgtttatcaacagccagggatttggaaataccggaatgatatcggttctgatcggagcagttttaaatataatactggatcctatgtttatctttgttttaaatctgggagtaagaggagcggctattgcgacgattatttcccagttttgctcggcagtatgggtacttgtattcctgaccggaaaacgggcagtgcttcatttgaaatggagctgtatgcggttgcagtggaagcgggttttgcggatcatcagtctgggagtgtccagctttatcatggcatttacaaacagtctggtacaggttgtatgtaacgcgacacttcaggtctatggcggggatatctatgtgggcgttatgaccgtgttgaattccgtgcgggatatctgtacacttccggttatgggtattacaaatggtgcatctccggtcatgagttttaattatggagaaggggcatatgagaaggtacggaaagccatccgtttcctgactatattatgcgtaacctatacttttgcggcatggggcactctcagattgttcccggagccgtttatccgtatatttaatcattcaccggaactgatcgcaaaaggggttccggcattacatatatatttcttcggattttgttttatggcattgcagtttaccggacagagtgtgttccttgcgcttggaaaggcgaaaaaggctaccttcttttctctgcttcggaaggcatttatcgtagtgccacttaccattctgcttccgaaaatcggaaatcttggagtggatggtgtattctgggcagagccaatctcgaatctgatcggcggatgtgccagcttctttacaatgtgtgccacggtgttgcctgaattaaagcatgaaaaagctcgatgaaaaatataaacgaccggataggattattaattaatttattcaatctcccgtagtgcctttctgaactggaagaagaacaggatggcggtgaaggttacggcgatcaggtctgcgatcggttctgccatgtagacagccattgtcttatctgaggtgtagatatgcggcataatgaagatcagtgggatcagcaggacaaatttacgcatgatcgcaacgatgatggatgccggagcgttaccgagggcattgaatgtcatctgacaggagatctggactccaaataagaacataaccgcgaggtagtatctaagtgcaactttagtaaactcgatcagagcagtatccggggtaaagatggatgcaaaaacctgagggaaacacataatgcaaagccataataaaacagaatatgtcaggctgaccttcagcagaagtttgaatgcatcctttactctggatgcattttttgcaccatagttataactgatgatcggctgagcaccctggccaagtccctgaagtgggagcatggcgaactgcatgacgctggtaaggatcgtcatagcaccgacggccatatctccgccatatttcagaagggaggagttgaagcacacggatatgatactttcacttccctgcatgataaagacggcagaaccgagtgccagacatggcagggtataggaggcctgcaaaccgaggtttttcacacggatgcggagagttgtccgcttgccgaagaggaagcttaagacccagatgcaggaacaaccctgagaaatgattgttgcaagggccgcgccttttacccccatatgaagcgcaaagataaagatcgggtctaagataatattcgcgatcgcaccgatcagtacggacaacataccttctttggcgaagccctgtgcagtgataaatgcattcatacccagagtgagctgtacaaagattgtgccgattgcgtatatattcatatatgaggttgcatagttaatggtattcttacttgcaccgaatgccagaagcaggtcgcgattccagatcagaagaacagcagtcagtataacggataagatgatctgcatggtaaaacagttaccgaggattttctcggcatcgtcttttttatttttgcccatatagatggtagcccgtggagcaccgccatttccgaccagagccgcgaaagcggagatgatcatgataaggggcatacagacaccgacaccggtaagtgccagtgaaccgttttgtggaatatgaccgatgtaaatacgatcaacgatgttatacagcatattgatcatctgtgcggcgactgtaggaagtgcgagctttgccagtaatttaccgatcggttcttttgccagaaattcccggttggatgagcctgtgttgtgggcaacctggttcggttgattattcttgatgtttttcgatatggattctccgccggttggtggtgaagcttttgatgtgttgtttgaagaatcggtcatgctgtaggcttgtgtttgtttcttcatgtatattcctcgttcctttgattgatattttatattgtataaaagttaattgcgatatgagcttgcctgaatatagtattgtccgaactgcccggtattcaggcagcagtgttgtgatcatattattttaaatgcgataacacattgtcatacaaacgcttgttataggatgcaaaattcttcttttcgtcatctgaaaaaccttcaaagatgcaggagatcagttcgtcctgctttttctcgattgcatgtacaacaggaattgatctatcggagagcttcagatgaatgatccgtttatcatttgtatccggatgtctggtcagatagcctttgtcggcgagagaatcaatggctgtggatacatttccacgctgtagcatacgaaactctacgatatctctggcagtatcatgtaccggattattgtgtaaaaaagtaatgatgataacttcaatctgtgaaagcttatagtctatccggatgctctcaagatatttttcctgaagcttcatcaggctttttgtcatatcaaaaatattggatggtgattgtaggatcatatatattcctcatttcttaattaagttctttttagaactattatagctttaaaataaaaagagtcaagctgtttatacaatttttatagaaagagaaaaacacagtctgggtgttatctgaaacagaaaactagagataaaaatattattgacaggaaagaaataatagatatactaaaatttatagtgttttttggagaattcagataatagaatatatgaaaaaatatgtttgaccagaggataaatatgccacagatgaacgagaaaaactggatgatcatagtagcagtagttattgtgcttataggatcactgatctacaatatcatttcagcaagaaatctgaagaaaaaaagacaacagtttgtagaaagtatccaatcttcatatacgcatatgaagagtatagaagacaccagcaaaaagatatatgagatttcaaacgagatcaatgaaatgatccgggagcagaaagacaccgaagagtacatagaaaaaaagaagaaggagattgaggagatcaggcagatgattgtgacaaatgacacaatccttgactgtgcaatctcagataagcgggatcttgcaaggaagaggcagattgcatttacttataatattccaaccgggttaccggagattcgtatggaggatgtcgataagattcgtctgtttgccaatctgttagacaatgcgatcgaagtagccgagtgtgtgccggtgcaggatgcaaatggggaaaataaaagattcatacatgtatcgatattgaatcgtgggagtaacttctttatcactgttaaaaattccaaaagaacggagattgccgttatggagaatcagttccatacaacgaagccggatgcagaaaaccacggcagaggtgttcgtattatcaggcagattgttgccaggtacgatggaacggtcgagttcacagacaagggtgatgcctttgaagtagcgatcatgttgtaaaaggcatacagaacagccatggtttgtgtgtttgtaatttacaacatagcatgttcggagatatatttgaggtagtcggctttgaatggtttggcatagcgtctgccaacaggcagtttgatgctgccggtcagctcggtttcctgtgaggataaattttttacatatccaagattgaccatgaaagaactatggcattgcgagaaataggacggcagtcgttcgcttacagcctgaagggattcgtacactttataggcttccccatcgtcagtataaataataatctcgcggctgagccgttcaatatgagtgatcgttccgcatgaaagggtgtaccgttttcggttggagataacgtccagaaagcgtgcttttcgttcaattacaagctgaatcgctttatccagtgccttaggcagatattgttgtatggaatcctttgtaacataatatatgtgacggacttcgtaagattcagatatatagtcggtatggctggtgaggaagataactgcacactgtgggcagcattgattaagctcggaagcaaaatcgataccgttgaagtcccccatttcgatatctaagattgcaatatcataattaatcgtatcggtctcaagcaatttttttaatttctctggctcgtaggagtcgattctgaaagtgaaggattcagaagcatccaaacaggaatgtgcaaaactggttgtttcttttaattgtagatctgaatcatcacatattagaagtttgagtttcatatatggtatccctcctgtaattggtaatttcaatgtagaaaacattttgcttaactggtaatattataataaaaaggttgccataaaacaagaaaaatgtcaaaatatatatacgcatattgatgacggtataaagaaagagagaagatagaaatgaacatatggacattcctgcaggtgctcggagcagccctgatcacggcattacaatttaatatttatctgggtgcttatatgggaatggatcgtggaagaagagaccggatctatctgggcttgaatattttaaatatgtttttcctccgcgttttaataaatacaagtatacagctagatgcacctgcatggcttcgtgccatcatttatatttttggatttgtgatgatgcttgtaggcgttgtattataccgtaaagagtgcatggttataaatttggtatcatttatggtgggtattatgacatttgatcttgttacggtgacgatgtcagcagtgatcgaggaactgtttggatatgcatataatgatacaccggtattatacagtgcaaaagcattgcttgtctggcttggagtagaagccttgcgtgagggcataggaacgatcattgaagtctggtttatgcggaaatatatgccatacaggaagttccggagacaatcatttgtcagaagcatggtgtggattctggctgttggaaccggatatatgatgttggttgtgtattttgtgactatggtaaaagaggttaatctgatgtcacagtttatagcactgggaatctgggcatctgcttttatagctacttatcatctgtatacgatcgtatataatagctatcaaagaaaaatgatacgttttctggaagcaaagatgaagcagcagaaagaggattatgagaagcttctggcggattacaacaggctgcgggatatcaagcatgatctgtataattatgtgcatatacttgatctggcaggagatgtccggaaggaacaggagcagatcagacagttacaggaagatctgaaaccgggaaaacagaaggagtatataaaatacacaaatctttcaatcctgaatctggtattaaataatgttacatctgcctgtgagggtgcaggtattcatccggaagttgcagcagaagaaattcagattgatacaaatgtagaactggacatgggatatctgatcgagcggatggtacataatgttattttgttgaatgaagatcagggagagaataagcaggattccgtatcagagtcattgtcccggacactccggattcagatcgcaccatcggaatcctcagatggaaatattcaggttgtgcttaagggtatcggacttcgtatgaagggcattgagatgaattcagacaacagaaaggagatacggaataataagcagatcatccagtttattatggagcggcatgagggattccagtggaataacaggaaagaatctcatctgtatctgactgcataagcagagaaccgtatccggaatttgtagaaatatgtcgattacgacggaaacattgcagattacgacaggtttattgtatctgataaatgttttgatataataacttcatagatatattgaaaaccgatatattattgagtgggaaagttcataatatatgcatttatgtcagagaggacatatatttttcagcccaatcagctctccttgctgcaagattgtggaaactcagaatgagtgcagtagattatggttgcaaaatatgaaaagcatacattggaacggatgaaggaagatctgatagttgtaccgagaaacgcaggtatcaggtcttctttttttagccttttaccatgtcttaaccataaaacgtgctacaatatatgttgttacagtttagaatatgaatatataataatgattgtcagaattggttgaaatggatacgattgttataacagattacaaaaagatacagcggagaaaatgatgaacagattcctgaattttacaaagaattttttaattacagcagcgatattggtatgtggatttttgttgtccctgtttatgcagaaggagtggggaaatcagactttgataccctctatttttctgttggatgtatttctggtatccgttatcacagatggtttcttatatggtgcggtcgcatctgtcatcagcattctggcggtaaattatgcatttacatttccgtattttaagattaattttacgatcccggaaaatatgatctctgccgttatcatgatagctattgcagttattacctgcggatttacaaataagttgaagagtcaggaacagttaaaggcagagagtgaacaggagaagatgcgggccaatctgctccgatccgtatcccatgattttcggacaccgcttacaacgatttatggtgcaagctctgcaatgttagatgataagaatgaatttacggaggagcagaaaaaaagcatgcttcgtggaatcaaacaggatgcacaatggctgtcgcgaatggttgagaatatgttatcgattaccagactggatggaaaaaatgttaagatcattaagatcccgattgcgttggatgagctgttagattctgttctggttaagttcaataaacggtatgaaggtcagaatgttgagattgacattccggatgaactgatcatgattccgatggatgcgatcttagtcgagcagttgatcctgaatctgttagaaaatgcagttcagcatgcagaggggatgaataagcttgggcttcgtgtatatacgagtgggcattttgcagtatttgagatccgggacaacggatgtggtattccggttgataaggtaaaggatatatttgcagggaaactggtttatggtgaatcaggacttgacagcagtaagaaaaatgcagggatcgggttggcggtatgtaccacgatcgtaaaagcacatggtggtgagatctctgcggagaatctgcaggatggcggtgctgttgtgcgatttacactggatatggaggaaactgagaatgattaataacagatataagatattgataattgaagacgaagaacatattaataatctgatcagtgcgctgatggaagcaaatggatatcaggctgtttccgcatattcctgtcgtgggggacagatgatgtttgcatcccatcgtcctgatcttgtcattctggatctgggattgccggatcgggatggaatgacatttttaagggaagtgcggcaatcatcatttacaccgatcatcgttttatcggcacgttctgatgagagggataaagtagaggcactcaatgagggcgcaaatgactatgtaaccaagccattcagttcaaatgaactggtagcaagagtacgttcagcactccgtatcgctacgcatcgggcagaggatggattgcggccgggtggaagattcgaggttggagagctggttatcaattatgatgcaagactggttacgatcgccggaaatgaagtgaagctgacacagacagaatataatattgtagcgttgttatccgagcatgcaggtaagatgctgacctacagttttatcatcaacgagatctggggatataatgattcgggaagccggaagaagctgcaggtaaatatggcgaatatccgaaagaagttcggtgcagttcccggtaaggagaattacataacgaatgaattaggggtcggataccggatgtgtgattcatagaaaagaattctgaaactctacagcattcggtcacggggatggcgcttgttataaataacgtgctgcgatttctgttctctggacattgccctattcgtaaatactcctgtgctaactcgcctttggctcagacaagcactcgtatttactggcaatgtgcagttcacaacgaaatctcgcaatgttattttataacaagcaccatccccgtgaccgagtgctgtagagttttttgtataattagataattgactataagagaaagattttatgttttttaatataaaatacaggaagtggtgttgacacattcttttttttgaactaaaatgtagcgtgctacacatgaaaaaagatgtatagtatgtataagatatgcaagctatataacattaaatgtaagagcattttccgggaattatacatagctgtaaataaaagaaaggaaccgtaatggaacaggaaaaggatatggatgcagatcgaaagctgccgtgtggtccggagaaggacatcggttattatattaagcggatcaatgataagctgaaggccggatttgacgcatatttatgtgacgtggatctgaccagttcacaggcaagagtgattgaatatgtgtactggaatggtggaatggtgacacagaaggagatcgaggtatttctggatgtagcgcatccgacagttgtcggcatcgtgaaccgtctggaaaagaaaggttatctgaactgtcatctggatgagaataacaaacgaaataagatggtatgcagcacctgtgaagctgaaaaactgctcaataaaatgtatgaaggcaggagagctgcggaacagagactgcttcattctttttcagagaatgaggtggcgcaggcgaaaaagctgcttgaaaaattatatgaaaatatcagataaagaaagaaggaggacgtatgatcagaaaattattaaaaagtttgcgggaatataagaagccgacactgcttacgatattctgtgcagtaattgaagtagtatttgagattttaattccactttgtatgtctgatctgttggattttggtatcgaaggtggaaagatgagtattgtcgtaaaggatggaacatggctgattgtgcttgcagccttacagcttttaacaggtgtgcttgcagcagttctcggtgcgaaagcgtcagcaggattttccgcaaatctgcgacaggatatctatgataatgtccagacattttcattttctaacatagataagttttccacttcatctatcgtaacaagactgaccacagacgtaacgaatattcagaacgcatatcagatgatcattcgtattgcagtcagaggaccgatcatgctgatcttttccgtgatcgtttcctttacgatcaatgcaaagctggcatggatattcctgatcgttattccgtttatgggattcggtctgatatttatagcaaccaaggtgcacccgatcttcgaacgggtattccacaaatatgacggtttaaataatatcgttcaggaaaatgtaaagggaatgcgggttgtcaaatcctttaattcgcaggaagccgagatcggcaaattcaaacatgcatcaggtgatatctataaggattttgtaaaggcagaaagaatcctggcatttaactctcctttgatgcagttcttcatgtatggatgtatgatcgcaatttcatggatcggtgcaaaagccattgtggcaagcggaaataatgaagcacttggacttacgaccggtaagttgactgcacttatcacatatgcgatgcagatattgatgtcacttatgatgttatcaatggtatttgtcatgatcatgatatccagatcttcaacggaacgtatcgttgaggtgcttgaggagacaactacgatacagaatccggagaacccggttcagactgttgcagatggttcgatcgtgtatgatcatgtggatttctcttacagcaaacgggcagataagaaagttattgacggagcagatcttaagatccgatccggtgagaccgttggtattatcggtggaaccggttcatcgaagtcttcctttgtccagttgatccctcgtctgtatgatgtgacaggcggaacacttatggtcggtggcgtggatgtccgcaaatatgacctgcaggtgcttcgtgatgcagttgcaatggttcttcagaagaatgaactgttttcagggacaataaaagagaacctccgctggggaaatgaacaggcgacggatgaagaagtaaaagaagcctgccgtcttgcctgcgcggatgaattcgttgaggcgatgccggatggatatgatacctacattgaacagggtggaacaaatgtctccggtggacagaagcagcgtctttgtattgcgcgggcacttcttaagaaaccgaagatattgatcctcgatgattcgaccagtgcggttgatacaaagaccgatgcgatgatccagaaagcatttgccgaatacctgccggacacgaccaagatcatcattgcgcagagaatttcctctgttcagcacgcagataagatcgtggtattggatgatggtaagatcatggatgtaggtacgcatgaagaattgatcgtaaagagtccgatctacagagaagtatatgaatcacagcagaagggaggcggtcaggatgagtaaacagaagaaacagatggacgcacccgacagagagcagggcagcagggtcaataaaaatacagccaaacggctgctgtcctatatcggagcatataagaagacgctggttgttgtatttatctgtattatcttaagtgcacttgcaagtgtagcgtcggcaatgtttatcgagatactgatcgatgattatatcaccccgatccttgcaatggatcatccggtctataccgggctgatcaaggcactttgtatggtcggcgttatttacctgatcggtgtattttctacatggttttataactacctgatggtagggatcgcacagggaactctgaaaaccatacgagatgagatgttcgagaagatgcagagcctgccaatccgttattttgatacgcatacacacggagatatcatgagctgctataccaacgatactgatacgctccgccagatgatcgcacagtccctttcacagatgatctcatcgatatgtacggttgttgcggtattctgctgtatgttatatcagagcatttatctgacactgatcgttgtcgtgatgctgttctttatcatgaagctggtgaaggtcatcggtggcaagagtggattttattttataaaacagcagcagacacttggtgcattagatggttatatcgaggaaatggtcaatggccagaaggttgttaaggtattctgccacgaagagaaagccagagaagatttccagaaaaagaatcaggaatggcagcaggcagcagccagtgcaaatggttatgcaagcggaatgatgccgatgatgaatgcatttggttatgtgcagtatgtagttgtagcggttgttggagcatggcttgcgatctccggtgcaacgaatctgacgctggtcggaacgaatacagccactcttggtatgatcgcatccttccttacgttgtcgaagaactttaccaatccgatctcacagctttcgaatcagtttaatgcgatcgtaacggcacttgcaggcgcggaacgtatctttaagctgatcgatgaagaaccggaagtggataatggttatgtaacacttgcaaatgtcaaagagaaaaatggtgagctggtggaagtgaaagaacgaaccggaatctgggcatggaagcatccacatgaggatggcagtcttacttaccagagattagagggcgatatcgttctggatcatgtggatttcagctacaatccggacaaacagatcctgcgtgatgtgacgctctatgcgaaaccgggtcagaagatcgcatttgtaggtgcgaccggagcaggaaaaacgacgatcaccaatctgatcaatcgtttctatgatatagacgatggtaagatccggtatgacggaatcaatattaataagatccgcaagaaggatctgcgggcatctctcggtattgtattacaggaggtcaatctgtttaccggaacggttatggagaacctgaaatatggaaatccaaatgccacggatgaggaatgtattgcagccgccaagcttgcgaatgcgcataatttcattatgatgctgccaaatggttatgacacggtgcttgccggagatggaagcggattgtcacagggacagcggcagttgatctcgatcgcaagagcagccgtatccaatccgccggttatgatattggatgaagcaacctcctcgatcgatacaagaacggaggcgatggttcagcagggaatggaccggctgatggaaggcagaaccgtatttgtcattgcacatcgtttgtctacagttaagaattcggatgttatcatggtactggatcatggcgcagtcattgaacgtggtacacatgaggatctgatcgcaaagaaaggaacctattaccagctttataccggagcatttgaattggagtgataaatagtaaaaactctactgttacctgtctctggtggttgctcttattataaataacgtgctgcgatttctgttcactgcatatgcctgattcgtaaatactcctgtgctaactcgcgttcggttgagcggagcacttagtgaagacgagcgttagcgtagtttgaggttagtgtagcttactctgatccggcaacaacgaaatctcgcaatattattttataataagcataatacccagccctaggaagcagtagagttttttgctatttttaggcaggcggtaaatggtggatagcgtattgattatagcatgactaggtttgctataagagaaagttataacgaattctaatatttatgtattgtattttagttggaatttgttatataattcatacattccgaataggaatagtaagataatgatgcgcagaaacaaaaattgtattaagtttgaacacttcggattaccaagacagaggcatttgagtccgccggtccttaggtggcgctgtaagcggcagcttagtaccgttgcaggacgaaacgagcggaagcgtcctctgattggtaatgccgaaagtgttcaaacatgatgatattacgttacggcattagtaaaatataagaaggaggaaatgccatgcgacaggtattatgctttggtgattcaaacacatatggttatgtgccgggaacggcggaacgctatgactgggataccagatggacgggaatcgtaggaaccggactgatggaaaagggatatattgtacaggaggaaggtctgtgtggcagaaccacagtatttgacgatccgcttcgtccgggcagacgtggcagtgaactccttccaatcatattagaaacccataagccggaggatttgatcattttaatgcttggaacaaatgactgtaagacattttatggtgcaacggcaggcagtatcggtttaggtatccgtaaacttgtgcgacagatccgggatggtgcgccatcagcgaagatccttctgatgtcaccgatcgcactgggcgagaaggtatgggatggatttgatccggaatttggaaaaaattctgtacaagtgtccaaagagctgccggagatttaccggcagatttgcggaagaagaaggactttattatctggcggcttctgattatgccgtaccatcggaacgggatcaggagcacatggatgaagaaggacacaaggcgctggcagaagcggtactggaaaagatttcagagatattgtaatgtgagttaggagcacagagaaaaattatggctggggagactgtagacagaaaagaagtattaaaacaggcatttgtgaaggctttgccgatcaccggaagttatctttttgtcagtatggcatatggacttacgatgcaggaagcaggactttcatggttctggtcgttgtttaccagcctgacggtatataccggcgcatttcagtttgtgctggtaacattcttaagtagcggtgcatcgatcctcacgatcgcactgactgcattgttcatgaatagcagacagttcttttacggactgacatttgttgaagattttaagaaaatgggtaagcgttatccatatatggttcacacaatgacggatgagacatatgccgtgaattgttccatgctgtcttctgaggtgataagagatcgtaacgcagagaaggaaaatgaccggaagcgcagatttgatattatgttttatgtggcattattcagtcgtatatcctggatggtgggcgctgtgcttggcggcatactcggtcagatccttccggtgaaattagaggggatcgatttttgtatgacagcgttatttattacgatcgcgatcgatcaatggagaagtgtgaaagtgcatttgccggcacttgctgggtttatcggaggtgtgctgttgcttctgttaataggaaaagattatttccttcttccaactttgattctggtatcaggtctgttgctgatctgtgaaagaaaggtggaagcccatgaatgatcgatatgtattgatctgtatccttgtgtctgcagcggcgactttgtttatgcgggcgctcccatttaccattcttggaaagagaaaacaaatccccgaaaaaatccggtatctcggacgaatccttccggcagccatcatggctgtgctgatcgtatactgcctgaaggaagtaccgaccgaattcttaagcggtggctataagaagttgatcgcagccgcagtttgtgtcgcccttcatgtgtggaaaaagaatacatttgtcagcatcataggcagtacgattgtgtatatgttattatgagcaatgacaccgaaaaaaagggctgtcgcaccaatcacttagtgcggcagcccttttttgtagtatccgttgtaacgaaattactttgttttatttgatcatattgttgacagcccctctattttgtgatgaggctatctattctaagaatatgtcaatgaataagcattatagccgggggattattatgtaaaaataattatgttaatgaactgcacattagtgttctaacgcagcaagttttgcctgtaatgcagcaatttcggcatctttttcggacaaagcagcgtccttttcagacaaagcagcgtccttttcagacaaagcagcgtccttttcggacaaagcagcgtccttttcggacaaagcagcgtccttttcagacaaagcaacatctttttcttccaacgctttcttcatctgttcgatcataaaattaacagtattttcatccatcttttttaatgcttttgaaaacatactaataacctcctcagggcgatacagatattcagatatatcctggcatatagattccatccatggatagttggatatcagtgtggcaaggttgtctgtagagtcagcggttagcagagacaaccatgcatttagatcgttgatatctttagcatacttgctatttttaaatacgtcaaggttaacgacatagtattcctgtaaaagactcagatttacaccagtattaaaaatggttcttccatgatgcagatagatatttgcaaaacggtctttcagacattcgtttggactcttttcatacataacaattgtataaacagttctcatatccttatatgtgaaatctttcccaaggttgctttttacgcgtgtatattggcgaagtagtagatctgcggaatagcatgacattcgctcaccgggaaatgtgtatggatttttttgtatttctacatttgcgatagaaccgtcttctaactggacgataatatccagaagtaggagagatgttgatggaagcatgctgtcttcatttgacataatatatttaacagttacatttgtgccgataatactgctgatcagtcgtgataatcgttccgggtatatatctgggttgaagatttttttgaaaaatggatcataggttagtggcagactttttttgccttccataaattccataaaacgttttttccagtcatcaggccagttcttatatgtccaataaagttttgggtattgttttaattctgcaaggcattcatcttccgttcgttgtggaaaaagctgataaatattgaatgcggaatgtttggtgcttgagttttgtgaaatggtagttttgtccttgttatacataaaaattcctcttaatttccggtacctgatttgtcgacaaaaccaccataccagaaataatggtataaaaaccgttgatgtaataacttgtatggtttgatgtaacttttggtaagtggatgcttataaagacaatctgtaaatatttttccggtaaatatttttgaaaaatttcaaaattttacttatggttttcggtaaagtgccagtagaatatatattctaaaattaatataaaagagaaaacagatctatgagaaaatccggtatctcggacgaatcctctcggcagccatcatggcagtgctgaccgtatactgcctgaaggaagtgccaaccgaatttttaagcggcggctataagaagctgatcgcagccgtagcccgcgtcgttaataaaataacaacaccccggtcgcgagggatgcgtaccagggtggtattcaaaggacatactttattataaacatttgtattttggactgtcaattcgttgctggttaagaaatatataaatttatgtgcctatgcgttggtttgtaaggtgagtatacttatacttgacacaatgcattgttattaatcatttaatattataaataatgatttttactccaattttctccctatctcactttccccatttacggaatattaaaaccaaaagattacggtatttgattcgggctttaactttggtaaaaaaaaggcggaaagatatactctccgcccatcctataataggatcaaatgaatttattaacatatttattataaaatatccagatagtaatgtcaatgaacccaatctcctgatccatttttctttaccatatcttatcttgtgaagtcagactgtcaatgcgttattattaattatttaatattatttataataattttttataattattaatgatatattatcgcttatgaatcctgcaattcaaatttttctaatgattttattttccaatagtggaatatttacataaataggtaaagaacgaggcggaaattgaggattccgccccgtttgtttgattccttgctcttttctggattcttgaccaaggatttcgtatacttgtagcatacggattagggtatctttaggataataccttaattaagaatttgtcaagttagtttttctatttcttattatctagtaaatagtttactgaatattatggtctttaagcaactgcaggtaagtatctgggagaaggatattgtctgatttactttcttctccaagataacaaaatccgtattttgataatgattgttcgcttgttatctgttttccattatatatactagcaggataagccatatttgcagaaactctcattttcttttctccatacgcattgattatatatccactcttgctcggaatcaataatccattatattctccctttgtagggttccctcgtatatttctttctttcattttttctccacaaacccgacaggtataatcctgataatattcagaccaggctttctccgttacaacagtcgtattttcatattttggttcatctgcggttggatgatggatggtataaaggaggactttggcaggttcataatttccatgattggtatttccggagtgttcatcccattcatctaatgtatcgtaatacttcccacactttttgcaaatatatttttctttctctgaccacacttcttcgtcccactctttgaccgggatctgaacttcctttgtcttggctttatgatcaatctgttctgttacagaacccgccttccataaatgaacatgattcgccggctgtttagacaaagatccgtcactcacagtttcataagccttattcttgataaacacagtgctgtttttctggatctttcccttgttatcaatcggatatttttttccggctgcagcatagatcccggatgaaaccgccatactattatccggtcttacaatctgattattcttcactttaaaattctgtctgctaccatttttatctacaaaataattgcagccacctgatttaacgattgttgaccgctgtatcttgccattttttacatagacatcatcgttccagccatcttttaatgcctttgtgccaccattttttgtgatccggaaagaagtggttccatcatcataatactttacgcatccatcattgtcgatgaaataagatccctgccaccccattgctcttgaaatgtttccgttcgtattcacgaagaaagatttttcattataggtataaacttttcccttataattttttaaatctttcttattccatctgatgtccttcccgttccagactctaaatttaccatttgatatttttacagaaacagtaccgtttttttcaacatagtaagtatataatccgttattatttaatttccagcctttgtttaggttaataagaccgttagcccctacatagaaatttttcttatgtagccgaatgatggtatttttcttgtttttgaatacttttgaagatggttttttattgttagcagtatatgtgtagtatttaccgtctttgattttggcatacaaataaccatttttcccggtgcaataggcgatttttttcgatgaatcgaaactccagccattattcaatttggagccgttttttttacagataaatcgtcctttattgtcattccaggtcagtgtataacctgattctctgccggcaagttctgcttgttttttttctgctttttctccatgtgcagcaacagagaagtgcggaagtaaaatcaagatggacatgactataagaagactccatatgtttataaattttttcatttgtttaatacccctttcttaccataagtaccacaatgctataaaaacaatatcataaaatggatgagaaaacaagaaaggcgaaataaagagaaccccatggtaatttaaaacccaatctgtaaattctcactggggtgaaacaagaaaaccagaaaagtgggggaagacataaagaaaaaatttgggccagccgtcgcagttcccgccttgtgtggggactgcgaccgaaattaattcatgcaatacgcaccgcgaataacaaaaaggcggcaaggaagaagcattggcaaatgtactggcacatgcaaattattatggcagacgaggaatccttgttgtaaaaaagggaaagaaaccggaatttgatttctcagagcgcaatgacagggtaacattaaagctcgaagttggacaagtggtatatattcctgaggctgtggacctgcagacaaacagacaatcagattcaacagaagcagatgaaatacgcaatatgaataaagggcaacgagtaatgcattatcttaaaaaccatgatagtatttcaacacaacaggcaatggaaccggcagatgattatatgaccgcagatcaggttcgtatgatcgtagaaaatgcaaaacaggaaattaaatatataaacgatatttcattggatggtggctgtgataaccttgaatttaaccggtcagatgccactaaagcagcaggacttcagacacttgcggtgatgcttggtattcccatgaatgagactctgtcaaataatgaagacggcgttgctgttgtattagaacgcatcgcttcgctcatttgacagacctcccatttgtttgcggtaggcattcggtgtcagaccgtattcttttttaaaacaatttacaaaatgactgcaggacgcaaaatacagaaatgaactgatttctgtacagctcacctggctgtttaacagcatgtagcgagccatcctgcatttttcttttatgatatattgtgagagactgcagttcatatcttttttgaacagacgggtcatatagtccgggtggagcttcactgcatcggcgacatccgatacccggatcggttctgtgatatggttgttgatgtaggagacggcctgcatgacatgataagacagtccgggactgttatgaagctcgtgcatggcaagtacaaaatccttcacaacagctccttttcgcggattcagttgttccggtgtcagacatgcgtcaatttttcggatatgcatatcacttaaagtataggcctgttccggatccaacccggcttcgatacagaaacgtgtgatcatggcagtcagaatgaccagatggtattttttgttctgcagtggggatgaagacagctttcccatgccttccatggtatctgcattcatatttagcttcagtagctccatatccccatttgcgatccgccggtaaaatgaatactctgcctccatcggcaggtgataagactgttcctcctgctgcgctaataacagtttctgtaattctttattcatggaaatactcctttcatataatatacagctataaaaatatttgcatataggcattattttatcaaatgaacggattgcccatctctaaaaaaacaatcagaacaatgaaggtcagctatgcgatataaaaatcggatatattatattccctacatatgcatttatagtatcataaattcagaaaataacaattacaaatttattatttgctaaatgaaaaggagatcatgcatatgaagacatggaaagggtatcagaagggtgttaatctgggaggctggttttcccagtgtgattattccgaggacagattcaataattttattacggaagatgattttaaagagcttacaagctggggactggatcatctcagactgccggtggattataatctggtagagacagaagacggacagtataaggaagaaggttttgcacggattaaacgcgcgctggaactcggacataaatatggttttaatatgatccttgatctgcataagaccgccggttattcctttgatccgggagaaaaacagagtggattttttggaaacgaagctcttcaggaacgcttctacagattatgggaagaatttgcaaagcgctttggcggatatggagataaagttgcatttgaattattaaatgaggtagtagataaagaagatggtgccgtatgggcagagatagcaccaaagtgtgtcgaacgtatccgtgcatatgcaccgacaactgatattctgatcggtggttactggcataatagcgtgcaggcagtcagagatattccgatgccgatggatgaacatatcatatataatttccacagctatgaccctcttctttttacacatcagggcgcacagtgggtagatgatatgccggcggattatcatatggaattcaaaggcagcatggaagatttttgtgcatatgcaaaagcacacctgcctgcaaagcttgccggaacgctgtcgatccttgattataagggaaatcttgattcagcatattttgaagatctgtttgccgatgcgatcgctgttgcaaaggagcgaaacgtagcactttattgcggagaatatggcgtgatcgaaaacgcagacccggcaaacactgtattatggtataaagccatccatgaagtatttgcaaaatatggtatcggccgtgcggcatggtcatacaaggagatggacttcgaccttcgcgctgatcgtctgaaaccggtatttgctgaactcaagaaatatttttaaggctgtttatccatatacccgggtaaagcagatagagatggtggggtggttgagacatcaagtctcaaccaccccaccatctctatctgccttacccgggtatatggcattcttttaatcaagacgttaattctatttaagaaactttttccggcgcatgcttgcttattcttttcgtatggattataataacaaaagctgatttttgtagaaagaaaagaagtaggagaaaacaagatggtaaacgaagaaaaggtcagattgatgaccagacttgccatgtacgaacaatctacaggaaaagaagatctggaaaaaggcagatatttcaaatcagactatgtaaaatacaactgtctgaagactctggtgtcgacaacgatattatttgtgatcgtggtagcggcctatatttattacaatatgggtaaactgatcacggagcttgtagatatggatctgttcggtctggcatataaacttcttatagtatatgcggttgtttgcgtagtatttatggttcttgcatggtttctatactcctatagatacaccaaggcaaagcctcatatcataaagtacaatcaggatctgaagaagctgattgctttctatgagaaagaggacaaaaccaaagggaagaagaggaggaagtaa

SEQ ID NO: 169 - DNA, 16115 bp, unidentified
  source 1..16115: mol_type = unassigned DNA
  misc_difference 4992: note = a, c, g, or t
  misc_difference 4993: note = a, c, g, or t
  misc_difference 4994: note = a, c, g, or t
  misc_difference 4995: note = a, c, g, or t
  misc_difference 4996: note = a, c, g, or t
  misc_difference 4997: note = a, c, g, or t
  misc_difference 4998: note = a, c, g, or t
  misc_difference 4999: note = a, c, g, or t
  misc_difference 5000: note = a, c, g, or t
  misc_difference 5001: note = a, c, g, or t
  misc_difference 5002: note = a, c, g, or t
  misc_difference 5003: note = a, c, g, or t
  misc_difference 5004: note = a, c, g, or t
  misc_difference 5005: note = a, c, g, or t
  misc_difference 5006: note = a, c, g, or t
  misc_difference 5007: note = a, c, g, or t
  misc_difference 5008: note = a, c, g, or t
  misc_difference 5009: note = a, c, g, or t
  misc_difference 5010: note = a, c, g, or t
  misc_difference 5011: note = a, c, g, or t
  misc_difference 5012: note = a, c, g, or t
  misc_difference 5013: note = a, c, g, or t
  misc_difference 5014: note = a, c, g, or t
  misc_difference 5015: note = a, c, g, or t
  misc_difference 5016: note = a, c, g, or t
  misc_difference 5017: note = a, c, g, or t
  misc_difference 5018: note = a, c, g, or t
  misc_difference 5019: note = a, c, g, or t
  misc_difference 5020: note = a, c, g, or t
  misc_difference 5021: note = a, c, g, or t
  misc_difference 5022: note = a, c, g, or t
  misc_difference 5023: note = a, c, g, or t
  misc_difference 5024: note = a, c, g, or t
  misc_difference 5025: note = a, c, g, or t
  misc_difference 5026: note = a, c, g, or t
  misc_difference 5027: note = a, c, g, or t
  misc_difference 5028: note = a, c, g, or t
  misc_difference 5029: note = a, c, g, or t
  misc_difference 5030: note = a, c, g, or t
  misc_difference 5031: note = a, c, g, or t
  misc_difference 5032: note = a, c, g, or t
  misc_difference 5033: note = a, c, g, or t
  misc_difference 5034: note = a, c, g, or t
  misc_difference 5035: note = a, c, g, or t
  misc_difference 5036: note = a, c, g, or t
  misc_difference 5037: note = a, c, g, or t
  misc_difference 5038: note = a, c, g, or t
  misc_difference 5039: note = a, c, g, or t
  misc_difference 5040: note = a, c, g, or t
  misc_difference 5041: note = a, c, g, or t
  misc_difference 5042: note = a, c, g, or t
  misc_difference 5043: note = a, c, g, or t
  misc_difference 5044: note = a, c, g, or t
  misc_difference 5045: note = a, c, g, or t
  misc_difference 5046: note = a, c, g, or t
  misc_difference 5047: note = a, c, g, or t
  misc_difference 5048: note = a, c, g, or t
  misc_difference 5049: note = a, c, g, or t
  misc_difference 5050: note = a, c, g, or t
  misc_difference 5051: note = a, c, g, or t
  misc_difference 5052: note = a, c, g, or t
  misc_difference 5053: note = a, c, g, or t
  misc_difference 5054: note = a, c, g, or t
  misc_difference 5055: note = a, c, g, or t
  misc_difference 5056: note = a, c, g, or t
  misc_difference 5057: note = a, c, g, or t
  misc_difference 5058: note = a, c, g, or t
  misc_difference 5059: note = a, c, g, or t
  misc_difference 5060: note = a, c, g, or t
  misc_difference 5061: note = a, c, g, or t
  misc_difference 5062: note = a, c, g, or t
  misc_difference 5063: note = a, c, g, or t
  misc_difference 5064: note = a, c, g, or t
  misc_difference 5065: note = a, c, g, or t
  misc_difference 5066: note = a, c, g, or t
  misc_difference 5067: note = a, c, g, or t
  misc_difference 5068: note = a, c, g, or t
  misc_difference 5069: note = a, c, g, or t
  misc_difference 5070: note = a, c, g, or t
  misc_difference 5071: note = a, c, g, or t
  misc_difference 5072: note = a, c, g, or t
  misc_difference 5073: note = a, c, g, or t
  misc_difference 5074: note = a, c, g, or t
  misc_difference 5075: note = a, c, g, or t
  misc_difference 5076: note = a, c, g, or t
  misc_difference 5077: note = a, c, g, or t
  misc_difference 5078: note = a, c, g, or t
  misc_difference 5079: note = a, c, g, or t
  misc_difference 5080: note = a, c, g, or t
  misc_difference 5081: note = a, c, g, or t
  misc_difference 5082: note = a, c, g, or t
  misc_difference 5083: note = a, c, g, or t
  misc_difference 5084: note = a, c, g, or t
  misc_difference 5085: note = a, c, g, or t
  misc_difference 5086: note = a, c, g, or t
  misc_difference 5087: note = a, c, g, or t
  misc_difference 5088: note = a, c, g, or t
  misc_difference 5089: note = a, c, g, or t
  misc_difference 5090: note = a, c, g, or t
  misc_difference 5091: note = a, c, g, or t
atgaaactcaaacgtttggcggcacttgtgctcgcggttatgatgacattggccgcagcttccgcgacggggctttcgaagcttgcggcggaaggaacacaaaagcccgaaaagtccgttgttgatgcggcgggcgcaacatggtaccacgccgatgcaggcgaagaactgcgttttgatgacgactcaagctattgctttgaaagcgaaagctggattatgcgtcagaagagcgggaacacgattgacgaagctgttttcgacggcatcacgcccgacaatgttcagacattgaccgatgaaaacggcgagacctacaccgtttcaatgtattcccaggcaacggttgttgcagcactcaaccgcatgctcggcaaagaaacgaaaaaacccgaacgaacccttgttgaaaggtacaaaattgatgatgaaggcatgattgacgtcattatcaaactttccggcgatgccgtgctcgaaaacggcggcgcggttatcggcgaaggacttaccaaacaacagtccgccgcacgcgaaaagcttgcagcggaacacgaaatcattaaaaagcgcattgagtgcgccgcttcggcgatctcttttgaatatgatttcaccctgctctgcaacggctttgcggcaagcgtacctttcaacgaggtttcgcgcattgcggcggttgcgggcgttgaaagcgttgaatacatgcccgtgttcgaaattcccacggaaagctatgaaatcgttcgtcccggcgacacaaagatgacgattgcgaacgatgttattgaatcccgctacgcatgggatctcggcattgacggcagcggcatggttattgcaattatcgatacaggtatcgataccgataacgagtgctttgctcccgggcttgaaacagtcaaactgacgcaggaggacatcagccgcataatcgccgaaaatccggatatgaacatgcttgcgcttcgtcccggaacgactgcggaacaggtttatatcaacgataagatcccgttcgcatttgactatgcggataaggactgcgatgttaaccacggcggacaggcttccgcacacggcacgcatgttgccggcatcgcagcggggcaggcggtcgaaagcgcgggcacaagcttcgggctgacctcactcggcgttgcacccaaggcacagatcctgccgctcaaggtgttcagcaatcgcgatgcttccgcaactctcggcagcgttgcggccgcaatggaggatgcgatcgttctcggtgcggatgcgataaacctcagtctcggtgctgtcggcggtcccgtgtattacgaggactatacagaagtttttgatgcggcacttgccaacggcatcaatgttgttgcttctgcgggtaactccgcctcttccacttaccacagcctttgggaagcggatctcggccttacggacaatcccgatatcggcatggtcggcatgcccggaagcttcaattccgttttgacggttgcaagtcttaacaaccccgaatacttcgttgcgattcagactaaggatgcgctgctgttcgatgatgcatatcccgaatacggcggctcatggaaatcccgctacgacgacaaggcggattatgagtacaaagttgcaacccgcatcggcggacacagctacgagtacagcatttttcataccaccatcgacaatgcggatctttccgatgtttccggcaagcttctgtttgttgattataactccgaactgacgatcgatgaacacgcggcgtttgcacgcgaggcgggtgcggctgcactgtttatctttgactcttcaagagaaaccacctttgttgacacaacgagagaggattggacctatcccgttgcggcatacaaatacgattcgctgaccaaagctcttgaaccgtcccacccggcgacgattcatatcaacccctattgggatattgacgatcagggcggttacatgtcctcattctcaagctggggcacaaccggcggactgaccatcaagcccgagataacggccatcggcggcaatgttttctccgcatataacggcagcggcgcatacgcactttcaagcggcacgtcaatgtccgctccgatgacggcaggcagcgcactgcttgttcgtcagtatctgatgaacaatttcaatattcctgcggcggaacttccggaaattgtgaacaacctgctcatgagtgccgcaactccggtgctcaatcccgacggacttacctattccccccgttatcagggcgcgggctttgagaacatccgtgcagcaatgaccgccggtgcctatatcaccaccgaatgcggcagggcaaagcttgaactcggcgatgacccgcagaaaacaggtgtttacaacctcaatttcaccgttgtgaacatgaccgatgcggacaaaacctatactgttgatgcttccgttcagacggaaagtgcggagacgggccgaatcaatgcggacggcacccgccgttatctcatgacccagaccccgcacatgctgaattccgaaattgcgggcaacggcgcgattacggttcctgcgggcggttcaaccgaagtttccgtaacgattacgctcaccgaggaagatatcgcttatatcgaaaagtacttcccgaacggcatatatgtcgaaggtttcgtgactctcaccgcaggtgaggagaacggcgttgatctttccgctccgttccttgcattctacggcgactggcttgccctgcccgcaattgagcagagcagctactatgatttcaccgaaattgaaaccggtgaatgcgatgcaacccatgttgtcaacggcgtatacacctatgatgcaaattacgatgaatatatcggcctcggaacaagcatggcttggccgaacaacagcatttaccccacggaggaactcggcacgatgcgctatgttgcaaaccgcaacgcgatctctcccaacggggacagcatccgcgatgcgatcgatgcgatcgtaatcggattgaaccgcaatgttgagaatttttattacagcgttgcaaatgcagaaacgggcgttgaatactaccgcaaggatctcggttttgtgccgaagacgtattataatgacaatgcgggtcaggcactttacgtcggagcctatgataacgaggagtttgactgggattataccgaccttgaaggcaaccccttgcccaacaacacaaaacttactgttgcattctgtgcggaactggcttataatggcagggagcgcaccgaaaagtgggagatgccgctcacgattgacaccgaaagcccaatcaagaatgtttccatggtcagctatgaatgggaatatgaagaatggagcgatgaggaagacgactatgtcggcacgggtgaatactaccacgttcccactatcgtcattgactacagcgagaatcagtacatggactggaactgcggcagggctgcatatgtcagcggcgccagctcaagcaaagtgttccacaattccgttgaacccggtaccgtgaacggaacgacaaggctcggtctcggtccggacgatctgagcgacatcaacagtttcctcttccttgaatgcatgataagcgactatgcgggcaacggcttgtttattcgcatcgagcgcgatgatcgccccggaatctacaactccggcgagctttccgacagtgttgtaaatctccgccccggcgagacttacaccgtcagcgcacattccgatatctgggatttgttcacggatttcgactttacatggagcgttgaggatgagtccgttgcatcggttgccccgaacgagggtgatgttttctccgcaacgataaccgcaaacgaaatcggcagcaccacgctgaagcttacaaacggcttccttaaggagatgacctgcacgattaacgttgttgccgaaaactacgacatctccgcttcggcaggactcggcggaacaatatcgcccgacggaacaaccactgttgattctctcggttctgcatcgtacacgattactccgaatgagggctggcatgttgcggatatcattgttgacggcgaatcagtcggtgccgcaaatgaatacaccttcgactgcgttattgcaaaccacacgattgaagctgtgttcgcaagcgataactactttaatgtttatttcgttgactgggacggcacaacgatcaaagttcagacagtcggctacggcatggatgcggaagcacctgccgaccccgtgcgtgaaggctatgatttcatcggctggagcggaagcttcaccggaatcacggcaaacaccgtccttgttgcacaatatgaacccgcaagcggaatccttgtgggtgatgttgacggcgacggcattgtgaccgccgcagatgctctgctcgttatgcgttattgcagcgaccttgcggagctgacccccgaacagcttgaggctgccgattttaacggcaacggcgttgttgagcttatcgacgcgctgcttatcctccgcgctgttatctgatttgctgctgacggccgttatcatggtacgaacggtaacagcctttcagcaaccctgcatcgatttccgaacaaaagactgtcatcatcctttctgtcctttgcatcctgactccatttttgcaaagtcgttcggaaaatcggtgcagggcatagagcctgcattgccgcaatcgttgaccggttgcggcaatgtttttttacccctgcatcaatttaacggacgcacagccgccgcaggaaaacagtgaatcaaatttttaatataatgtgattctccctcttgaatccgtttaaaaaatgtgttaaactgatatatgtacaaaatttgaacatattcgccggtgtgatggaattggcagacgtgacggactcaaaatccgttggtagcaataccgtgtgggttcgagtcccaccaccggcaccaaacacagaggcacccgttgggtgcctctgtgtttgnnnnnnnnnnnnnnnnnnnnnnnnnnnnnnnnnnnnnnnnnnnnnnnnnnnnnnnnnnnnnnnnnnnnnnnnnnnnnnnnnnnnnnnnnnnnnnnnnnnnttttgcccggccggggagcgaaagcagtccgggcgcgcagcacggagtgcaagcaaaggatgatttgagcggagagtcccaccaccggcaccaaacacagaggcacccgttgggtgcctctgtgtttggttaagtcgaacgggactcgaagccggggaaacaaaacggtcctgtggagcgttttgcccggccggggagcgaaagcagtccgggcgcgcagcacggagtgcaagcagcggtatgcagctctttgttcaacacaccttatatgctgtatactaagacagtaaataagccgaaaactccttttttgccgttgtcggttgatcagctcatccgacaaagcccgaagtatgccatacaaatcacccccggcatttagggattccccccctgtttacctgttagactgcggaaaaggcggaaccttgcagaaaaaatgcgaaaaagaaaatatattttcgatgacgattgatttacctcctgtcgctgcccgtactgttgaacgaataagacttccccttacaacgaaagagtaacgaaagtctcacttgcaagcgaataatatataattaaaaccacataactattaatgcgcgtgtattgacttcgggcacccaaatcgtgtatagtatctacaagcagcgggaagatttatctgaatatcttgcattatgcttataacatgagctgtgtgcagactatccttattgcacgaacgcctcatgcagccgagcgaaataatatacgctctgcggccgcatatgagcctgccggtggttcttacaagaggaaagaagaagttcgttgcttgaaaacagccgattttacaaaaacaccggatttcttacatctgcggacagcgagagcttgcagcagagaagaaaatgcacaggataaagaagtgtagggtttaggtaatatctacggttcgtcagtattttttcaatgcgcagtgtctgcgggagaggagcacgctgttcttggaatcgcaccctcctccaatatccatagctctgatcccgttacgctgtccgtccctaacgtccgtttcgacaaagaactctttcgaacggtcgaagagcatatttgtcggaacgagggacggataacgctttgaaatacgcagctgcattccggtaaatgaatcctcttcttttcaaaatgcgaagaggttttggctgcaatatgtgcaatattaaggaagaacgactgccgctttcccgtcaggcgagaaacgggaaccctttgagaagaatccgttgaatcaaacgccctcgttaaattaagcggagaagtcaccgatatgtcgggactttgaagcattaggataaaaaagaataccccaggaggacgaccgatgaaaagaattatctcagtgattttggcagcgatgatgctgctcatgatcgccccaaccgccgcacacggcaaacgtgcggaaagccgtgcaccctacggatatgtggagcacgaatacgatcagctccttgcttttatggagcagaccaactcagccggcgtaaagaacggcacgcagctgagctccgcatacgatcccaacgacccggaaacatggggaggcatcttttggtacacagcaccaacgggattcatacatgccgaatacatcttcttcagcacttatgatttccccaacagaaatcttgtcggaaccttgaatctttccggcttctcaaagctgcgtgcgtttggctgcgcgggaaactccatcacagccgtcagcataagtgactgtccgctgctcgatgagttgaatgtcgcgcagaatctgctgacaaatttcagcgtaagcaactgtgcagagctgcgtcttgtctggtgtgaagaaaacatgctgccaagtgtttcaatgtctaatctcccgaaactgcgccagttccactgttatcaaaaccccattaccgaactggacgtttcaccctttgaaaatctctggtatcttttctgcggaaataccgggatatcgcagatcgatgtcagccgaaatccgcagctgcgggaacttcgctgtgaaaacacgcatctgacttcaattgacgtaagcaaatgcgagaaccttacggatctgttctgcaacaataccggcataagcgagctggatatttccaacaaccctgcattggcaaggttgttctgcaacaataccgacataagcgtattggatctttcacagaacacgaacatagacaagcttcgctgttatgatgcgaaactgacgtcgctcgaatggaagtgcattataccggggctctcccttgacataaccctcctttcagaaggcgacggctatgtgggcgtggactgggagcgtgtatatgtgagcgacaactattgggaaaacaggataaccgccgtggccacccccaacggaacgttcagaggctggtatatgggtgaatcccttgtttcttcgagtctgcggctccccctcggcgcggacatcgatatccccgctaccatgcttacggctaagtttgacggtacaactcccattccgcccacgcctacgccgccggtttctcccgaaccgcccacgcccacgccgccccctgcacaggaggacgagcctaccatatacggcttctgggtttcggagcgcataccgaacgatccggagttccatacgaactggtatacctggtcgagctttaacgccgattctccggaagaagtcactatgcactgcggtatgcccgccgaaacggggagcggatattcaagcctcgttgctgctgctgcctatcatgacgggtatatttacgggtatacggggcataataactttttcagggtgcgatttgacgatatggtcgccggggaaacaacgcagcagtactttctcgataccaatttcgcacagaacggtggattcaatgttctcgatatggaatatgactacagtcggaacaaaatgttcgccatcctgcaaaacagcagcgatgggacgcagtgcatatgcgaagtcgaccttgaaaccggcaatatgctgaatcttgagagcggaggaatcccgcttccttacatgaacaacgaggagggcatcccatacacaatgcagacacttgcaatagacctgcaaggcaacgcttactgcatggcgatgggcttctccgtatcggaactttgcagtcttgatctcgacacgggaatgtacgaaacaatcatgaccgttccggcaaagagctacgactatcagtccatgactatggatcattccaccggacatatatactgggcacagtatgcaacattttcggaaacatggaatccgtccaacctgcttttcaagattgatttgcagacgatgcaggcagaatccaagggaacgataggtcacggcagtcaatggacgggaatgttcatcccctacgacagcggtcagccccccgtaaccggcatcctcggagatgttgacggcaacggaatggtgcagattgcggatgctgtccttgccgcccgtcatgcgttgggtgtatatttgcttgaaggggaaagcctcattctcgcagacgtggacatgaacggagaaataacgatcgcagacgcagttctcataatgcgcattgcaatgggactgtatgaaccgtaaaaccccttgcctcgtaaaagctgcctttgaatcgtgaaaaacacggtgcgtttattcaaaggcggcttccgggaaaacaaaaagtgatttcgcttctcccatactcagccgggcaagggtgatcggttcttgccgaattgaccgttgcccggctgttcatataacgaaaaacaaagaaaggagaatcaagattatgacatggagcaaagatttaatcgaaaacattaccgacataggagagcttgaagcgaagctccggtttgatcgcagactgacacagcagatgcgggaactgtgtgaaaaattcccgatgtccgtcacaagatactatttgtcacttattgactggagcgacacggacgacccaatccgcagaatgagcatccccacgttccttgaaacggacatgagcggagagtttgatacgagcgatgaggagtctaacactgtgtgtcagggtgtccagcacaaatacaccgagagtgcccttatactgacaacaaatcgttgcttcatgtactgtcggcattgcttccgcaagcggcttgtagggcgttcggatgaggagatagccggaaatcttgaatccgttgtaaattatatccgcgagcacaccgagctgaccaacgttatcctcagcggcggcgatgcgtttacccttcccacatgtatcatcaagcactatcttgatgttctttcaaggatgaagcatctcgatctcatcagaatagcaacgagatcgccggcagtgtaccccatgcggatttatatggatgaagatctgcttgcctgtctgaaaaaatacagcggaaagaagcagctgtatgttgttacccaattcaatcatccgagagaaataacgccggaagccaccgctgccatacgcgcccttcttgattgcggggtcgttgtaaagaatcagacagtgcttttgaaaggcgtaaacgattctcccggcgtactgggcacgctgttgagaaaattgaccgcttgcggaacagtcccgtattacatattccagtgccgcccggtgagcggcgtcaagaacatcttccaggtgccgttttccgaaggatatgacatagttgagggagcaaaagcgatgcagagcggtcagggaaagtgcttcaagtactgcatgtcgcatccgaaaggaaagatagagattatcggaaaactgaacgatgagtcgatggtttttaagttccatcaggcgaaaaatgaccgggattgcggacgggcattcattaaaaaactctcaaaggatgctgcatggcttccggatgagttataaggggggtattcatatgtatgacaggaactccgttacaagctttcagaatgtgttcctcaatcggtcaatgaacggaatccgtatgtacgacaggtatctgattacaggtgcaaccggattcctcggcagagctgtatctcagaaactggcttcctgcagcatcccggttcgggcgttggttttatccaacgacccgtatgcggagcagcttccaaagggggttcaacgcgtcaccggagatgttctcgataaagaatcgcttgaggccttttttgacggcgcgggaatacacacctgcgtgattcattgtgccggtatcgtttccgttgcttccaatcccgatccgataatctatacggtcaatgtggaagggacaaacaacatcatttgcaagtgcagagaacacaatgtcggcagactgatttatgtcagctccgttcatgtaatgccggatattccgaaggatcatgttatcacggagggctggtgtttctcttccgatcttgttgacggggcatacgccaagagtaaagccattgccacaaacctggtttttgacgcagcacgtcacgggctgaacgcctgcgttgtattcccctccgggataatcggaccgggagatttccaaggcgggagtttcacagcaatggcgaaagcctttctcaagggaaagctgccctttgccgttcgcggcggatatgacttcgttgatgtaagagacgttgcaggcggcatccttggctgtgcaatgagcgggaagtccggagagggatatatcttgtccgggcgctatatcacgatcaaggaaatgcttgatataataggcaaagcagcggggctgcatcgccggcctctctgcttgccgctcggacttgccgaattagcagctccatattatgaaaagtggtgtattcgcaagaagaaaccgctgttctttacgccgtattcgattgccgttctcggatcaaacggatacttcagccataagaaagcatccggagtgctttcttacaaacctcgtcccatagaggaaaccctgcgggatatgaccgagtggctcaggcagcaggaagaaagctgatttcttccggaaacaagccaatctgatttttgaggagacagtctgaaaaataagatatatgtatgttgcgatgcttgtgcttgcagcctttatggcttttgcagcatacatactttagaccttcatgtcagacagcggctgttcggattcctgaaaaaatctttattatcagcgggcgatgaggcaaatataaacgaaactcaaacgagaggaggcgatatatgtgaaaaagaaaataactgcgggaatcctgttgctcctgctgctggcaggaggttgtgcacagccggcctatgccaattccgcccagcggcactggagcggcacggacgttacaggcgcggtcgtgacgggagaggattgccccatcgtggtggagagagaacttctgaccttcgatgtgcaggaattcccggagcagtattatccggatacggacagcttccttgcctacaccgggaaagtcacggcggaatacaccttccgtaatcccgccgactatacggtcacggccacgctggctttcccgttcggtaatcctccacattacggagaatacatctatgaccaagcaacgggtcggccgttcgatgtttccgatgccctgaaatacggcgtaacgctggatgggaagccgatagaggcggctgtccgacacacattgaaggcacggcacacttctttctcccttgatgaggatctgccgaagctggcagacagctatatctgcgacagttttttcgtccccgatatgccggttcgggtgcagaggtattccgtcacgggcatagatgaaaaatacggcgcggccaccgccgcatttgtcataaatgcggacagcgcaaaaacgcgggtattgtgtgagaagcaaaccggcggagcgcggctgaagaaggggagtcaagcctcctgttgggtacaaaacggcgatacgatcacggtatatatcttcggcgagctgccgaaggaggagcttatatggacactgtatgaaaacggcgcctgcgaaaaggttatcgaaggaacggtgtcgtctgagttttcggagatgacattcaaggactatgctctgcgcggctatgacgaaaactccggcattttggagtctgactggtacaatgctcaggtcgagcttctgcggctcggttccgaaatatgggggaatggtctggttcagattgaagccggggtattttcactgatgcggtggtatgagtacaccatcacgctggagccggggcagacgctgaaaaatgcggtgacagcgccgctgtatcccgccattgatgcggactatacaccgagcatctatgcgtatacctatctgctttccccggcaaaaacatggacacagttcggggaactggatatcacggtgaatacgccctattacatgacggaatgcggcattgacggctttacaaggacagacggcggatatgcgctgacactgccgggtctgccggagggcgaactgacatttacgctttcagaggcagagaggccgcagccgccgaagcggtcgatcttgcaccttgtgccgacagagcttatcattgtaccggcagcggtgcttgtcgccgtcgcagccgtgtttctgccggctcgcaggaaacgaagaacaaaaagatagagagaattggactttgaaaaaccgtatctcttcggttctgccgtcagcattgatgtcgtttttatcatattttcacctcgcagtcttattacgcgcagctattcggtgaaaatccggtgatttcaaaaaacagtgcgaaaactccactatcactttacgcacttcccgtggatgttacacactcgaacggacagttttcgtaaagagaaaagcagaccgcatctatttaaaatttcagcgggtacaagcatttttgcccgacagtgagacagtgcagacaagcgaagcatcaccgtctgtttcccaaaatcaatttttttcgattttgggaaacagaatcgcggaagcagccgaccttacagatatttaacctgtggttttattcgctgccatactgtatcggaaactctgccacaatgacagtgccgttttttgagctctcctccacgcggacggagccgccatggatgtcggcgatctcccacaccagtgagaggcccagccccgcgccgccgtattcccggctgcgagacttgtctacgcggaaaaaaggctggaagatgctttgctgatactcctctgggatgccgcagccgttgtcggagacgcggatcaggagcttttccggctcctgtgcgacggaaacccgcaccgagccgcccggtcggttgtacttgacggcgttctccgtcaggttgaagatcaggcggtagatcagcgcgtcgctgccggtcataatgccgtcgccctctgccgtcagcgtaacgccgcacttatccgagagcggtgcgagatccgtaaagatctcctcgatcattggagcaagccggatccgctcgttacgcgccacctgccgcagattactcatttccagcagggtcttggtcagccgggtaagccgctccgtctgctcccgcagaagggagagaaacttcgccgtctccggctgcatatcaggatgttccgctgaaaacagctccagctgcgcttgcagcagcgccagcggcgtgcgcagctcgtgggcggcgttgccggtgaactgccgctgggcggcaaaggcgtcgttcaaccgctcaagcatttgattgaaggactgactgagctgcttgaactccggcaaggcatcctcatcgatccgcatatccgccaaattgttcatctgcactctctccacctgagaagcaaagctgtgcaggggcttgagcgcgtgtccgctgacaaagtaggcaagaatgccgctcaataccgtaaccacagccgtgatgtaccagttggtggtgcgaaatcgtccctgcacaccatcgacaacgattgtcagttcctcgccgggttctgcgaactgcgggtcgaagctcgccgtgccttcatcagttataataacagtaccgccgccccgcagcgcgtccgcaatcctgtccatatagtacacgccggaggagcagagcatcaaattcatggcgatgcaggtcaaaccgatgagcagggcagtcatcagggtgatgcgccactgtaaggagaacttcttcatacgccgtcctcttccatcagataaccctcgccgatgcggttgcgaacggggtcataacccaatgcggcgcggagtttcttgcgcaatgcggaaatatgcacacgaatggagttgctgaaattgtccacgctgttgtcccagacatgctcaatcagttcttcctggctgacgggccgcccccgatgcaccatcagatattccagaattcccgtctcctttcgggtgagcgtcaaggctcgtccgttcacggaggcctttcgcgcacgggtatcaaaggtcaaggtaccgcaggtcaatatcacatcctgctgggtgaactgccgcagtgtcaggctgcggatgcgggcttccagctcagccaaatgaaaaggctttgcaagatagtcgttggcacctgcatccagtccctccaccttgtcctctacttcgctgcgggcggataaaatcagcacctttgtttcccggtctttctgccgcaaggtgcgcagcaccgtcattccgtccttccccggcaggttcagatccaacaatacaagatcatagcgttctatttccaacagttccagtgcttcttcgccgtcgcagcagtaatccacactgtatgcggcgcgccgcagactgcggacaatggtttcgcatagagcgcgttcatcctcgattactaaaaggtgcataaaaatctcctttatatacgtttatatgttgcgcttaacccgctgttctcattatacaggaaacggataaattttgtgtaaaaattttttcttaacaggaaccttatatcgacaatgatatgataacggcacaaaccggaaggagagctaagtatgaaatacggaataaaaactgctgcgcaggctgcactgctggcagttggaattgttatggtatgtctgggagtatgccgtaacgaggtggctacggtgctgagcaaagccatcaaattatgtctggagtgtgttggcattgggtaagaaggtttcggtaatctctcggtttctgtcccgtttccgaggctggatacaggcgggagcagctttgttgaccaacctgcacctgccgaacttcctcaagggaggactgtatcagggcgcagggaaagccgtctgcgtgcccggactcaattgctattcttgcccggcagcgtcgggagcctgtcccattggatcatttcaggcggtggttggttcgtcaaagttcagcttttcctattatatcaccggcttcctcatcctgttgggagttcttttgggacggtttatctgcggatttctgtgtcccttcgggtggtttcaggatctgctgcataaaattcccacgaagaagctctccacaaggaagctgaagcccctgacgtaccttaagtatgccattctgctggtgatggtctttctgctgccggcgttcctcgtgaacgatgtgggcatgggcgaccccttcttctgcaagtacctctgcccgcagggtgtgctggagggagccatcccgctgtcccttgccaattccggcatccgagcggcactggggagcctgtttacctggaaattcagcatcctgttggcggtgatcgtgctgagcgtggtattctatcgtcccttctgcaagtggctctgcccactgggtgcattctatgcgctgttcaaccgggtgtccctcttccaaattaaggtggataaaaacaagtgcgtctcctgtggaaaatgcgccaaagcctgcaagatggatgtggatgtgacgaaaacgcccaaccacactgagtgcatccgctgcggtatgtgcatacatgcctgtccgacgggcgcagtgtgcttccgctatggcttcggctccgataaaaaaacggaaaaaacggcggaaacatcaaaaaaagagtaa

SEQ ID NO: 170 - DNA, 15913 bp, unidentified
  source 1..15913: mol_type = unassigned DNA
  misc_difference 3432: note = a, c, g, or t
  misc_difference 3433: note = a, c, g, or t
  misc_difference 3434: note = a, c, g, or t
  misc_difference 3435: note = a, c, g, or t
  misc_difference 3436: note = a, c, g, or t
  misc_difference 3437: note = a, c, g, or t
  misc_difference 3438: note = a, c, g, or t
  misc_difference 3439: note = a, c, g, or t
  misc_difference 3440: note = a, c, g, or t
  misc_difference 3441: note = a, c, g, or t
  misc_difference 10838: note = a, c, g, or t
  misc_difference 10839: note = a, c, g, or t
  misc_difference 10840: note = a, c, g, or t
  misc_difference 10841: note = a, c, g, or t
  misc_difference 10842: note = a, c, g, or t
  misc_difference 10843: note = a, c, g, or t
  misc_difference 10844: note = a, c, g, or t
  misc_difference 10845: note = a, c, g, or t
  misc_difference 10846: note = a, c, g, or t
  misc_difference 10847: note = a, c, g, or t
  misc_difference 10848: note = a, c, g, or t
  misc_difference 10849: note = a, c, g, or t
  misc_difference 10850: note = a, c, g, or t
  misc_difference 10851: note = a, c, g, or t
  misc_difference 10852: note = a, c, g, or t
  misc_difference 10853: note = a, c, g, or t
  misc_difference 10854: note = a, c, g, or t
  misc_difference 10855: note = a, c, g, or t
  misc_difference 10856: note = a, c, g, or t
  misc_difference 10857: note = a, c, g, or t
  misc_difference 10858: note = a, c, g, or t
  misc_difference 10859: note = a, c, g, or t
  misc_difference 10860: note = a, c, g, or t
  misc_difference 10861: note = a, c, g, or t
  misc_difference 10862: note = a, c, g, or t
  misc_difference 10863: note = a, c, g, or t
  misc_difference 10864: note = a, c, g, or t
  misc_difference 10865: note = a, c, g, or t
  misc_difference 10866: note = a, c, g, or t
  misc_difference 10867: note = a, c, g, or t
  misc_difference 10868: note = a, c, g, or t
  misc_difference 10869: note = a, c, g, or t
  misc_difference 10870: note = a, c, g, or t
  misc_difference 10871: note = a, c, g, or t
  misc_difference 10872: note = a, c, g, or t
  misc_difference 10873: note = a, c, g, or t
  misc_difference 10874: note = a, c, g, or t
  misc_difference 10875: note = a, c, g, or t
  misc_difference 10876: note = a, c, g, or t
  misc_difference 10877: note = a, c, g, or t
  misc_difference 10878: note = a, c, g, or t
  misc_difference 10879: note = a, c, g, or t
  misc_difference 10880: note = a, c, g, or t
  misc_difference 10881: note = a, c, g, or t
  misc_difference 10882: note = a, c, g, or t
  misc_difference 10883: note = a, c, g, or t
  misc_difference 10884: note = a, c, g, or t
  misc_difference 10885: note = a, c, g, or t
  misc_difference 10886: note = a, c, g, or t
  misc_difference 10887: note = a, c, g, or t
  misc_difference 10888: note = a, c, g, or t
  misc_difference 10889: note = a, c, g, or t
  misc_difference 10890: note = a, c, g, or t
  misc_difference 10891: note = a, c, g, or t
  misc_difference 10892: note = a, c, g, or t
  misc_difference 10893: note = a, c, g, or t
  misc_difference 10894: note = a, c, g, or t
  misc_difference 10895: note = a, c, g, or t
  misc_difference 10896: note = a, c, g, or t
  misc_difference 10897: note = a, c, g, or t
  misc_difference 10898: note = a, c, g, or t
  misc_difference 10899: note = a, c, g, or t
  misc_difference 10900: note = a, c, g, or t
  misc_difference 10901: note = a, c, g, or t
  misc_difference 10902: note = a, c, g, or t
  misc_difference 10903: note = a, c, g, or t
  misc_difference 10904: note = a, c, g, or t
  misc_difference 10905: note = a, c, g, or t
  misc_difference 10906: note = a, c, g, or t
  misc_difference 10907: note = a, c, g, or t
  misc_difference 10908: note = a, c, g, or t
  misc_difference 10909: note = a, c, g, or t
  misc_difference 10910: note = a, c, g, or t
  misc_difference 10911: note = a, c, g, or t
  misc_difference 10912: note = a, c, g, or t
  misc_difference 10913: note = a, c, g, or t
  misc_difference 10914: note = a, c, g, or t
  misc_difference 10915: note = a, c, g, or t
  misc_difference 10916: note = a, c, g, or t
  misc_difference 10917: note = a, c, g, or t
  misc_difference 10918: note = a, c, g, or t
  misc_difference 10919: note = a, c, g, or t
  misc_difference 10920: note = a, c, g, or t
  misc_difference 10921: note = a, c, g, or t
  misc_difference 10922: note = a, c, g, or t
  misc_difference 10923: note = a, c, g, or t
  misc_difference 10924: note = a, c, g, or t
  misc_difference 10925: note = a, c, g, or t
  misc_difference 10926: note = a, c, g, or t
  misc_difference 10927: note = a, c, g, or t
  misc_difference 10928: note = a, c, g, or t
  misc_difference 10929: note = a, c, g, or t
  misc_difference 10930: note = a, c, g, or t
  misc_difference 10931: note = a, c, g, or t
  misc_difference 10932: note = a, c, g, or t
  misc_difference 10933: note = a, c, g, or t
  misc_difference 10934: note = a, c, g, or t
  misc_difference 10935: note = a, c, g, or t
  misc_difference 10936: note = a, c, g, or t
  misc_difference 10937: note = a, c, g, or t
tcagatcgccacatcctgccactgtccgccgatcagttcgcgggtggatttgaacccggcctttttcagcagttcgaatgcttccgcacgtccgtcgttcaccaggtcgggatagtggcagtctgagtttaccatcaccggaatatccagctcacgtaagcggtgcagatagtcggtatgcgggtagacctcctgtttcttcacgaggtttttcgtgttgacttcgaccatcagtcccttttcggcgatcaggtgcagacagtcgttgaatggtttttgataccagtccgcttgcaggtcgaagccttcgcatttgtgcccgttcatgtatatcttgtccatgtgcccgacaatgtcgattccgcctgcctcgatcattcgccgtgtggaactgaaatagtgggcgaccagcttgcggatatctccgtcgtagtaggcgtcgacagacttctggtactcccggaaaggaccgtcgatacacaccatattctcttccgcaagcggctgtgcgatcggaagaaagtggatggaaccgatacggtaatcgagcggcagattgcggaagtaggggatggacgcgttgtagctctcgtctaagaaatcgatttccagtcctacgtatatttccaaccggtcactgtatttctttttcagtcgttctatttctgtcagatattcgggcatatcgtctttagacatgttccagaatgtttcgaacggcagtggtgaatgggatgaaaaaccgtaggcgcggaacccgtgcgcaacagcgaatttaatgaagtcttccggcgtgctccgaccgtcacagaatgtacaatggctatggtagttactgagttgcataaatttttacttgtaaaagggcaaagataatttttttatcccgaaagacaacctgtttgataaaaaaaggcttgattgctgcctaagggttagcggcagaatcaagccttgaaaaacacgtgaataatgaaaaatcgtatgttttattttattacgttcagttcttttccaactttgataaatgcagcgattgctttatccagatgttccgtttcgtggcctgcggacaactgtacgcggatgcgggcctggcctttcggcactaccgggtagtagaagccggtaacataaatgccttcttcctgcatcttggctgcgaaatcctgggataatttagcatcatacagcataacggcgcagattgcggactgagtcggcttgatgtcgaaaccggctgctaacatcttttcacggaagtagctgacgttgttcatcagtttcgtatgcaaagcatcgctttctttcagcatcttgaacatttccaggctggcgcctacgatagcgggagcgacagagttagagaacagataaggacgggagcgctgacgcagcatgtcgatgatttctttctttccggttgtgaatccgcccatggcgccaccgaatgctttacctaacgtacctgtgaagatatcgactcttccgtatacattatattgttcagccacaccgtgtcctgtcgggcctactacaccggcagagtgggattcgtcaaccattaccaatgcgtcgtatttttctgccagttcacagattttgtccatcggggccacgtttccgtccatagagaacacaccgtctgttgcgatgatgcgatgacgttgtgcctgggcttcttgcaggcaacgttccaggtcggccatgtctgcattggcataacggtagcgttttgccttgcaaagacgtacgccgtcaataatggaggcatggtttaaagcatcggagatgatcgcatcttcttcagtgaacaacggttcgaacagaccgccgttggcatcgaaacatgcagcgtacaggatcgtatcttcggttttgaaatagtcggagatagcggcttccagttgtttgtgcagatcctgtgtcccacagatgaaacgtacggatgacatgccgtatccgtgtgtgtccatagcttctttggcagccttgatcagacgttggttgtcagacaggcccagatagttgtttgcgcagaagttcaaaacgtcgcttcctgcgtttactttgatgtcggctctttgaggagtggtgatgatacgctcgttcttatacaatccggcagctttgatgtttgccaattcctgagtaaggaaatctttcagtttaccgtacataactttgttttttgttagtatttttaattaagttgacaattatatctctattatcgcagacaagtggcaaaatattattcttgaaaccatttttttctttgtctctgatttgtctgccgatgcggcaaaggtcatattttttttgaatatataggctaaaaaatacaagaaattcataccggaatgtttttattctctatacctttgccatcgaaaaaacttaaaagaacatcaaacgcaatgaagaatgtattagtaattggttctaccggtcagattggatcagagttaaccatgaagttgagaggtatctacggtggaaacattgtagcaggttacatccccggacaggagcctaaaggcgaactgctggaatcaggaccttctgcaattgtcgacattacaaacgaacagcagattgctgagactgtgtccaaatataaggtagatacgatttataacttggctgcactgctgtcagccgttgcagaagcaaaaccgcagcttgcctggaaaatcggtatgggcggtttgtttaacgtattggaagttgcacgtgaaatgcattgtgctgtattcactccgagttcaatcggtgtgtttggcaataacacgccgaaagacaagactccgcaggatacgatccgtaacccgcgtactatgtacggtgttacgaaagtttcaggcgagttgttgagtgactactacaacatccgtttcggcgtcgacacccgttccgtacgttttccgggacttatctcctatgtgacacctccgggtggtggtacgaccgactacgcagttgatatctattattcggctgccaaaggtgagaagtttgtatgtccgatcaagcagggtacattcatggatatgatgtatatgccggacggtctgcgtgcagctattgaaattatggaagccgattcgacgaagttcgttcatcgtaattctttcaacattgcatccatgagctttgatcctgaaattatctacaacaacatcaaaaagtatgttcctgacttccagatggaatatgatgtggatccgttacgtcaggctatcgcagaatcatggcctaactctttggatgacacgtgtgcccgtgaggaatggggctggaaaccggaatatgatctggattccatgactcaggatatgttggctaaattgaaagaacgtttcaataagtaagaattaattttccgatcattagcagatcggtaggaaagagaatgagcaaacctgtagnnnnnnnnnncgaggatgaagcgaacgatatagtaggagttgttcaaagcagcctctttgtttggatcgtttttattcagtattgtaggctgtttcaatcataatgtgtctgttgcttgtgcagggaatgactaagtcaaaagtgtatgaaaaattatgttgtaaaacatgaaatggttaaatcaggttaagagaaagcttttttttgtggaaatattatgctgcataacataaactctctatatttgcactgtgtttttcatggtattagatttaaggttaacaatgaagattggctgtccgtgaggatagcctttttttatttatacccggttgatgttgtttcctccgagaagcgatcattttatccgaattgcccgttcttttggtattcttgattatatttgtatatctgaaaagattcattgtaataaaaatatctttatatggaaatgtacaaagcaaatgataaccggtatgccgatatggcttataggcgttgtgggcggagcggattgctattgccggtcatctctctgggattatggcataatttcggcagtgtagatgtgttcagtaactttattcagattgcgtatgccgctttcgacaatgggattacacattttgatcttgccaataattacggtcctgtgtatggatcggcagaggaaaatttcggccgtatcctgaagaaaggtctggggcaatatcgggatgaacttgttatttccacaaaagccggatatgacatgtggcctggtccgtatggcaactggggaagtcgcaagtatctgatggcaagccttgaccagagtttgaagcggatgggattagaatatgtggatattttctattcgcatcgtccggacccacagacgccgatcgaagaaacgatgggagcattggctgacatcgtccgccaaggaaaagccctgtatgtcgggatatcgaattacactgccggacagacggaaaaagcacttgccgtattgaaagaacatcgtgtgccttgcttgatccatcaagcgcgttattcgatgctggatcgcaggatcgaaccggacttgttgcctctgttgaagcaggaaggagtagggatgatcgccttctcgccattggcacagggcatgttgacggataagtatctgaacggtattcccgataattcgcgtgcggccaaatctacaggccatcttcaacgtgaacaggtgacggaagaaaaaataaataaagtaagacaactgaatgaccttgccaaacaacgcggacagacgttagcggaaatggcgattgcctggctgttgaaagacgaccgggtgacgagcgtcctggtgggagccagttcggttgcacagttgatagataacctgaaggcgttacaaaatacagccttttcagcggaagaaatacaaatgatagaaaatatattacagtaatatacactgataaatcatcatttattaatccaaacaattaatgaaaccattcttatatcaggttgcatcccttttttattctgaatacggggcggaagtgagccgtctggcctttgttttcccgaatcgccgtaccgggctgttcttccagaaatacttgtcggaagtatctgagaagcctcttttctcgccgacgatcctgacgatcaacgatctgtttgtacagttgagcggaaagcaggctgccgatcggatcagcatgctgtttaaactatatgatatttatttgagacatagcggttcttccgaaacgttcgacgagttcttgtattggggggaaatgctgctgaatgattttgacgatatcgataaatatatggcagatgcccgtatgctcttcaccaatgtgacggacctgcgtgagatagagaatgattttagttttctgagccctgaacaaattgcggctatccggactttttggtcttctttttacccgaaaggagatacgcccaaccaggaacaatttctggcggtctggcagattttatatgccctatataccgatttgcgggaagcgcttgccaccgaaggcaaaggatatgaaggtatgattttccgggaagttgtcgaacagatggagaaagacgaatgttgcgacctgccctatacaaaggttgtatttgtcggactgaatgccctctcggtggctgaagaacgtttcctttccggattgcaaaaacggggaatagctgatttttactgggattacgcctctccgaaagtgacggacccagataataaagcctcttacttcgtggagcgcaatttgcggcaattcccgtcgcaattaattgaaaatggacaattgactattgacaatgaagatgacgacaaaaagaagatcgaggtgatcggcatcccttccggaatcggacaggcaaagcaagtgtgcagcattctgaacgagctttgcaaggaagacgaaatgagtgcggaagaagcgttgcggacggctgtgattctgccggatgaacatttgttgattccggttctgaatgccattcccgaacagatcaaacggatcaatgtgacgatgggatatccgttggccggtacaccggttgcatctttgatggaatatattctggctttgcaaaagaatattcgttatgtggaccggaggccggtgttctatttccgggatgtcttgccaatcctgaaccatcggtatatctcgactacttctccagaggtggtttctaatctggtaaaaaatatttcagaaaacaacaagatttacatatcgtatgacgatctgaataagacgccattgttgtccatcctctttactccggtgactgcggtggaaactttctccgattatttgattaacgtgttgcaggaactgaataaagctgttgaaggtggaaagttgaaagttgaaagtgtaaatagtgacacggagccactttcaactttcaactctcaactttcaactattaacgacatcgaacaggagtttatcttccattatttcgctacggtcaaccggatgaaggaagtcatgcgggaggcgaatgtagaaatgaaaatcgacacctatttccgtttgctgaaacgtgtgacggacacaattacgattcctttccatggtgaacctctttccggtttgcagatcatgggtgttttggagactcgtgcgcttgactttgaccggttgattatcctttcgatgaatgaagggattttcccgttgaggaaagcggctaattcatttattccttataatcttcgtcgtggattcggtttgccgacatacgaacatcaggacagtgtttgggcgtatcatttctatcgtttgatttatcgtgccagccatgtcagtctgctttatgatacaagaagcaacggattgcagacaggcgaggttagccgtttcgtgcatcagttgcattatcattatgaggagccgatacagaataagttggttgtttacaatgtctcttcttccaagactcctgccttgcaggtagctaagacggaggaagtcatgaaccgtctggctgatttccggagtggcgggacgcgagcgatatcggcgagtgcagtcaatacctatctggattgtccgcttaaattctatttctccgttgtcgagggaatacgtgaagaagaggaggtaagcgagacgattgaaagtaatgtttttggaagtatcctgcataaggtgatggaagaattgtatcagccattctgcggaaagatggtgacggctgatctgctgaaagcgatccgaaaagatacgcctatgttgacgggagcagttgcccgtgcctttgccgaaattttctttaaaacggacattgttcgtccactcaccggacaaaatttcctgatcggcgagatgattcgcaaatatgtggagaaagtgttggaacgtgacgcaaagcagactcctttccgttatatcgaatcggaaaagaagataaaatgccttttcccattgacggataaaagcaatatccagttgaaaggatttatcgaccgtatagacgaagtacgcgatgtcgtccgcattattgactataagagtgggggcgggacgacgcagtttacctctgtagaagctcttttcgacaaagcagatacggatcgttccaaagcggttatgcaggtctttatgtatgcatggatgtataacaggtcagttcagctttcaactgctattcagccgggtatctattatatgaggaccctcttttcttcctctttcgatcctggaatttaccatcgtacagaccggttcaaaacagaacaggttttggacttcgccaactatcgcacggattttgaagacagcctgcgaaattgcttggatgaaatcttcgacacagaaaccccattcgtgcaaaccccgaacggcaaagcctgcatgtattgtccgtttaaggatatttgcgggaaatagtatttttacagatttcccatatattcatccacaatttcattcaggaagcggttgaatggaagaagctttcgaaaacaatcgatggtttcttccatccagtccggctggctgaaaaaactgtcgggcttaatacctataacgctgaagtctttgtgccttaatatatgaccgtaaggagaatcggaggggaaacctgccgggatacgttttagcatgtccccttcgagtgacgggtacagagctttgaaagaaggctcttcgatgatggaaacaaattcatctatgttattgtatatttcacgtcgaaggactttcaatatttccggtttgggataccagataccaccggacagtacgcagtattccggttcaagatgaaagtagtaagctccccggatactatgacgtcctccttgagcaatacaggctgacatataagtcttgtaaggcgacttgtcgaggctgaaacggatgtcgcgattaatacggaacagacatttccgtgcatccaatccccgtatatcaggatcaaatacactgattcgttcgattaactcttgtacttcgttgataaaagcgcagcgaagtttgtcatatcgttctctattttcatggaaccagacggtattattgtttcgtcgtaaatcgtctaagaatcggataatttctgcattcatattaggatattctttttttattgtattttgtatctccattgtttcggagtcatctgtttcatctttttgaaataacgattgaagtagggaatgtcggtgaagccgcattgccaggctatttcgttaatgtccttatccggaaagttgcggagtaaagtgccaacggcctctatccggtattcgttgatgaagtttgtaaacgttttgcctgtttcacgtttgaaaaacgagcagaacgccgttgtgctcatgctgattacgtttgcggcgtccgaaagagttattttctccttgtaatactcgatgacgtatttgaagatcagttgcatgcgttgcatgtttttggtaatgccgttgaatgccgtttcctgcaaaccgatagggattaaatcggttgtggttccgatttgttgcaggatgcggatcaacatcagcatcctttcgcttgcattcaggaggttcatttcttctaagcaggatttgatttttccggctgtttcgcctgtcagcaggatgccttgctggattgccgataaccggtgagcggcatattcccattcggtaaaaaaagacaggccggtttgtagcaagtcgggattgaattgcacaactatgcatctccgttttccatcaggctcgcaactttcggggttatacatccaacaatgtggttggttggtcgggaccagtacgacttctccctcctcgaacggctccagaaagtcgcctatcatccggtagcctgaacctttcacaacataacatatttctatttcgggatgaaaatgaagaggcatttcgtctttcgggtacaagctggaataatcgtagcgtaatgaggcacaactatcttttttgatttgttcgaattttagtttctcatgcatgtcggatgaactttctgataaaacacagtaaaattagacaataattgcataatctgcgacaattacacttaataattttgttgtttctttgcggccggaaaaacagaaagattgaattaggttatgaagaaaggtttgtatgcattgtcttttggcacatttgggttggggattgcagagtttattatgatgagtatcttgccggatgtggcggcaggatttgatatttccttatccgaagccggtcatcttatttcggcttatgcgttgggtgtatgtgtgggagcgccgttggtagtggtggtggccaggagttggccgctacgtacgatcttgcttgctttggttgggctttttgttgccgggaatctgcttatggctctgtcggccgattattggatggggttgtgtgcccggtttgtatcggggttgccgcatggggcttatttcggagtcggttcgattgttgccagccgtttggcggagaaagggaaaagcacttctgctgtagctattatgattatggggatgacgattgccaatttgttcggtgtcccggccgggaatttcctggggcactttctgtcctggcgtttggtttttgtgattgcagcgttgtggggtggcgtaacgatttggtttatccggaggtgggttcctgttttgcccgccctgccggcgacgaatctgaaagggcagtttcgttttttgagaaggccggaaccgtggatgctgattgctgctaccatgttaggaaacgggggagctttttgctggtatagctatgtcaatccgttaatgacggaggtgtccggtttcagtgtcgggacaatgcctgtattgatgttgctggcgggtgcgagcatgtgtgtcggtaactatttgggagggcatttgtctgatcgttttacacctggtatcgtagcgatgtccatgcagtttctgatgtttgcatcacttctgctgatttatttttttgcttcgtacggctttttgtccgctttgctgatgtgcgtttgtactggttgcctgtttgcagtttcttctccacagcaattgttgttgcttcaatattctcctggcggagagatgatgggcggggcgatggtccagcttgcttttaatttggggaatgccgtgggggcttattttggaggattgtcgatcgaacatggggcagggctggaaagtacggcattgatcggttcgttttttgccctgttaggaactgcggtgtttctggtattcaactatatggtgtttaaacctcagaggaaattacttttaaaggggggaatataatttccgaggatcaagacggcatttttggacatagaaacagccgtccgaaatcgggacggtgtttttggagataaaaaacagccgtccgaaatcgggacggtgtttttggagataaaaaacagccgtccgannnnnnnnnnnnnnnnnnnnnnnnnnnnnnnnnnnnnnnnnnnnnnnnnnnnnnnnnnnnnnnnnnnnnnnnnnnnnnnnnnnnnnnnnnnnnnnnnnnnaatcgggacggctgtttggatttataatgtctcttgtttcagttgttcgacgaaacgatcgattcgctgtagttctttcggaatatcgattccctgcggacagtgtggattacattggttgcaactagtacaatgatccgcttggcggagtttcggtacactgcggtcgtacccgatcagataagcccggcgagcttcgcgatagttttcatcctgtccgctctgagggacattcccctcgttcacacatttattataatgaagcaaaattcccggaatatcgataccgtaaggacaaggcatacagtatttgcagtcgttacacgggatggtcggatactgcatcatcaagtcggcggtgtcgaacaagaaacggttttcctcttccgtcaacggttgcaacggacagtaggagcggaggttgtcttgcaggtgctccatgtaagtcatgccgctcagcacggtgagcacgccgggaaacgagcctgcaaaccgaaaagcccaggaggcgacgctccgtcccggttcgcgttgcttcaggcgggcgacgatatggtcgtgcacgttcgaaagccgtcctccgaggagtggctccatgatgatggcgggaatcccccgtttctgtaattccccgtacagatattccgcgtcggtgtttcgcgggttgatctctttggcatgtttccagtccaggtaattcaactggatctggacgaaatcccattgatattcgtcgtgtttcgaaagcaaataatcgaacacctctatatctccgtgataggagaaacctaagtttcggatacgtcctgccttgcgttcttcgagcaggaagtcgagtatgccgttcttgacataccggttttcataggcttccataccacccatgccgatcccgtggagcagcatataatcgagataatcgacttgcagctccttgagcgaattgttatacatcgcgatagaggcttcgcggctccatgtgtcgggagagaagttcgaaagcttggtggcgatataatatttgtcgcgcggatagcggctgagggcgatccccatagcatgttccgaacgtcctttgcaataggcgggcgaggtgtcgaagtagttcacaccgtgctcgatggcatagtcagtcagccggttgaccatctcctggtcgatttcgtcatcgctgtctcttgcgctgtttttggcaatggtcggcaggcgcatgtatccataaccgaggatggaaactttgtcttttgtggacggcgtcgtgcggtatgtcatccggtccgtgggaataggggtggagcttcccgaacctgaggccatcccgctgtccgaactgcacccggagagcaacggggcggtagttgccgtgctgattcctacaatcttcaggaaatcgcgacggtttatcgcttgatgattgtcttttttcatatatgatgattcttttatttcttgatcaaatattccggtgttgttcgtgtccttccacatatatggcgctgaacggacgcgacgggcacaggttttcacaggctccgcagccgatgcatttttcctcgtttacgaccggcagttgaggcgaatccgggtcgttcgggtcttttgccaccatcaagatcgcctgggtagggcaatggcgggcacagttgccacaagtgacgccgtcccggttgacgatgcaattttcctgaatcagtacggcatgtccgatctggatagccgtcttgtccgctttcgtgatcggacggatcgctccggtcgggcaaacttccgaacatttgacgcattcgggacgacagtatcctcgctcgtacgatacttctggctgcataaatgtttgaaggttccccgaaggacgcagcacatggttcgtacaaaccgatacacaaagctggcacgcggtgcaatgctgggagaaattggcagcgctcagcgagcccggaggagtgatcggggttgtccggtccggtttctttttatcttcgatgatggccagtccgccgtcgactttcttgtccgggagttgtactttttcctgggctttcagtgtggctgaagtggcaagtaatgccgatacggtaaagaatttgcgacgatcgggcttgtctacgaccggttggttggtctgtgtttcagccttgtttgtttttctgcgtgtatatcggatggccccttgtcggcatttgtctatgcagtccatgcaatcgacacagcggctatagtcgatctcgtgtactttcgcattgatacaggctgctttgcaattacgggcacacaagccgcaaccattgcatttggacgtatcgataaccggtttgaaaacggaaaaacgggagatcaatcccaaaaacgttcctaccgggcagatcgtgttgcaataggttcgcccattccgccaggcaagtatgatcagtataatgaaggtaactgtggcaatgataaaggttgggaggctccgtagccagacttccgtttcgtagaaagcataattgtctgcccgttctgccaagtaggccagaaagttgtttccccattgccagaggggtgcgaataagttagaggcgatacgcccgtaagcgctgtaaggtgcgatcaatgccgcccatgctcctaacccgctgatcatggcaaggataaatatcaccatggctccgtatcttaaccaggacaaggcgggggaataacggaaacggtttttcttccgtttccccgccagccatgaaacaacatcctggaatatgccgagagggcagattacagagcagtaaacccgaccgaaaatccaggtcaatacaatgagaaacagtaccacgccgaggttgagtgccaataccgccggcaggaactgtactttcgccaaccacccgaaccatgcatgcaacgtccccgtgaaatcgagaaacagtagggttacaagcgtaaaacagataagtgcagttgtaagtctgatcgttcgcaacataataaactctttttagatagtctgttattttatgttgcaaacataataaaaggaaatggtttgcaacttacacgaattacggattgatgtaccaatattacggttttgtcaacttctgcaaaaagtctggctgacaaaccttagaacttcaggcaaggccgtccgccaataggtccagctatggccgccgtctcgtactcggaattcatgcctgatccctttctgcttcatgacctggtgcacctgcatgtttccgtccagcaggccgtcgtcatcaccgcaatcaatgtaataacgaattttgggcaagttgttttgattccagtcggaaaggatcttcaagacattgttttgcttccagtgttcgtctcccggcccgaacaggcggttgaataaatccttgtgcgatttgttttttcttgcctccatgactgtgtcgtcgaaaacggcggcactcaacggagcacatgcgcagaacatgtccggatgatgcaagctgtacaggaatgatccgtagccacccatcgacaatccggcaattgcccggctttctttgtcactgcgaatccggtatgttttttccatataggggataagttcttcaaaaaacatgtcttcataaggtacttttccatcatactggttgatataccaagtgtcccatgcgtccggcatgacgattatcatcggcacggcttcctcgtttgcgatggcacggtcggcaatcgttttcatttgtcccatctgtatccagttggtttcattgtccgtataaccatgcaagaggtagaggaccgggtaattccttttcgaggtgttgtagtcggaaggcaggtagatggagtaggaaactttcctacctaatttgttactttcgaaagagagcgattcgaaaactgtactttgcgaatatcctgcaacgttgaatagaaagcacaggatacaatagagataaaatttgtttttcatatactattaataattagatttgtttgtctggacagagtaagaataagagaagagagcttgccggaaaacccattaggtttcgacatactctctttcccttattgggaaattaatccgccaccggatagggaaattcggtcaaccctttgtacatgaattgataggtcggaacttcgattcccaattcttgggcagttcgtacgacatagcctgtcaatgtttccacttcggtgcgattgcctttttgaaaatcactgtgcatggaggttgtggagttgttaggcatgatcttctgggcgtcgatggcggagaatacttgaccgtccggcagacgaatccctttggcttctgccacgcttttgagttcataacctaatgtgatgaacagatcgatatggttatttaccacttcgccaatcgtttcattgaaataggaggtgatagtggcggcggtcgagatcatgaagaatttcttccagatttccaagtcaatgtcatccggtattgtggtaaggatacgggcgttggccaatatatcctgtaagtctttctgtcgtttcttgtttccttgtttacttccgaagaacatccggtcctttatggtgaacttttccactcttcccggtctgaccaagcgggaaccgatgtaaacgcatcctttccaaacctcattgttcggtaatagcttttgtatgcgttccgctatatccgctccgttcagcaggggaatgataaccgtattagggccgatgatcggagtcagctgaactatattctcctccaagtcgtagcttttggtacagcaaaacaggtaatcgactggtcctatttcagcaggattgtcggttgcgagggttggttttgctttgatcgtcaggaatgtatttttgacttcgatgccgttcttacgtatctcttccaggttttcaccccgggaaatgaaatagatgtcaatatcttcagagtctttgtaacgggcagctaatagtcctccgtagtagccgcctacagctcctataccggaaatcgctattttagttttattcat

SEQ ID NO: 171 - DNA, 13775 bp, unidentified
  source 1..13775: mol_type = unassigned DNA
tcagattttggcgagtgcctgttccagatcggctatcaggtcattgatatgttccgttccgatggatagacgtacagtgcccggataaatctcctgttctgcaagttcctgcgcattaagttgagagtgtgtggtacttgccggatggatgaccagtgatttcacgtcagctacattagccagcaacgagaaaatctccagactgtcgatgaagcggtgtgcttcttcctgtcctccttttacttcaaacgtaaagatggagcctgcaccattcgggaaatagcgttgatagagtgcatgatccggatgatcggagagtgacggatgattgactttcttcaccttcggatgattattcaggaagttcaccacttttagcgcattttctacatgacgttctacacgcaaagaaagcgtttccagcccttgcagcaggatgaaggcattgaacggactgatcgttgctcccgtatcccgtagcaaagtggcacgaatgcggatgacgtaagcagccggaccggcagcgtctacaaagcgtactccgtggtaactcggatcgggctctgtcaactgtgggaatttgcccgaagctacccagtcaaatttaccggagtcaacgattactcctcccaaggaactgccatgaccaccaatgaatttggtggcggagtgtaccacaatgtctgctccgtgttcgatggggcggattaagtagggagtgccgaacgtattgtctataatcaaaggtattttgtggcggtgagcaatttcggataccgcttctatgtcgataatattggaattcgggtttccgagtgtttcgataaatacggctttggtgttctcctgaatcgctttttcaaagttggaaaggtcgctcggatcgacgaaagtggtggtaacgccataattgggcaaagtatgcgccagtaagttatagcttcctccgtaaatcgttttggcagctacgatgtggtcgcctgcacgagtaatgttttcgaaagcataagtaatggcggcagcaccggaggcaactgccagacctgctatacctccttcgaggacggctacacgttcttcaaaaactccttgggtggagttggtcaggcggccgtagatattgcccggatcttgcaagccgaaacgtgcggctgcatgagcagaattgtggaatacataagaagtggtctgataaataggtactgcgcgtgcgtctgttgccggatctgcttgttcctgtcctacatgaacctgtaatgtctcaaagtgtaaattctttctttccataatcgtatgctttttaagtttaatattctctctttattttcttgcaaagttatgggatgtagatatatcgaacaatatatagtagaaatatagaaaataatgctatttttgtatcgttatacagaataaggcaactgctttattcttaaaaatcacctgttagaagaatatttttcttatggatacttttgagaaattggataaagtggatttgcagatactccgtactttgcaagagaatgcgcggttgacgaccaaagagttggctgcgcgggtcagtctttcatcgactcctgttttcgagcggcttaaacgtttggagagtgggggatatataaagaagtatatcgctgtgctggatgccgaaaagctgaatcagggttttgtggtcttttgtagtgtcaagttaaggcggctgaacagggacattgcggctgagtttacccgaatcatacaggatattcccgaagtgaccgaatgctataatatatcgggcagctacgattacttgctgaagatccatgctcctaatatgaaatattatcaggagttcattctgaatgtattgggaaccatcgatagcctgggttcgctggaaagtacgtttgtgatggcggaagtgaagcaccgatatggaatacatatttagtgggaggattgatgtatttcctattttggctactctttgttttcggctcaggtttccggtggattgccgataatgtctctgtataagctgccgtcatggtccttgtattttgcgtattggtagaggcggaccagtatatcactgtaatcaagaatggctgtatttgatttctgtgataaattggtgcccaggataccactgcctatgataccgggattgtataatacggtgtcttgtctgatagagttcattatcagttctgcacaaatatagtctttaatccttgcctcttctagtcgggtcgtgatgtatgagttcagatggcttttgtcatgttgagtcataaagccgtaccatagtaaacacttcatccctaattgggtagcttctattaatatatccagataggttagtcccgatgttcctttcttatctatctcataaggatcgatatgaatgaaagaatctttggggagtgatggcagtaatctcataactccttcaagagaatcggtattatataggcggacggatgtctgtagttccgcttgcttcgcatagcgttctacattatccaaagcactcttttctatatcgaagaatagaaatttttgggcctgtcttcctaatacttccattgctaaagccggggaacctaaatagtatcctctttgcatttctgcactttctatcttatagtaaatggaatcctttaaaacttgattgtcttcctctgctgctttttctaagaaatagtaaatgccatattgttgttccgaagtctgctgcatcggatagaaagcgcaggctgaatttgtttctacatagatttgtggatgctcgttccgaagaacttcgcaaagtatcagatgtttcagtacatcaggctgtttgccgtaatgagtataagttgccatgatactaaaggtttatagtgatgatataaatggtatacagcaaatatacgggataattcttagattcttgcatctgatttccaaaattatcctgtacatttgttatgtgatatgaaccttattctttgaacgcaatgaaatggcaacattgtaaatagcttcgctctatatggatgatgaacaatggtgaaatctgttgttcaggtcttttgtggctaaacaggtcacctgatattttattatattattttagaaactatataaagaagcaattacaatgaatacaaatatttatccgcgcaccaatgaccttcagaccgtctatctgaatgcagttatcaataatcctcatataaaggttggtgactacaccatatacaatgattttgtgaatgatcctgttcagtttgaaaagaacaatgttttatatcattatcctgtcaatggagaccgactgatcatagggaaattctgttcgatagcctgtggagctaagtttcttttcaatagtgcgaatcatacgttgaattctttatcgaattatccgtttcctatattttttgaggagtggcagttggataagggaaatatcacttcggcatgggataataaaggggatatagtgattggaaacgatgtatggattggttatgaggctgttgtcatggcgggcgtacatatcggcgatggagcgattattgcatcgagggcagtagtcaccaaagatgtacctccttatacgatagtaggcgggacgcctgcgaagaaaatccggatgcgttttgacgaagatacgattgtgcaattgcaggaattgaaatggtgggattggagtactgataagatagcccattatttgcctcatatcatgaatggggatatggaggaacttatgaaataaaaagtatctttgtcctcaaacaatatatgtatgaaatttataattgaatccggttccctgaccgatattgacgaactggagaaactatacgatgaattgaatgaccatttatcggctactaccaattatcccggatggataaaggggatttatccggttcgtgaaaatgccgttgctggtgtgaacaatcagagtctgtttgttgccagatgtggcgggaggatacccggttctgtcattttagaccatcagccggaagaggcttatgagaatatccgatggaaagtagaggcagattacagtcgtatttttgtagtacgtacttttgttgttcatccatctttcctgcaaatgggagttggtcgggcattgatggatttttcactggaactggctgtaaattcaggaatgaaatccatccggctggacgtctatgagaagaactttcctgctatctcattatacgaaaaatgtggattcgaatatattgataccgtagatttggggttggggcattacggactggattggttcaagttgtatgagaaggttatttgaactgtaataatgacatagaatggaagctccgatagaatctatgaagcatagattttgttggagcttcctttttataatgaatatggcatttattccgaagatttaaataatactctttttcatttcaaaaacaatgtccttgatacatacattttctgatagattcagtagatatcggatcgtatttagtaaatcatcgggttgtaccatttcttcatctttaaaaggagttcctgcttttttcgccatttcagtattcacccatccggggcaaagggtcgtaacacggatgcccaatggcgctaactcacggtacagagattctgccaatccgagaaatgcaaatttggtggagccataaatacctccatcagcaaaaccatatttagcggcacgggatgcaatattaaatatgtatccgtctttctgcgctttcattatctccgtcaccgtttttagtattccatattgagcgatgacatttatttccatgatcttcctgaagttatccacagattcgcttagagagccgtccataaacatggcggctgcattcaccaagatatcgacggtgccatatttttgatggatgtttttgatttcagtatctacctttgtacagtctgtgatgtccaacggcaatacaataggttcttgtacatttttgtccgacagcatgatttcatcatgcactttctctaagttctgcctgtttcgggctatcaataccacccgataaccatcctttgccaaacctgctgcaatgacagcaccaataccttgacttgctcctgtaataatagctaatcctttttgcttttccataacctgaaatttaagtgagtttataaattatgatgtaagaaatactgtgacggtatagggacaaaaaaagaagcctcggaatattccaaggcttcttactaattatatgttttagcacattctgtttgatttcttcggcgcaaccgtagcagacaaggctaattcctttgaattttgccctttccctatgaatgcgttgtaatatagggaaatcaaaaatgtctgtgtgtttagactgttccattagttgcgatttcatttgcaaaagtaggcatatcttgttgaataagaaagtatttcgccccgaaaataatgatggttatctacttaaatacttattgatacatctccggtcccaatttatccctcgcttgacaattttggccggtatacctgcaatgattacattcggctcattaaattcttttgttacgatgcttccccaaccaacgatactgttgtccgctatcttcacattcttgccaatcttgctatctttccctatccatacatgcttgccgatttctatgcacttggcaaaattgatcggttcaccctttaaatctgttattgtatgtgcatcagtacaccatatatcaattccccagcttaactgactgtcatctccaatactaacatatgagtcatcttcctgcaaatacaatgtaaccccattgataacaacacggtttccgatatctatccggcaattgttggctgttcttgaaacaccgacacccagtcccggcagctgtccgatgattagctttaatcccgtcatgcctaatatggtagaatatcgtaagatgatcgttcctatatttacgatattattatccccttttacgatcagaagaaatccgttgctgagtagcaaatcctctgcactctcttcagtgtcgaaatacattgagatatgattgttatttcctgtgattgtaatgttagcctgattaataatcttattgaatttatcattcggagaagaaatgcaatcaattctgttgtgtgggaatattaatgtaaattcattgttctgtccggtaatctgttccatatcattaatacttgtgggttatatccgtatctttttgatacgacttttatttcattcctcaaatgtacgaaaaagaataaactaaaactcatccgatagtcctttttcttagcttgtgttctcatggcgatttctaaagactttctgtactatatttattaacttcgttgcctgatatttattcgtgccactatagtggtacgcaagaagaactatagttccctttgcgttctactatagtagtccgcaagggaaactgtagtggtacgaactaattataggactaaaaatataaatatcagggaaggaaccggttagttattcgggcttttttcataatgcttttaaccggttatcggattctgataatgagcgttataaaacaagtttttcggtttaaattctgttttttcattcgaatgataatacatgatcaacttgttcccgatagtgtatattatgcaggatgatgatataaaggtaattattagaattgatttcttatttattatatatagctttgtaacttaaaaaaacagagaaggtatatttgaaataaaagttttacaacaaataatggtgtatacaaaataaatatcgggcgaatcactatgtacagaataatcatcttattaatttcattgatactatcagtacaatgtttttcacaaacggagtttactacttatctgtttgacatatccagaaacagagtgataccgatagcggtttatcagccgaagaaagtaaattcaaaaacgaaagttatcatattcagccacggctatgatgggaataaaaacagtaagtcgaaccaaacctattcctacctgacacgttttctttcacaaaaaggtttttatgtgattagtatacaacatgaattgtccgatgatcctcttttagcgatggaaggcgatctcatgcagacccgtatgccgaattgggaacgaggaaccgacaatatactttttacaattcaggaatttaaaaacttgaaaccacaattgaattggagagaactcatcttgatagggcattctaatggaggggatatgacaatgctgtttgccactaagtacccgcagttgatcagtaaggctatatctatggatcatcgtagaatgatcatgcccagaacgttgaagcctcgtctgtatacattaagaggatgtgactatgaggcagatgcgggagttctgcctaccggacaggagcaggaacaattcagaatgaaagtagtgaaactggatggagttacacatagcaatatgggtgagaatggaacggcggaacagcatgacctcatcaatcagcatatccgcaaatttctgacggaaagataactgaagcatcatttctattttatccggcagttttaaaccgaaagcctgtttttcttgtaactttgctgccgattttagaaaaagaagtttggaatgaacaataaatacgaagaacggctgggaacagaacgtatgttaccgcttgttttcaaaatggcacttccggcagtggctgcacaattcgtcaatctgctttatagcattgtcgaccgtatatacatcgggcatattccgggaattggcaccgatgcgctggcgggtgtaggggtgactacctctctcattatactgatttcttctttttcggcaatagtcggcggcggtggtgctccgctggctgccattgcactcggacagggagaccgtgtacgagccggaaagatattgggaaacgggtttgttttgctgatattgtttactttgctgacttctgtcatcgcatatacttttatggaacctattctcctctttacaggagcttcggaaaacaccttggaatatgcggttgactatctttccatttatctcttgggaacgatatttgtcgaaatatccacagggttgaatagctttatcaacgcacagggacgtcctgccattgccatgttttcagttctgatcggagccttattgaacatcattcttgatcctatttttattttctggtttgacatgggcgtgaaaggtgctgctttggctacggtactttcccaagcgtgcagtgcggtgtgggtggtaagtttccttttttcccgacgtgcctctctgcctttggagaaacgatatatgggactggaccggaaaattatcctttccatattagctttaggagtatcccctttcattatggcaagtacggagagtttggttgggtttgtcctcaatagcagtctgaaggagttcggagatatgtacatcagcgcattgacgattctgcaaagttcgatgcagtttgccagtgtaccgttgaccggatttgcgcaaggattcgttccgatcataagttataacttcgggcatggtgacaagcagcgtgtgaaagattgcttccgtattgtattggtaactatgttttccttcaacttgatattgatgcttttcatgattcttttcccttcgacggttgcgtctgctttcaccagtgatgcaagactgatagaaaccgtacgttggacaatgcccgttttcttgggtggcatgaccatcttcggcttgcaacgtgcctgtcagaatatgttcgttgcattggggcaggcccgaatctctatcttcattgctctgttgcgtaaagctatcctgttgattccgctggcgttaattttgccgaactttatgggagtaaccggagtgtatgcagctgaggctatatctgatgcgactgcggccatctgctgtacgctgttgttcttttggcagttccctaaaattttgggaaagattaaagagaatactttgcgtgtggagtaatcgtttctttataatttgttttttacttcacagatatgcccagcattacggttgtattctgactgttattccagaccgaatgaggtatttctccttttaccagaaaagcttcgttttcattaataatcttttcttccttgtcaagcagaattttggcttgcccgctgatcactataaataaatgattgtgtgggtgagtatgcagcttgacaggtccgccgccgtccggttctaaataggctattgcgccgtctattatttcaccacagttgccaaaaagttttttggctaagaacttcaagtgttccggtggggtgataaatccatctgattcattcatgactattttatttatgctatagtactgcaaatgtagttatttgatttgaatttatgcattttcattcgtaatgattgtgtgttgttgaagtctgaatggaataaaaatgcgtaaccgattacgtgttttttgaaaaatacttgcttgtattattgaaatccgatatatttgcgtaatcaattacgtatttaataacgcaagtagtaaagacatggacttttttaatcagacggggaaattagctatcggaagcagactacgtatgctgaccgataaaatcaccgtagatgcggctgcaatctacaaaatgttcggtgtggacttgaaacccaagtggtttcctgtcttctttgttttatcacgtggagaggcaaagacaattacgtctattgctaaagagataggacactcgcatccttcggtgagcaatatcataaaagaaatggtagctaagggattggtgaaagagacgaaagataaatccgacgggagaaggaatatggtaatgttgtctgccaaaggaaaaagaatgtccgactcttttgcggagcaatgtatagatgttacgtccgctatcgagcaaataacgcagcaaacccggaacgatctttggaaggcgattgaagaatgggagaaccttctgtcggataagtctttgctggagcgggtgaaggatgcgaagcaggagcgtgaagctaaggatatccaaatagtatcttatgaaccatgctatcaatctgctttccggacacttaacgaggagtggattactgcttattttcgaatggaagaggctgactacaaggctttggatcatccgcaagaatacattttggataagggcggagacattttggtagccctttacaagggtgaaccggtcggagtatgtgctttgtgtaagatggatcatccggtctacgattatgagttggccaaactcgccgtcagtcccaaagtacagggcaaaggtatcggagtgttgctttgtgaagctgtcgtgaataaggcaaaagagttgggcggcaaaagaatctttatagagagcaatacacgtttgaaacctgctatccatatctatcacaagctgggattcagggaacttcccgaataccacacgacttatgaaagaggagatatacaaatggaattaacgatagaagagtgaaaaatgaaaaaggccgatagtgaatttatcaaggggcgtattgccccttgcggactgcattgcggaaagtgctttgctttttctgacggagagatctcttatcatagcaacgaacttaaaaggtcactgggcaattttgatgtgtacgcacagcgttttgtggacttgcttgacgaacccgtctttgcaaagtatccggactttaaggagtttttgaatcacctgtccgtagcgacttgtcagggatgcagaaaggagaagtgcaagttgtttaaaacctgcaatgtacgtgtatgcagcgaggagaaacaagttgattattgtttccagtgcagccgcttcccctgtgaaaacactggtttcgacgagcatttatacaaaagatttgtaactatcaacaagcggatgcaggagatcggagtggaaaagtattacgaggaaatcaaagatattcctcgttactaggtcgtcggttcctctctttatctcatttcctgtgcgtaaatgttgatggctcgcagtgcctttgaaatctcagtcggggtgatgtcctgacattctattcttaatactttctcccagtcctccatatctacattccatttgtagatttggggacatagggtgaaaagagccgcgatatgttttatatcccgtgcattccttattgaggttcggaaaatgagtatttgcccttccatagttgctatcaattacttttgtttacctcgcaaaggtaggcttaaaaaggcttcgatatagaattattcgacgaatgccgtgattactcatgacgaattaagtaatttgggagactaacaatagggcacttgtatagttgtccttctccatttcaaatctttatccggatatggcgataccccatacatcgtcttttagtgcttgaccccttcaaataaatcgcggttgtctcgtgaactctgtgaattgcgcttgaagtcattgaatgtataactgatagtcaacgtaattacagggaatttcggttgaatccgtgtgattgattgtaaattggctgtctcaatgtcacttttgtaacgggcagaattgaatatatcccgaaaggagagggtcgattgcagatgaggactgaacaactgctgacgaatagccagattgacaaaccaaaaagaatccgacctcccttgtgtagtaaccgaaggccccacgaaattcccgtccagctgaatacgggtattcttatgaacccgaaaaaggttattgactgtaaagtcataattggtactcgtttccttttttcctcccgaatttatattattcattaccttataatagtaaatatttccgttgacgtccagattccaccatttagtgactttcaactgggtacttagctccacgcctaacgaatagtcattgcccacgttagccatggagtctaatgtaactcctgcctcgtacggaacacgcaagcgttcaatcttgtctttacgttttctgtagaacaggctggattgcaaagtgtgctctcccatagtctttttgtaattcagctcgaaagaatgtatgtattcgggccggatatccggattgccaatttcagctgtgtaataatcgcgataagtaatgtaaggctccataaaaaagagttccggacggttggtgcggtacgaataggcgaatgtcagcttctgttcgtgcggcagcgtgtatcccaaatgtacggatgggaacacctcaaaacgattcaccgtgcggtccgaaccttcaatagaacttctcagcacctggtgtgtatgttcacctctcacccctatctgtacgtcaaatgctttatagctgtcacttcccatgacataaacggaatgaataccccgctgaaaatagaaagtgttatagatatcctcccgccaataaaactcctttttctccggattccagaattgcatcgtgtaatcgccgtcttccagatacgaatgatattgatacccgctttccagcagaccggtcttgctataaggatagctgtaggacagattgccttggactgtccagcgtttttcgtcttcccacgcacggtgtccctgctggcgttgttcgttcttgtcgaaaaggtcactttggaaatattcaaggggattgtcttcataacccagcataaagctgccggttagggtatgcccgttgtcgttaaacttatgggagaatcctgcttttccaatattgaccgtcgagtgcaggtcatatttgtcgcggctaaaatagttggatggggcggatgctgcggcggaattggaatgtgtctctgtataatcgaggtccccttcgcgggtaaacttgtcatatactacctgcaactctgcattgacggaggttttgggagtaaaagcgtaatcaatgcctccccgtagtccatagtgataattctttccgattcgcggaccatcggacagggaagtggtggtcttgtcgctaacaacagtcgtcttcctctgttcgaaatcgctcttacggatgggattgttccagtgcccggcaaggtgccactgtaacttcttgtgttgctgggacaacaggaaatccagaccgttggagagagctgtgctgccatatgcattgactataccgttgatacccgcttgtttgtttttcttggtgatgatgttaatcattcctacttctccgtccgtatcatagcgtgccgaaggcgtagtaatgatttctatgttctctatctgggtggaaggaatctgttgcagggcctgtgaaccggaataaaagctgggcttcccgtcgatatataccttaaatccgctgcttccgcgaaaggtaacttcaccatccacatcgacccggacggagggagtattttccagaatatcgaccgccgttccgccgctgctcatgagattgttcgaagcgtctataatctttttgtccagcttgtagatgacttgccttttggctgcctgcaccactacttcggctatacctacctccaaaggttgcagttcgataatacctaagtccgtcactgattcggaagaggtgatactaatggcgccttgtgtgtagatgtcatagccgatcagtctcaccattaacgagtattctcctttggcaatacccgataagtggaagtcgccgctctctttagtatgggtaaatgaagcgggatcggtttcgcctttcttcgttagtacgacatcggcaaactctatcgggttgcctgtacctttttcctgtacttttcctttgatctgtacgggaaccgccat

SEQ ID NO: 172 - DNA, 7422 bp, unidentified
  source 1..7422: mol_type = unassigned DNA
atgaataataaaatcactaataccgatattaatagttttgaagaattccttataaatgagaataagagcagaacaactcttgataaatatatgcgggatatacgaagatttcaaatctttctttctgataactgttacccaatatctcaggatactgcagataaatatattgagattcttaaaaatgctgattccagtataagcagcataaatacaattatatcatgtataaacacattttgtaattttataggaagaaatgatattcactgcgttaatcttaagaaatctaagaccgaatcaacagattctaacttacttacagttgatgaatataaccaactccttaaaaccgctataaacaataacgattatagaatagctatgttaattcaagtccttggaaatacagatataagattaaacgaattgcaataccttactacacactctttagaaatgggaaaaattactgttatacgttacagcaaagaatataacatcagaattccagatgatttattggatggcttatacgaatatatagaccatgaagcaataataaatggggtgattttctgtactagaaaaggcacccctcttgaaagatctaatatatggagattgattaagaaactggctgttgatgctgggattaatccggataaagtttatccgcagaatctgaagcagcagcttgggaagaaatattatagtataaaatactaatctacttcatactcttctcttaatctatcaatcaactcaaatgtaaaaaactctgtacctatgtcaggtatcagttccagtcttgcaatggtttcttcttaatatggctttatcattcaaatcaatcggcacaaatatgcgtatattatcctgttcattctcacagtctttatattcaggataatcaagcaatgatttatctgctagttatggttcattatataaatcaactttgtatcattaggtattggatacggatctattctatgatgctccatctatattctccttgtcaaatatttctacaataattacagtcacaagccatgtaaatttttccaagcctctatcaattcatctctgttatctttataccattcttcaatttcttaaatcattgatgttgaccattttttattaccatctttatataactttccgtcgcttaatcggaaaacagcctcatattcattatgtaacacatgaatttctatgaaatctatttaatatatctaacaatctatatttattatgttctgatatattattttctacaatatatattaatctcttatacttgaacattgttttcacataatgattctatttatactcctcacatctcagaaaagaaatcactactataataaactacattcattcaaatctccttcttgcaccattctactgtctctgcaattccctctgaaaacttataatccggtgcaaatcctgtatctttaactaaatcctgtatatctgcacacaagtacataacctggcgtggaccataggcaacttctccaaaaccaatctctgcttccggattaaccgcatttcttatatcctcgatataatccttaagcggtcttgcctctcccccaccaatacagtaaaccttgccattaatacctttttctcctagtaaataaaatgccttccccgcgtccttggagtacagataatcccacatctgctctccctttgtacatgatggcttctctcctattaacagctttcctattgtagacataaccatcgtagcacttccgtcatatggaccatatacactaagtattcttgtccatatatgtctgattcccaacttttcacactggattcttgtcatctgtcctgcacacagctttgccattccatagccattttctggaaatgcaggaacctgcgaattgagctttccttccactcttccgtattctgcctgtgaaccagcccctataaatgcactgcaccccataacagccgctgcatttacagcgtccagtgcatatttcacattcatattctgtatatacatatcattgcggcagtcaccaaatgttccatcccacccaaagtgatagaacacatcaggcttaattcctgtcgcctgcacaagctgtggcagtttatcaagctcactaagatcacattcaactttcttaagtgaatctgattccttaattctgtaagaacgctttgagttctttcttacaaccgctataactttaacattattcttcataagagcatctataagacctaagcctactgctcctgtacatcctgtaacaactgccgcctgcattgtgcctcctgttgttttactacttctcttcgtccattaatggaataaacatctgtttctttaattcttcccttggaaggaacggtgcgagatcctccaatggagggcttacaagtgtaccatcctctaatctcttggtactgctcttaggctcccatacctgcttagtatctgtaaatatctcacagaatacaggtccgtcttcctttaatacctcatctacagtcttcttcatctcttcattagatgatgcactgtaatacttatatccaaaggcctctgcaatcttcttgaattcagggaatgagaggtctcctgattctggtccgattccaatcttgcaatgctccttaaacagattattctgtgtaagtcttattgaatgatatccattattgttgataaggaatatcttgattggaagcttattagtaagtattgtctgcaattcctgaaggttcatcataatacttccatcaccttcaagacatattgtatttcttcttccgccaccaatacatgttccaattgctgccgggagtccatatcccatgcttgctatagcactgttattagccatgcggcttcccttctgtattacatatgcctgattacctacaacacagcatgctccgttggatactgccgtaagactgttctctggaagtctgctgcttaagtatcttacaaatgcatatacatttgcagtgcttccattctcctcccactgtcttggctgtactgccggatattccttcttccatctctgtgttgttgcgagccattcaccacctgctgatacaggagcaatagctgccgcctgcttatcaagctttgtgaggaaatccttagcgtcagcccataccggcatctcaacatggatagtaggcttctttaactcagccttatcaacatcaaccattatgacctctgctgctcttgcccatgttttccagttatatccagtctgtctgatagatattcttgtacctacagcaagtattaaatcggcattctgaatagcccagttacctggtctgtcgcccatattgcctgctcttccacaatacagaggattatcatcttctattaaatccactgcattccagtatgtaacaataggtatattaagcttttcggcaactgacctgaacacatcataagcgcctgaaagtcttattccataacctgcatggaatacaggtcttttggcattcttaatcttctcaagtacagtctttacaacatcttcacttacctgtggtggaagctttgcgtcatcctctgccggatcatatccttcaagctcatcagtctcaatatatccaccctggaaattaacaggaatatcaatccatacaggacctggtcttcctgttgttgccaagtgccatgccttttcaagtgcatatcggatattcttaggatcttctatcatagttgcgtactttgtcatattagacacggatttaactatgtcgtattcctggtctcccattgcacgaagtggtgtctctgtaaactgaagtgcatatcttgaggttgtgtcgtaacgaacctgtccacttataataaacataggaatggaatccagccatccacctactacacctgtaagtgcattcgttccacccggtccagttgtaacacatactgctgcaattctgttatcaattcttgcatacgcttcggcagctatggcacacgcctgctcatgatgattgtatgttaccttaagcttttcattatgtcccaatgcatcattaagatgcattgctccacctccaactacagaaaacacatctgtaacgccatgttccacaaggaaattggcaacataatctgctaaacgaattctcataaactgccctccacatatactggttaattactgattaacggcttccttaatagtcttagccatataatcaatcatctcatctgtcattcctggatatacacctacccagaatgtatctctcataattctgtctgttgtttcaagtccgcctactactctgtagccttctcctgttgctctcatctcatcaaagcatgggtgctttataagatttcctgcaaaaagatttcttgtctgtactccgtggctctctacatactcaactactgcctttctgtcaattccttcctttactgttataaggaatccgaaccagcttggtcttgagttctcacatggtacaggaagaattaccttatcctctatatctgcaagtgctgctcttaatctgtcaaagttatgtcttcttctctcaacaaatgatgggaacttctcaagctgtgcacagcctaccgctgcctgcatatctgttgctttaagattatatccaaaatgtgaatatacatacttgtggtcatatcctaatggaagttctccatactgcttgtcaaatctgtgtccacagaggttgtcctttcctgatgggcatacacagtcacgtccccagtctctgaatgaacggatacacttattaagaagtgcattattagtatatactgctcctccttcacccattgtcatatgatgtggtgggtagaagctgcttgttccaatatctccgatagttcctgtgaacttttcttctccattgattgtgtacttagaaccaagtgcgtcacagttatcttctacaagccagagattgtgcttgtcacaaaatgcctttactgctgaaagatcaaatggattaccaagtgtatgtgcaatcataacagccttagttttgtctgaaagtgcatcttcaagctttgtaacatcaatgttgtactgtggaatagtaacatcaacaaatacaggtactgcaccatactggatagccggtgttattgttgtagggaaacctgctgctactgtgataatctcatcacctctcttgattcttctgtctccgagaagtggtgatgtaagtgccataaatgcattaaggttggcagatgaaccagagtttactactgatacatactttactccgagatattctccaagcttcttctcaaattcatctgtataacggcctgctgtaagccagaattcaagtgctgaatcaacaagattcatcatttccttgctgtcatatactctgctcgcataagaaattctgtcaccttccttatactgcttctggttatggtacttcttgcagtattcatctacaataccaagaatctcctgtcttgcttctaattcattcttattgtcaaacatatcatatcctctttcttattttattaactctgccctactcagtaaagaattcttcaatctctttatccatacatgcaacggcatctccgcctgctgcatatacctttgaccattcaacactcttctcaattgctgtatcaaagttccatctgggcttccagccaaatgttgtctttaactttgagcagtctaactttaagaagttggcttcgtgaggtcctccgtcatatttattaatccatgaaagaccttctccccacttgttacagaaagtatcaacaagtgttcctgttgtaatgcagtcactttcatcaggtcctacattatagaaacctgcatacttcttatcactgtactgctcctttgcaatcataagataagctgcaagcggctcaagtacatgctggtatggtcttgttgaatgtggattacgcacaattatatcttccttcttaactgcagctcttacacagtcaggaacgattctgtcattggcgaaatctcctccgcctataacattaccggctcttgctgttgaaactgcaacctccatatcattgaaaaatgaattgatatagctgtgtgttacaagctctgaacatgacttgctgttagagtatgggtcatatccgtcaagaggctcattctctctgtatccccatgcccactcattattatggtaaaccttgtctgttgttacatttaaaaatgattttacacacgggttaagtcttacacattcacagatattaactgttcccataacattagtttcataagtatatacagggtctttgtatgattcccttacgataggctgtgctgcaagatgaagcactatctcaggctgtgtctcttcaaacaccttcttaagatgctcaagatctcttatatcacctattacagaattcatcttatcctctacatctatcattgaaaaaaggttaggctcagtaggtggaacaagtgaataacctgtcacttctgctcctgctttaaaaaggattctgcaaagccatgagcctttgaatcctgtatgtcctgtaacaagaaccttctttcctttataaaaacttaaatccatcttaatcctcccggcttagtcccatttcttccaaggagctgttccagttgcaagatacttctcgagcatatccatctctctcttggtatccatgcactgccagaagcccttatgcatataggacattaactgaccttcctttgcaagtttttctagtggttctctctcaaatacagtgtcatcaccatcaatatagtcaaatatttcaggattaagcaccatataacctgcattgataggtgcaccgtctgtatggctcttctctctgaatgacttaacagcgttgtctcctccgatatcaagtacacccttctgctgttcaagcattacggctgtaagagtagcaatcttgccatgctccttatggaactcaacaagcttgttcatgtctacatcacagacaccgtctccatatgtcataaggaatggctcgtcccctacatatttctggatacgcttgattcgtcctccagtcattgtattaagacctgtatcaactacagtaaccttccatggctcacaatgctgctcgtgaataatcatatcgttagagccttttgtgaagtcaaatgtaatatcactgttatgaagaaaataatccgcaaaccattctttaattacatactgcttatatcctgcacatataataaactcatcaaaaccataataagcatattccttcataatatgccagagaattggctttcctcctatctctatcattggctttggcttaaactgactttcttcacttattcttgttccgaaacctccagccagtaaaacaactttcat

SEQ ID NO: 173 - DNA, 8413 bp, unidentified
  source 1..8413: mol_type = unassigned DNA
atgcccccaattttgatgtgggtgctggttgtcgttgccgctgccgtgtgcggggcgcttggttattattttggcggggaaaaccggaagcgtaccgccgaagccaagatcggctctgccgaagaggaagccaaacgcatcgtgaacgatgccatcaaggctgccgagcagaagcgcaaggaaaccatcatcgaggccaaagacgaggcgttcaagctgaaagctgacgccgacaaggaaatcaaggaccgccgcgcggagatcagccgccaggaacgccgcatggaccaaaaggaggaagcgctggataagcgcaccgccgccatggagcgcaaggaagaggacctgaaaaagcgcggcgaactggtggaagcccgcttggatgagctggaacagctcaagctgcgccagaccgaaaagctggaaaccatcgccgccatgacccaggaagatgcccgcgccgtgttgttgaagaacattgacgatgagctgacccacgaaaaggccatgaagatcagcgcctatcaggctaacatgaaggacgaatgtgatgccatcgcccgtgagctggtcggccaggccattgcccgctgcgcagccgatgccaccagtgaagccaccgtcagcgtggtgccgctgccctctgacgagatgaagggccgcatcattggccgcgagggccgcaacatccgcgctctggaaactgccactggctgtgacctcattattgacgatacgccggaagccatcaccctttccagctttgaccagacccgccgtgaagtggcccgcatggccctggagcgcctgatcgccgatggccgtatccacccggcccgcattgaggagaccgtggataagtgccgccgcgaactggaaattcagatgaagcgcgagggcgaaaaggctgtgatggaccttggtatccacagcctgcatcccgatttggtcaagctgatcggccgcctgaagtatcgcaccagctatggccagaatgtgctgagccattctctggaagtggcatggctggccggcctgatggctggcgagcttggcgtgaacgttcagctggcacgccgcgcaggcttgctgcatgatatcggcaaggcccttgaccatgagatcgagggcagccatgtgcagatcggtgtggatatctgcaagaagtaccgcgagaacccgcagattattcatgcaatcgaagcccaccacggcgatgtggagcccaagacggtgcttgccttcattattatggcagcggatgccatcagcgcagcccgccccggtgcccgccgtgaaaacatggaaagctatatcaagcgtttggaaacgctggaagccctgtgcaacggctttgagggcgttgaaagctcttacgccgtgcaggcaggccgcgaggtccgcatcctggtccagccggataaggttggtgatgatcaggtcatcctgctggcccgccaggttgccaaaaagatcgaggacgagctggattaccccggccagatcaaggtcagcgtgatccgcgaaagccgcgccaccgagtacgcaaaataaccaaagcgaataaaacagatgccgcacctggtatgggtgcggcattttgtataagcattgatttatcccgtggatgctgccatatgtttaacccctacaaatggggttcggcttgctgcggaaatgtaaatgcgtatagagcaaagccacggcgggatgaggtcattcatctccggcctaagagccggggcactgccccggttgcagggttgcgagccagaaggtcacatttgagtttaggcaataccgcataattctaagtgccgatacggcgagcgaggtgcggcagatgccaagccaaaagcgcagataatactggatgtcttatcgagcattttggcaacgcagatgccgtgctgcagccgccggagcggtgcttaagccgtcaggcgggaattgtgcggtgttgcctttacgaaaatgtgatggtgagcaatgcaaagcccagtgggttttgcaactgcacgagcgggtttgctttgcaaactgacgggcattgcccgtcaagcgggcctccgaaacgcgcctgcgggcgcagcgccctacgaatgcttataatgtttgttgcacgttataaaatgttttgcagggaacggtcttgaccgttccggggccttgcggcaaatgtgttttacgttttccctcgcaaatcttgttggctctgctccctcaattttccctcttgccaaggggcatagaatacgatataataaaaaataattgtgcggatttatgcccctgtgggatgggcggtgacgcacggcaaatcaggcggcgcggtataggcgctgcctatagttcgccgcaactgcggtcactgaaaaggagcgtcatcatgaaaggtatcatcctcgccggcggtgctggtacccgcctgtacccgctgaccatggtcacatccaagcagcttctgcctgtgtatgataagcccatgatctattacccgctgtctaccctgatgctggcaggcatccaggatatcctgatcatttccaccccaaccgatacgccgcgctttgaagcgctgctgggggatggcagccagtacggcctgcacctgcaatataaagtgcagccctccccggacggtctggcacaggcctttatcctgggtgaagagtttattaacggtgagccctgtgctatggtactgggcgataatattttctacggcgcaggtttctccaagcggctcaagtccgctgccgccaacgccgaagccggccgcagcactgtgttcggctactatgtcaccgatcccgaacgcttcggtgtggtggcatttgacgaaaacggccaggcaacttccattgaagaaaagcccgcacagcccaagagcaactatgcggttaccggcctgtatttttacagcaaagatgtgtgcgaaaaggcaaaacaggtaaagcccagcgcccgcggcgaactggaaattaccaccctgaatgagatgtacctgcaggaaggcaagctggatgtgcagctgctgggccgcggctatgcctggctggataccggcacgatggacagcctggtggaagccgccgactttgtgcgcatgatcgaacagcgccagggcatcaagatctccgccccggaagagatcgcctataaatacggctggatcaaccgcggcaaactgttggaaagcgccgagcgctatggcaaaagcccctatggccagcatctgcgcaatgttgccgatgaccgcctgaaatattgatgcggtataaagaaagaggcacaagatgaaaattctgattaccggctgccatggacagcttggaaccgagctgcaaaaacagctggctgatgaagaatgcgcccttggcccgctgccggagcgcctgcgcaaagcaacggtgatcgccgttgatgtggatgagctggatattaccgaccgcgaagccactgtgacctatatccgccgcatccagccggataccgtcatcaactgcgctgcttttaccaacgtggatggctgcgaaaccaaccgcgatgccgcttaccgcgtcaacgcccttggcccgcgcaacctggcattggcatgcgaaaagatcaatgcccgcctgatccatatttctaccgactatgtattctccggtacagccaacggcggtgtggcgttggatgaaagtgccctgcccgcccccatttcggcctacggccagaccaagctgctgggcgaaacctatgtgcagcagttctgccgccgccactttattgtgcgcacggcttggctgtacagctattacggcaaaaactttgtcaaaactatggtcaacctggccaaaacgcatgacaccctgaatgttgtcaacgaccagctgggcaaccccaccaatgcggtggatctggcctaccatatcttaaagctggcagtcagccatgattacggcatttaccactgcaccggcagcggcatttgcagctggtatgatttcgcatccgagatcatccgcctgtccggcctgccgtgcaccgtaaagcccgttaccagcgcacaatataaagagatgaaccccaaatccgcagaccgcccggcatggagcgcactggaaaaccgcgctctgcggtgcagtgtcggcgatgacatgcgcgactggaaagatgcaattcaggactttttcaataattgggatggtaaataaatgaaaacttatcttgttaccggctgcgccggttttattggctccaactttgtccactatatgctggaaaaataccaggatatccgtctggtcaacctggataagctgacctatgccggcaacctggaaaacctggaagatatcaaggacgatgcccgccatatctttgttaagggcgatatctgcgataaggctcttgtcactgacctgatcgccaaatatgacccggattacgtcatcaactttgctgccgaaagccatgttgaccgcagcatccgcaacccggaaatttttgttgagtccaatgttctgggcaccgttaacctgctgcagtgctgcaaggatgcctggtacgatgccgacgccaagacctggaaggaaggcaaaaagtacctgcaggtttccaccgatgaagtatacggtgccctgggcgccgaaggctactttatggaaacgaccccgctgtgcccgcacagcccgtactccgcttccaaagccagcgccgatatgttcgtgaaagcattccatgatacctatggcatgcccatcaacatcacccgctgctccaacaactatggtccgtatcagttccccgaaaagctgatcccgctgctcatcaacaacgccaagcaccacaagaccctgccggtttacggcgatggcatgcagatccgtgactggctgtatgtcatggaccactgcaaagccattgatatggttgccaacggcggcaaggacggcgaagtttacaatgtcggcggccataacgagcgccccaacatcttcatcgtcaagactgtcatcgagcagctgcatgaccgcctgaaggatgagggcatcagcgaagagctgatcaagcacgtggcggaccgcctgggccatgaccgccgttacggcattgaccccaccaagatcaagaacgatctgggctggtaccccgaaaccccgttcgagaaaggcattgtgctgaccattgactggtacctggcccacgaagagtggatggaccacgtgaccagcggcaactaccagaagtattacgagcagatgtacaaaaacaagtaatgctgccgcacatttgttaaattctgcaaaacaccccgccgccgctttgcaaagcggcggcgtttgtggtatactagttctgctgtttgtgacagcagaacaaagaatagtgaataaagaataaataataatgaaggtgaatcgccgtgcctgcggcacagcttataaaaattgggcgctgcttttggtaagcaatcaagcctaacccggcgtgcggagcctattttaatcatgcgcgcacggcgcgcatgccaccattattctttattattttttaattattattttacttgattgatcttgaggtttttttgaatggcaatttccagagaagaacaactgcgcaataaccgccgcctttcacgccagatcgtgggtgcagtggcaatcgtattgattatcattggtctgtttaccgtattaagctgggtggttggcgtgctgcgcagcgcgttggatgataccgaacgccgccagagctatgccgaccgtctgtacggtcttgtcatgtttgacactatgccgtttgacgatgtgagcaaggtggatcagtcggagtttttacaggctgccatctggggcgccgtgtaccagatccaaaagcgggataacggcttgagcgactatgagcgcgacagcgaaaccggctccatcattctgcccaaactggaagttgacacctacctgaccaacctgcttggcccggactacaagatcaccgatggctctttccagaccgaagagttcaattatacctatgacgaggaaaagcagggctatctggttcctgttaccagcatggtggctatgtataccccggaagtggaaaagatttccacccagagcggcaagacctatgtgacggttggctatatccccaccatcaacaatagctccagcggcgagatcaacctgaccgcccccacggagccgaccaagtatatggactatgtgttcacccgcggcgagggccgtaagtggtatctgagtgcattgcaggaaagcgatatgcagcccgaagtgtctgcttcgaccgcagccccgactaccgattccggtgacccgcaggagttggtgcagaacaacctggattccaccgtggccgataccggcaatcccacaggtgataccgccgacggcaccgctgaaccggacagcacggcggacgaccagaccgatgcccagagcgaacctgaagctgataccggggataccggtggggatgtgcaggatagttcaggtacggaataagctcctgctgacaaaacgataattttgatgaagctgcacagcccaaacgctgtgcagttttttgtatggtagggcggggtcacccgccccccattgaaggcggcccgaccgtacaataaaaatgtgtgatataccttgccccaaagtaggggagcagcgtccccgacaccgcagacaaaccttgcggcaaatctcattatggcagatgtgccaaagctccggaatggtcaagacagctccctacagagcaaggtatcatgtgtaccaaacagaaaaacgaccggtggaacagccagccctctggccgccgcagagaaacgctgccaatgcataaaacatgccgccgcgcagttatactacccctccacaacatcagctcaacaacaaaaatgacaaaacagactgcagaagaccgtgcttttttgcttgacaaaacaagcgcggcgtgataatatgatagctgtacattgctctatgtttttaacgttgaacagatgttaaatacttgtgcaatggcaacacggaaaagtaggagaacatagcatgagacggactttggcagcgccgggccttgcagctgtgctgggtatggcattgctgctgaccgcctgcggtaaaacaaacgcacataacaatacggcaggcgaaacggtcagcacggcactgtttgacttttccattacggatgtcagcctggtggaaagctaccccggcattgatatcccggatggcgaatgcctggtgcgcatgcgcctgaacatcaagaacaccagcagccagacctacacgatgttcctgcaggatttccaaatccagtggggcgagggcgacagcgattacggcacctgcctgaacgcagtggatgataccatgatgccgtatgcttatgagctgacccccggccaggagcgcagcgactggctgatggctgaaatccccgatggcagcaccagctgcaccattgcgtatcaggaatacaagaccgatggcagcaaaggcgatgcctactttgtggaggcagccctgtgagccagcagtcgcgcattcttgcaggggtgttttgctccggtatggcggcggcgttgattgctatggcggcactgcaactgcccaactggctgcagcagcgcaagatggtgagcgagagcccgccggtggtgcagactgcagaaccagagcagacgccggagccgcaggttaccgtggcccccaccgtgcagcccgccgttaccccggaaccgcgggattttaccgcactgctggagcgtaaccccgaagtgatcggctggatcaagatcgatgataccgatgttgacctgccggtgatgcaaagagaaggggacaacagctactacttaaagcacgacctggatggcaactgggatgacctgggcctgccgtacctggattatgagtgcgatatccagcaaagccgccatttgatcctgtacggccacaacatgggcgtgggggatacggtgcggttttccagcctgcaaaattaccgcgagccggaatattatcaggaacacccggtcattgagctggacagcctgaatggtggccagtactacaagatcgtggcagtttatgcaattaccacgcgcgaaagcgatggcgatgtgttccactttaaccagtatgtgaactttgccgatgatgcggcagagcaggaatacctggatgaagtggccaagcgcgcgttttataccacgggcgattatgcccgcgcagacgaacggcttttgacattgtgtacctgtacctatgaaatgtcggatgcccgcctgctgattatggcacgcccgctgcgggacggggaaacgctgacggcggatgaagttatcatcaatccggacccgctgcttccagcccgctggccgactggggcgtaa

SEQ ID NO: 174 - DNA, 5730 bp, unidentified
  source 1..5730: mol_type = unassigned DNA
atgaagaaaatcgttatcgcatccgcatgccgtactgctatcggcaagttcggcggcaccctggccaatgttcctgctgcagagctgggctccatcgtcatcaaggaagccctgaaccgcgccaatgtcaagccggagcaggttgaccacgtttacatgggctgtgttatccaggctggtctgggccagaacgttgcacgccaggcttctctgaaagccggcctgcccatcgagacccccgctgtcaccgtcaacgttgtctgcggctctggcctgaactgtgtgaacatggctgcccagatgatcgaagcaggcgatgctgacatcgttgttgcaggtggtatggaaaacatggatatggctccgttcgctatgatgaagggccgttacggctaccgcatgggctaccccatgggcaagagcgagctggtggacaccatggtcaacgatgctctgtgggatgcaaccggctgcaacatgcacatgggcatgaccgccgagaatgtctgcaccaacgaaacctaccagaagaagtacggctacagccccatcacccgtgagatgctggatgagttctcttaccattctcaggagaaggcagccaaggctatcgctgatggcgctttcaaggatgagatcgttcccgttgtcatcaagggcaagaagggtgacaccgtgtttgataccgatgaaggcccccgcatgagctccatggaagttctgggcaagctgaagccctgcttcaagaaggatggtatcgttaccgctgcaaactcctccgccatcaacgatggcgcagctgctctggttatcatgagcgaagaaaaggccaaggagctgggtgttgagcctctggctacctgggttgccggtgcactggctggtgttgagccggaagtcatgggtctgggccccatcgccgcaaccaagaaggttatggcaaagaccggcctgactgttgatgatatggacctcatcgaagccaacgaagcattcgctgcacagtctgttgcagtcggccaggctctgcactttgaccaggcaaagctgaacgtcaacggcggcgccattgctctgggccatcccgttggtgcttccggcgctcgtatccttgtcaccctgctgtacgccatgaagcatcgcggcgcacacaagggcctggctaccctgtgcatcggcggcggcatgggctgcgccaccatcgtggaaatgtaatttacggaggaattgacaatgtcctttgttacgactgaaattcagggcgctgttgcgatcgtcaccattgaccgtcccaaagccctgaatgcactgaaccccgaagttctggctgacctgaaggccgcttttgaagccatcgaccagaacaccgtgcgctgcgttgttctgaccggtgcaggcgacaagagctttgttgccggtgctgatatcggatccatgtccaccatgaccaaggcagaaggcgaggccttcggtaagctgggcaatgatgtgttcctggagatcgaaagcttcccgctgcccgttatcgcagctgtcaacggctttgcccttggcggcggcaatgagctggccatgagctgcgatatccgcatctgctctgataacgccgtcttcggccagcccgaagttggcctgggcatcacccctggcttcggcggcacccagcgtctggcccgcctggttggcatgggcatggcaaagcagctggtttactctgccctgaacatcaaggcagacgaagccctgcgtatcggcctggtcaacgctgtttacccgcaggctgaattgatggagaacgtgatgaagctggcaaataagattgccaagaatgctcccatcgcagtccgccactgcaagaaggccatcaacgagggtatctccaagcccatcaacgaggctgttgcggttgaagaaaaactgtttggcgattgcttcgaaacccacgaccaggtggaaggcatgcagtgcttcctgagccgtgaaaagccgaaacccaaggcagtgtttaccaacaactgattttgaaagaaaaatgaacaaagagtaatgaataatggtggtggatcacagcgctgcgcgctgttcaaaaaggccgggcgctgtggctgcaccaaagttcattattaaaatcgtaccgcttgcggcataccttcattcttcttttttctctattcattattatttttaacaggaggcacaactatgaaagttggcgttattggcgctggcactatgggccagggtattgctaaggcatttgcacagactgagggcttcactgttgccctgtgtgatatcaagcaggaatgggccgataaaggcaaggataagatcgcagctggctatgcaaagctggttgccaagggcaagctggatcaggctgaagttgaccgccgtatggctgctatcaccgctggcctgaaagaagatctgtgcgctgactgcgacctgatcgttgaggctgcttttgaggatatgaaggtcaagcagaccacctttggcgagctggacaagatctgcaagccggagtgcgtctttgcttccaacacctcttctctgtccatcactgagatcggcaagggcctgacccgtcccctggttggtatgcacttcttcaaccccgctgaccgtatgaagctcatcgaggtcattgcaggcgtgaacacccccgctgagactgttgagaccatcaaaaagatcagcgttgagatcggcaagacccccgttcaggtcaacgaggctgctggctttgttgtcaaccgcatcctgatccccatgatcaacgaagctgctttcatcaagatggaaggcgtttctgacattgccggcatcgacaccgctatgaagttgggtgccaaccatccgatgggccccctggagttgggtgacttcattggtctggatatctgcctggccatcatggacgttctgtacaaggagaccggcgacagcaagtaccgcgcctgcccgctcatccgtaagatggttcgcggcggcaacctgggctgcaagaccggcaagggcttctacgtttacaacgcagaccgcaccaagaccgctgttgatgccctgtaaaatttgaaacaatctctcctgacggagtgcaaaatctccgtcaggattgatttgttcagtcgcctgtaaacctgcccttgcggctttggctgcggggcggcgggcgcactgttagataaggaggataccgttatggattttactctgtccaagcagcaggctatggtacagaaaatgtacaaagaatttgctgagaacgaagtcaaaccccttgccaaaaaggttgacgcggaggaatatttccccaaagagaccgttgaaaagatggcaaagctgggcatgatgggcatttacttccccaaagaggtcggcggcgcaggcggcgatgtgctctcctacgtgatggctgttgaggaaatgagcaaggtttgcggcaccacaggtgttatcctgtccgcccatacctccctgtgtgctgctcctatctatgagaacggcactgcagaccagaaggcaaagtacctgcccaagctgtgcagcggcgaatggctgggtgctttcggcctgactgagcccggcgccggcaccgatgcacagggccagcagaccttcgctgtggatgagggcgaccattggaagctgaacggctccaagatcttcatcaccaacgctggctatgctgatgtcttcattatcattgctgttaccggttttgtgaccgacaagcgcggccgcaagcagaaggaaatctccgcgttcatcgtggagcgcaccgaccccggcttcaaggtcggcaagcccgaagataagatgggcattcgaggttcttccacctgcgagctgatcatggaagactgcatcatccccaaggatcgtctgcttggcgttaagggcaagggcttccagctggctatggctaccctggatggcggtcgtatcggcattgccgcacaggctctgggcatcgcagagggcgcaatcgacgagactgttgcctatgtcaaggagcgcaagcagtttggccgttccatcgctcagttccagaacacccagttcgagctggctgagatgaaagcccgcgttgacgctgccaagtacctggtttacaaggctggcctgaaaaagcagcaggccatgaacggcgctaaggttcgttacagcgttgaggctgccgaggctaagctgattgcagcccgcaccgccagcgatgttacccgccgctgcctgcagctgttcggcggttacggctacacccgtgactaccccatcgagcgcatgatgcgcgatgccaagatcaccgagatctacgaaggcaccagcgaagtgcagatgatggtcatctccggcgcgctgctgaagtaaggaggcaagacgtacaatgaaagctattgtttgtgtcaaacaggttcccgatacacagggcaaggttgctgtcaaggctgacggcaccatggaccgtgctgcgatggcaaccatcaccaaccccgacgacctgaacgccgttgaggctgccctgcagctgaaagatgagaccggctgcgaagttgttgttgttaccatgggcccgccgccggcagaaggcatgcttcgtgagctgatcgcccgcggtgctgaccgcggcgtgctggtatctgcccgtgagttcggcggttccgatacctttgcaacttcccagatcctggcagctgccgttaacaagatcggcgttggcccggaggatatcgttttctgcggccgtcaggctatcgacggcgacactgcacaggttggcccgcagattgctgaaaagctgcacctgccccaggtcacctatgttaccgatatcaagaaggacggcaactccctgatcgtcaagcgccagcttgaagatggctacatggagctgaaggtgaacaccccctgcctgctgacctgcatcaaggagctgaacaccccacgttacatgagcgtttccggtatttttgagtgctatgacaagcccgttgaagtgttcgactacaatgctctgaaggatgatcccctcattgagaccgacaccatcggcctgaagggctccccgacgaacgtttacaagtcttttgctcccccggtcaagggcgccggcatgatggttgaggatgctgcccagctggttggcatcctgaacgacaagcacctgatttgagagaggagagaagtacaatggctgaattcaatgcaatggacaccgccgccttcaagggcgtgtgggtattctgcgaacagcgcgaaggccaggtacaggccatcagctatcagctgctgagtgaaggccgcaagctggccaacgaccttggcgttgagctgtgcggcgttgtgatgggcagcgaggtcaacgaggactacctcaaggctctcggcggctacggcgcagaccgcgtttactatatcgacagccccctgctgaaggactacaccaccgatggctatgccaaggttctgtgtgacctcatcatggagaaaaagccggaaattatgctgattggcgctaccaacctgggccgtgaccttggcccccgctgcgcagcccgcctgcacaccggcctgactgctgactgcacccacttggatgtggatgtcgccaagtataaggacttcctgcgcaccacctccaccattgatgtggacaacaccaagtttgaagaaaacaccaacctgaagatgacccgtcccgcattcggcggccacctgatggcc

SEQ ID NO: 175 - DNA, 9120 bp, unidentified
  source 1..9120: mol_type = unassigned DNA
ctaattcttatattctttgcttatgactttgcagataacataaagtctctgatctgaaagacccatatagccattgttccagcaagtgtagagtatcagatcatctacaggcggatctgcggtcacatcataatacaaaagggaagtatctgtatctggaagtaccttagtttctgtgacctcataagtgaatttgccataatccgtttttagtataactcgatcacccactagaacattaggtaaatatctgaaataagtgtggttatgtgccgcaaggacaactctgcctgtagcacctatatatgcagaatagttagattgcacaactccttttgctaggagatcatcagagtctccccagtaaacaggctctttgtcaatgcctgccctatcattctttacggtcagctcggcatatttgtcaccgtaatacggatagattatctcatgctgttccgtctttttttcagaatcaggcactgtgacctctgtcaattctttcataggcagtgcgtctgtatttctgtatttgttatcctcagagggatttttcaaatgtgcattttcattgaatgctatcgatgcgtatccttgcagttctatgaattttttatagcttgccagcgtcatgatagacaaacaaagagccaaaactaaaagaggcgtcaagaccattacagccactgacgtcctcttattttttttcagtttgtttgcgtcagccgaggaagctttatcctcttttctgaccatatcttagcactctttgttcttcttaacagctactgtaataccaaatgcactaagagcaagtgtaagaacagcagcaacctgaacagctgtcatgctgtttgcaccagtattaagtgaaccgctgcctgtgtttgttccaatgtttgtattgccatctgaatcaacgacctgaacgttccaatccttgcttgtaagctcatctaccttgatagtaacaccaaagtgtttacctgtagctacgcaagcatcagcaatagcctttctgctatcctcgcccatttccttaaacacctgtctaagctgatcgtttgttagtgaagcaagatctgttcctgcaccaaaaagcttgtcagcaacaggctgaacatatgtagcaccacaatcagagagagcctttaccatgtaatcatagtcagcagagctgaactttgaagcgtgagaatcaaggtagttcttaagctctgatacatggttagaaggaacacctgctgatttagctgcagaaacaacatcagcagaagaagctgctgatgcgctcacaaccattgttgaagcaatgatgaacgcagtaacagaagccgaaattgacttaaatatctttttcataacacctatcacctttcgtaataatttcgtataacaatattatacactattaaaattcgattgtcaatatttttattggtatttttttcagaaaaaagcaaatgtttttacgataatttgaaatagttatgtataagtgcgtatatgcgctatttcatgtaattgtatattgctggaaaatacaaaagattttcagcattctcaaataaaagacttataacattactgtattggtgcttttatgatttttgtcaaagctgatctcaaagcatttagatataatttctacattatttattataattatacgccttgacacgatatcatgccatggtgtataattcttgtgtatgatataattgatataatgtgcaaggaggatatatgaaaaattatctcaatgaaagcctttcggctcaggaaagagctgaagcacttgtaaatgaaatgaccgtagaggaggcggcttcacagcttagatatgacgctcctgctgttgagcggctcggcattcctgcctataactggtggaatgagggtatccatgggcttgcacgaagcggtgttgccaccatgtttccacaggcaataggtcttgcggctatgtttgacaccgaccttgtgttcaaagtggcagatataacctctacagaagctcgtgccaagtataatgagtattcaaagcgtgatgacagggatatatacaaaggtcttaccctttgggcacctaatataaatatattcagagatccacgctggggcagaggtcatgagacttacggtgaagacccttatcttaccgcagagtgcggcaaggcatatgtaaaaggcttgcagggcagtggcaaggtactgaaaactgccgcttgtgcaaagcactttgcagtacatagcggacctgaggctgttcgccatgaatttaatgcagaggttaattggaaagaccttgaagagacctatctttatgcctttgaggagcttgtgaaaaaagcaaaggtcgagggtgtaatgggtgcgtataatcgtgtgaatggcgagccgtcatgtgctagtgagtttctaatgggcaagctcgacaaatggggttttgatggctattttgtttctgattgctgggcaataagggatttccacgaacaccatatggtgacgtcttctcctgtagagtcggccgcaatggcacttaaagcaggctgtaatgtgaactgcggttgtacgtatgtacacctgctttctgctcttgacaaggggcttgtgacagaagatgaaatccgagcttcctgtgttgctcttatgagaactcgcataagacttggcatgtttgacaagtcaacggaatatgacaacataccatacagcgttgtttcctgccctgagcataaagctgtatcttaccagtgtgcagtgaagtccatggtgttgctcaagaacaagggtattcttccgcttgacaaaaaatcaatatcaactattgctgtaataggaccaaatgcggacagcagagcggctctcgagggcaattataacggcacagccgacaggtatgttactttccttgagggtatcgaggacgcatttgatggcagggtgctttatgctgaaggctgtcacttgtataaggacagagtatcgggtcttgcacaggcaggagatagatacgccgaagctgaggcggcagcggcaaattctgatgttgtgatactttgcgttggtcttgatgccactattgagggcgaggagggcgacacaggtaatgagttttcatcaggtgacaagaacgatctaagacttcctgaaagtcagcgtgagcttataaagcgtgtcgcaaagatcggcaagcctatgatagtggtatgtgcggcaggaagctcaataaatatcgagcatgattgtgacgctcttatccacgcatggtatccgggttcagagggcggcaaggctattgcggatattatttttggtaaagtgtcgccatcaggaaaactgcctgttacattctataatagtgccgacaagctaccttgctttactgattatgctatgtctgatagaacatataggtacactagagataacattctttatccattcggctatggtcttacttatggagatgttgttgttacatcgcttagttatgacgatggcaaagtcaatgtagaggtagaaaataacggtgccgatacatgtgatgttatcgaactttacattaaatcacattgtgataatgctccggcttatcctgtgctgtgcggcttcaagaggatttttgtcaaaaaaggtgaaaagcttgatgttgaaatcgaaatacctgacaaagctttcacaacagtgtcagatatcggcgagagaaaacagtttgcaaaggaattcaccctctatgttggtacgcatcagcctgatgaacttagttgtcagcttagtggtacaaactgtatgagtatcgagatagaacgataatgaaaagagatcttacaaacggcagtatcataagcttgcttcttgctttttcaagcccgatgatactgtgaaatctgctccagcaggtgtataaaattgccgacacatttattgttggcagatctcttggcgaaaatgcccttgcggctgtgggcggcacatacaccctcacgacttttctttattcgatcataataggtctgtgcatgggctgtggctcgcttgtttcttattgtttcggtgaaagaaacgaacaccgtctgaaaggctgtctgaacatatcatttctgatgataggctctgttactttggtggcagagcctatcacattgtgcttttccgatgagattttgaaacttttgcatactccaatgaaaataatgttgttgacatctgatcatgttagaattatcctggcaggtgtgggactttgtttttacactctcgccaaagaacctcttttgcgactatccttcaagaaaaaatcttggaaggattgcagttttggtgaagtggtgcgaatgccgaccgctgcctcagttcagcaatctgtcatgaatttcggcatacttatgatacaaggactggtaaatagttttggaacggctgtaatggcggcttttacagtagccgttcataattgttaaattaagctgtcagcttatatgattttccaacaaatacttggctgattttgtttatcttattgtatgttataacaaaaaaccaaatttttgttgaaatacaaaaaaacgtatcgtttaaagttgactttttgaatagaatgtgataaaattattattgtacagtttattttttggaaaaataacgaaattatcaacaatagggtgaataatacaaatgaaaaaaaattacactatcaaggatcttctggtacttcttctcggaaaggtttggtatatcgttgccgcttcaatagtgtgtgcgatactggcccttttcgtatcaaaatttgttatgagtaagcagtatcagtcacacgtttcaatgtatgttaaaagtgctgataatcaatcaacgggtcaggataagactaatgttgacttacaggatattaacgcttcaaagtcattggtacagacctacattgttatacttactgatgacccggtaatgaacgaggtaagtgataagcttcttgagatgtatactcctgaacagcttgctccttattttactgtaacaagcggcagggtttcaaatgatggtctgagaaatgcttatagcatgaccgctgtaaatcagacagaggtacttcagataactgccacaacaaccaatgcaaagctttcttctgacctttgtaacatcatggctgacgtcgctccaagctttcttataagagttatcggtgcaggctcagttgaaaagataggtgatgctgaggtttacaatacacctgtttctcctaacaccactaaaaatgttgcccttggctttgttggtggcttgatggtggctgttctagtgatacttgttatcgacttcttcgacaacactgtaaagaattctgatgagcttggcgatatttatcagaagcctatcgttggtgagataatgaatattggcggaaagacttctaaaaaggatgaaggttcttctgctgacagaaaaaaacagcttctgttcaacaataaggatataccgtttaatattgtagagaactacaaaacaatgcgtacaaaccttatgtttacgctttctacaacacgaaataagatagttgtcgtttctagccctaatccaagtgagggtaagtctgtaacagttgcaaaccttgcagcttcaatggctgaaacagaaaataaggttcttcttattgacgctgatatgagaagacctgttcagcacagaaacttcaagttaaaaaacaatgttggactttcaacaatactgagtggtgaaagcacatttgataagtgtgtgcatgaaaccaagaatggcaattttgctgttcttacatcaggcgttttgcctccaaacccgtcagagcttcttgcttctgagaaaatgcgtgaattgcttgaatatgttcagcataagtatgattatgttattgtcgatggaactccgctgcttcctgtaactgacgtaatgagccttgcagacgaggtcgcaggcgttcttcttgtggcaagatatggcagaactacatatcaggagatagaggagtctatgaagaagcttgagataggcgattgcaatctgcttgggttcgttcttaatgatatttccgcaaagaacggttctcattacggatacaagtatagctacaagtataaatatgactacagctataaatacggtgtgaaggatacttctgccgaaagttaaatgacatggagatgttagattgactaccgattatcacagccacatactgccgaatattgatgacggctctgacagcatcaaaacatcacttaaaatgataaaaatgatgaaacagcagggcataggtataattgtggcaacaccgcatttttatatgcacagggaagcttctttagacagttatcttgtcaaacggcaaaatgcttatgagaagctcatggcatctgaccctgccgtgaaggatatacatattggtgctgaggtggctatagaaaaaggcatcagcgtattaggagaacttgaaaagctgtgtatcagcggaacaagacttattcttcttgaaccaccattcactcagtataacagttggatcgtcgaggagatagacgagatagcaaattctcgaaggcttattccgataatcgcccatgtacatagatatatgggcgtttattcaaagtcagatctgaaaagtctgatgtctgtggatgcagtttttcagataaatgcagaagcttttgagcatttttccacaagacgttttgttaataagcttatttcaagtggcagagattttgtctttggaagcgatgctcataatcttgatgatagaaaacctaattttgatcttatagctaaaagatctggaagtgaaaatataagacgttctgataaagtactcatgtctgctatggctgacgaagaaagaatgtttgctttttaagtatagaaaaaatattgatgatattataaatagcctgcactgtgccattgaggggtggccatggtgtgatcttattcattgctttaattgagcggaggtatgttttatttatggagaaaacaagtgaaaacacagttcaggtgtggaaaaacaaaaagataaagcattggatgcttattgcattctttctgtgtttctatgatattgttgccgtaaatctatcctacattttcggacttttcatcagatttgaccttactttttctgcaataccaaaggagtatatgcttgcctatgtaaagtttgctccaatatatacagctttctgtgttgtggtgttttttgtgttcaagctttataatagtttgtggagatttgctagcattggcgaactgtcaaggatatttttggcctcgatagttactaccatatttcaggctgtgggtataacattactcttcatgagaatgcctgtggcttactatatagtaggagcgggaactcagttcgtgcttataacagcagtgcgttttgcctatagatatatcacccttttaagagcaaaacaggtaacaaatcaggtggcagtgcataatgcaatggtcattggtgcaggtgcttcgggtcagatgatccttaaagagcttacgatgtcagaacgtgcaaatgcaagaccactctgcataatcgatgataacccaaataagtggggaagaaatatcggaggagtccctatcgtcggtggccgtgattgcattatggaaagcgtcaaaaagtataatattgatcagatcctttttgcaattccaactgcatcacctgagaacaaaagggatatccttaatatttgtaaggaaaccggctgtgagatgaaacagcttccgggcgtttatcagataacaaatggtgaggtgcttctcagcaagatgaagcctgttgcggtcgaggatctgcttggaagagagcctatcagagtaaacatggacgagatattccagcaccttaaaggtaagaccatattggtaacaggtggcggtggctctatcggaagcgagctttgccgacagatagcaggtcatgagcctaaacagcttatcatatttgacatttatgaaaacaatgcttatgaaatagagcaggagcttaaacgtaaatatggcagtaaactcaatcttgtgacgcttatcggctctgttcgtgacagcagacgtatcaatgacgtttttgaaaaatacaagcctgatatcgtttatcacgctgcagcacataagcacgttccgcttatggaaacaagccctaatgaagctatcaaaaacaatgttgttggtacatacaagacagcctatgccgctttgaagcatggcacaaagaggtttgtgcttataagcactgataaggctgtaaacccgactaatattatgggtgcaagtaaaagactctgcgaaatggtcatccagagcatggacgctatcagcaaggcaggcagaactgatcttctacctatgctccatgcacacgttgatgaaatgacagacggtatgcttgagaacgatccgatagacgagatagctgttgataatatagagagcagtgaagcggttaagatcgaaagcgttggcaataaggacagaaatggcacacagtttgttgcagttcgttttggaaacgttcttggaagcaacggctctgtgatcccactgttcaaaaagcagatagaagcaggtggtcctgttactgttactcatcctgatatcataagatatttcatgactatacctgaggctgtgagccttgttcttcaggcaggcacatacgcatggggcggcgagatatttgtccttgatatgggtgcgcctgtgaagatagacacacttgcgagaaatcttatcagactttcaggatataagcctgatgtagatattaaaatagtttactcaggtctgcgtcctggcgagaagctttttgaggagaagcttatggcagaggagggcatgatgaaaacggataatgagcttatccatatcggaaagcctataccgtttgacacagaaacgttccttggtcagcttggagagcttgctcgtgcaagctataacaatgacgaaaatatcgttgaaatggtcgaaaagattgttccaacattcagtcctgtaggtgataaaccaacaggtaatgaaaaatatggcagaaacgatgttgcagtttctgcggcaaaataa

SEQ ID NO: 176 - DNA, 9166 bp, unidentified
  source 1..9166: mol_type = unassigned DNA
tcatttttcatcaacaacctggaagatgtagaatttcagataatagctctcctgcgcctcccacagtattgggtggtcaggtgactgtgtcctgaactcgacctgacggagtcttttatgtacagctttagcggcttccttaatagtcttggtaagaagctcctgtgtcatgaagtgtgagcatgaacagcttgcaagatagccgccgtctttgacaagcttaagtcccttcatattgatttccctgtagcccttgattgcgttctttgtagcttccctcgatttggtaaatgccggcgggtcaagtattacaacgtcatatttctcacctgcttcgttaagctttggcagctcatccaatacatttgcacatttaaaatgtactgtattctcaagtccgttaagcttggcattggctctcgcctgttcaacagcatattctgatatatcaagtccagtaacttccttagcacctgcaattcctgcatttaatgcaaatgtacccatatgggtaaaacagtctaatacccgcttgtccttgcacagcttctgcattgcaagtctgttgtacttctgatcaagaaagaacccggttttctgtccattcacaacatctatcatgtagtggacaccattctcaactatctcaacattagtgtcaaattcatcaccaataaagcccttaactctctccatcccttcaagagtacggactttggcatcgcttctttcatatactccacggatatcaatgcctttttcacgaaggatttccttcactttttcgacaataagtgacttaaatctgtcaattcctaaagcaagtgattccacaacaagcacatctgagtacttatctataacaagtcccggcagaaaatctgcctccccgaatataagacgacacgcagaggtatctactgtgttaaatctgtattcaaccgcagcccttactctctcctcaataaatgtctcatcaacaacatctgtgtgtctgctcagcattcttactgtaatcttggattttctgttaataaatccgattcccatgaaataatcatcaaaatcaagcacctcaacaagatgtccgtcaattattccgtcagacatccattcaatttcgttatcatatacccaggcaccgcctgcctttaaggttcttccttcaccttttcttaatcgtatctttccgcatacgctgaataaatcttccattctgttccttcctgccagataattctgacatttatcataattattcataatatattaatccgttgacggattaccaagaaaataaaacatacatactcctgcaaccgtaataagaagcgacacgagcttaatccatgaaaatgtagtcttctcacttccaaacagcccgaaaagtcccagcagatacgaaacaattatctgcgcaactacaatcgtaacctccgctttagcaattccaagaccacttatactttttataactgtaaatgttataaatgcacctatcacacctccaagaagtgtaatcttgttatcaaccttaaacagcttcatgatatcaggtcttccgtcaattacccacataatcgcacaagtcgccagtgctgtcaactgcacaaacattgccgtaacccacacactgcttgctttcgtaacatttgtattaaatgcaccctgtaaactcataagtgcacctgatattattgcaatcaaaaatcctgccattaactaacctcctcattaatctgcataggataattattagttaataacaggatatttattcataatgttatttcgtactctgcgtactgttttcattattatttttagttgttttttctattgttgttgcaaatgtactgtaagctgtatcaacatttccaccatcatatacctgatgaagcataatctcatatctcatgtatacttctccaacaccgatatatttggcttttacaacagagtcagaataaatctggtgtaacttctggtagctttctgctctcttaacctttaaatccgcccttgcacagcttttcttagccatgcttccaagataatctgcataatcataagaaattgctcttgcaacagccttggatgcatctacattcttagtgtacggattaactactgccatcgtagtaacagacattgccttagaatcaaggtcatctcccattgaaggatactcacatattccataatctacatctgtaacattaatctctgcaagactgtctgcatcaagcacagtatagagcatatttccagtagaaaacagatctgcacagtctttaagacttactgtatttctgtcaataccaaatgcatcttttaactgagcgtacttagtaagaaccttcttaatcttttcctcattaagagatacctcagccctgttctctgcattaactccgcctatattaatataggctcctgctgctgcataattaaggaacattgaatcaggatcccattcaaacaccattgaaacatcctgattctcatctgtaatctgataattatcacttatattacgaatctggtctatagtatcaactgcttctgcatatttcttattatatacaagaaatgaagtgttgaacgacaccgggtaaccatataacttaccaccatacgaacatgcagtcattgcagccttaccatacacattctcattatagacttcaggatacatatcattctcagaggtaagacctgaaagataagccttctccatctcttcagatgtcagaaaatatatatcacatgcattgttattccttaccgattcgtcatatatataattaatatatgaatccgcctcaatatatactggcttaacagtcaccagttcattagatttcttaaactgtctggcaacgaattcaagataagactcatatgcactgtcattataccagacattaactgtaataggtccactaagattaagcttcttcgcagcctgtgtcctgtcatctttattaccacagcctgcaaagactgtcagcatggtaacaatcagcatcatactgataaatcttcttaatttcataaagtaaactcctgattctagaaggatttcttaagcttagctatgcattcatctacatctgccttagtaattacaagtggtggaacaaatcttataacattagttcctgctgagaacagaataagtccgttatcaagtgctctcgcaattacatccttaggattaactgataactcaagtccctgcataagtcccattcctcgtctctcgacaacaacatctattgtctcaacaagctcatcaagcttttcttcaaagtaagcagatacttccctgacattatctaatacatgctgcttctcaaaaagttcgaacaccttggttgctgctgcacatgcaagtggattaccaccgtatgttgttccatggtctcctggaactaatgccttcgcaacttcctctgtcgctgcaaatgcacctacaggaacaccacagccaagagccttggcaactgtaaggatatcaggcttaacgccatactgctggaatgcaaacatacttcctgttcttcccattccgcactgaatctcatcaagtataagaaggattcccttctcatcacatagctttcttacaccttcaataaattctttagtagcaggataaattccaccttcaccctgtactgtctcaaatattatagcacaagttttatcattaacaagttcctttacactgtcaaggtcgttatactgtgcaaacttaattcccggtatcataggtccaaatgcttcctgataatgcttattaccagttacagcaagtgctcccatacttcttccatggaatgaatgctgcattgcaataatctctgcatcagcctttccgttcttgacataataatatttctttgcaagcttgactgcaccttcaatagcctctgtaccactgttagtaaagaatactctgtccattcctgaagcctttgtaagtgctgttgcagcctctacagccggttcattatagaaataattagatgtgtgtataagcttatcaatctgtgcctttaatgcatcgttatattccttattgttataaccaagtgcaaatactgctatacctgctccaaaatcaagatattctttaccatctgtatcgtaaagtcttactccgtcacccttatcaagtactatctggtaacggttgtatgtatgaatcagcttctcttctgctgtttctataatctgctgtgtattcattattactctcactttcctattcttatgagcacacattttcacatgagccaatataatattataacctcaaagcttaaggttcgcaattatttatctgaatcaaagaatttttctgcatcgtctgaaagaatagctgtaccaacacccttgttagtaaatatttcaagaagaaggcagtgtggaattcttccatcaagaatatgtactcttgatacaccatgctcaatagcatctatacagttattaagcttaggaagcataccgccaccgattgttccgctctctaaaagtgttctcgcctctgaagtagaaagctcagatataagtgaatccttatcgtcaaaatccttatatacaccttcgatatctgttaagaatgcaagcttctcagcattgacagctcttgcaattgcacatgctgcgtcatctgcattaatattgtatgcatgaaaatcatcatcatatccgataggacatattactgggaggaaatcgtccttaagcaatgaatcaagaagtgttgtatcaacatctgtcacttcaccaacatatcctatatcctcacccttagaatacttcttctcaacctttaacatgccgccatccttaccactgataccacatgccttgacaccaagctgctcaatcattgaaacaagactcttattaaccttattaagaaccatctcggcaatctccattgttggctcgtctgtaactcttaaaccattcttgaattcaggtgtcatgcctgacttttcaacccatttgctgatttccttgccgccgccgtgaacgatgattggcttaaaaccaacaagtttaagaagaactacgtcctgaataacttttctcttaagttcttcatctaccatggcacttccgccgtacttaactacaattatctttctgttaaatttctggatataaggaagtgcctcaacaagcacctgtgccttcataagttcctctgtcatatcttttgcgctcataataatctccatttcatatttattcagatatctatttgctttaaaatgctgtgtcagattagcttctgtaatcagcatttatcttgacataatcaaatgtaaggtcacagccccatgctgtagcgcttgcatcgccctgcttaacatccgcaatagcaattacaggattctgtgaaagtatttccgttgctttctcctcgctgtaatctgtagcagttccatctttaacaatctgaagctcacctgcttcactcttaaagaatatatcaaccttttcagggtcaaagtcagcaccagaatatcccattgcacagagaattcttccccagttagcgtcatgtccgaatattgctgccttggtaagacttgatgtaacaattgacttagcgagtgtcttggcttctgccttagttgttgcaccctttacctgaacctcgaaaagacatgtgcagccttcgccgtcacctgcaatcatcttggaaagctctgtaaatacatagcttaagccttcatagaaagcattataatcagcaccctcttctgtaatcttcttattgccagccattccattagcaagaacaagagctgtatcattagttgatgtatctccatcaactgatatcatgttaaatgaatcatcaacaattgcacttgtcatcttctgaagaagtgccttgtcgatatcacagtctgttgttatgtagcagagcattgttgccatattaggatgaatcattcctgcgcccttgcacataccaccgattgttaccttagtacctgcaacttctacttctacagcaacctgcttgcttcttgtatctgtagtcataattgcctctgctgcctgtgttcctgcttctaatgaatcatcaagcattggagcaagcttttcaattcctgcacatattctgtcaacaggaagctgcattccgataacacctgttgaaccgataagtactgcattctccggtacattaagaacctttgcaactgcctttgcttcttctgcacatgcattatctccttcaacacctgtacatgcgttggcaacaccgctgtttacaactacagcctgtgcaaagtcttcattatatacaatgtttctgtcccatttaacaggagctgcaaatactttgttagttgtaaatgttcctgctgtaacacatggcttctcactgtatacaagtgccatatctttctttccgttcttatatttaatctgtgcttcacatccggcagccttgaatcctttagctgctgtaacaccgcctttaattatattcataacatcctcctattgtaccatcacatatactctgtcattgtgcatatttcgtcgtgtaaattctgaatttacgctacatttattatggaaacattggtgcaagctgtaatccctcattctctggaagtccgaagagaaggttcatattctgtactgcctgacctgctgcacccttaacaagattatctaacgcacccatcattataagcctgttagttcttggctcaatcttaaatcctatatcaacaaagttgcttccctcaacccagcgtgtttcagggcatacatctttaggaagtactcttacgaaatattccttatcatagtacttgtcatatgctgccttgacatcttcgtatgtaacatctttggcaaggttggcatatgctgttacaagaattcctctgttcattggaaccaaatgtggtgtgaagataagctttaaatcatctcttccacatgcataacctaactgttcctcaatctcaggtgtatgtctgtgagttccgacaccataagccttcatgctctcattaacttcgcagaaaaggttggcaaccttagcgccacgtcctgcacctgaagttccactcttggcatcaattataattgtatccggattgattattccttccttaaccattgggtaaagtgtaagaattgatgttgttgtataacagcccgggttagcaatgattcttgtatctttgcttaccttgtctctgttaatctcacataagccataaacagcttcatcaatatactgtggtgctttatgctcaagcttataccactgttcatatacattaacatccttaagtctgaaatcagcactcagatcaataatcttagtctttgaaagaatttcgtcattaacaagtgatgcacataagccctgtggtgttgctgtaaatataacatcaacctcgttagcaagctgctccatattgtcgtccatacattttgcatctacaagcttaaacatgtttctatatacatctgaataattctgatctatgtaacttctcgaaccgagccatacaatctctgcatccttatgtcctaataataatctgacaagctcgttacctgcgtaacctgtcgcaccgataatgcctactttaatcataactcctccttgttttgcgaagcaaaatgcatatattcaacatttatgcataaaataacgcaaaatgtaaattgataacctacattatagcaactttttttcttatgtaaaggatattttaaagaaaatttatatttatacatttttgttgcatattgatgtataatatgcataatttgttgttgcatttttaaataaagtagtttattataatctgcaggtgcatagcatatgtgttttactatgtaaacttaataatatacggaggaatatataatgaaagaaaaagttattcttgcttattctggcggacttgacacaactgccatcatcccttggttaaaggaaacatacaactatgatgttgtctgcgtatgtgcagactgtggtcaggaagaggagttggacggacttgagcagagagctctctcatgtggtgctgctaagttatatatagaagatatcactgatgaattctgcgacaactacatcgttccatgtgttcaggcacacgctgtttatgaaaataaatatttacttggtacttcaatggcgagacctcttatcgctaagagacttgttgagattgcccgtaaggaaggtgctgttgctatctgccacggtgctactggtaagggtaatgaccagatcagattcgagcttacaatcaaggctttagctccagatatcaagattatcgctccttggagagattctaactggaagctccagtctcgtgaggatgagattgaatactgcagacagcatggtattcatcttccattcagcacagactgcagctacagccgtgaccgtaacatctggcatatcagccatgaaggtcttgagcttgaagatccagctaatgagcctaactacaagcatttattagttcttggatgcactcctgaggaagctccggatgaaccagaatatgttactatgacatttgaaaaaggtgttccaaagtcagttaatggcaaagctatgaaggtttctgatattatcagagagcttaacagacttggtgctaagcatggtatcggtatcattgatatcgttgagaaccgtgttgttggtatgaagtctcgtggtgtatatgagactcctggtggaacaattctttacgaagctcatcagcagcttgaggaattagttctcgacagagatacaacaacattcaagatggatgttggaaacaagtttgcacaggttgtttacgaaggaaagtgggagacacctcttcgtgaagcacttcaggcattcgttgagaagactcaggaatatgtaacaggtgaagttaagttcagactttacaagggtaacatcatcaaggctggaacaacatctccatattcactttacaatgagtcaattgcatcattcaagacaggtgatatgtatgatcatcatgatgctgacggattcatcaacctcttcggtctttcacttaaggtaagagctatgaagaagcttgagaacgagaagaagaacaataagtaa

SEQ ID NO: 177 - DNA, 7433 bp, unidentified
  source 1..7433: mol_type = unassigned DNA
atgtctctttccgaagaagcaatcactcttcagcgtgctgcgcacgaactgatgtatttgggtatggacggcagtcccgtctatagcgatgacttgtcacggcggaacggtgaggtctaccgtcttaccatggctttataccggtcgggtgtaaaaggcactaccatcgaagagcaggcaaatgtctgtcttgcccttcttatgggttacagcgcctcttttgtggaccatggcgaaaagcagcagcatgtccaggaagtgctggactgttgttgggatgtgctcgacgcccttcccgcttccttactgaagctccgtctgcttaccgcctgctacggtgaagtgttcgacgagtctttggccgacgaaggccgttccatcatcgcctcctgggattccttatcacttactcccgaacagcaggaagcggttgatgaatttcagaatgtgacagacaatccctatccatgggaatatatcgatgaataaaacttttcatataatgcttaacaataaatccgtattgattaccggaggaacgggttccttcggaaagaagtttgtggaaaccattctccgtgattatccgcaagtaaagaaaattattatttactcccgcgatgagctgaagcaatttgagctgaaacagaaatatcccggtcataagtatccgcaactacgtttctttatcggtgatgtccgtgacctcgaacgcctgacgcgggcttgcgaaggagtggacgtgattatccatgcagccgccatcaagcaggtggataccgctgaatacaatcccgaagagtgcatcaaaaccaatgtacacggtgcgcagaatgtgataaaggctgctcttgccaccggtgtacagcatgtggtggccctttctactgacaaggcttgtgcccccattaatctttatggcgccaccaagctcacttccgacaagctgtttactgccgccaacaatatcagcggttccaaggacatcaggttctccgtagtccgttatggcaatgtgatgggttcccgcggttccgtaatccctttctttatcaacaagcgtgacaacggggcgaaggaacttcccataaccgatatgcgcatgacccgtttcaacatttcactggaagccggtgtcgctttggtcatgtatgccatcggacatcacctgggtggtgaaatctttattcctaagattccttcctatcatatccaggacgtggctaccgccattgcacccaatctgccgcaggtggaagtgggcatccgtccgggagagaaactgcacgaggagatgattactgtaaccgatgctcttgatacaatcgatttgggcagatattatgtcattcttccttccgtatctttcaagcacagtcgcgaagagttcatcagacatcacaatgcagtacccgttcccgacggtttccactacagcagtgacaacaatacggagtgggagacagtagagactatgcgcgagaatatcaagaaatacgttgaccctaatttcgaggtgaaatgataagcaagcctattccatacggtcgtcagcatatcacagatgaggacatccgggcagtcatcgataccctgaaaagcgattacctgacacaaggtcccaaaatcagggaatttgaaacgaaatttgccgaatatgtaggtgcacaatatgccgtagcggtgaacaatgctacttcggggcttcatcttgcagctaccgcactgaatgtaaagccgggtgacaaggtgattgtcactcccatgacctttgctgccagtgccaactgcattcgctattgtggcggcgaggtggtattctgtgatattgacaaggatacttacctcatggatatccgtaaactcgaagccatgcttaaagcttctcctcgcggtacttacaaaggtattgttccggttgattttgcaggctatcctttggatctggaagagttcagaaagcttgccgacgagtacggtttgtggattatcgaggatgcctgccatgctcccggcggctatttcatggacagtaaaggcaagaaacaacattgtggtaacggttgttttgccgactgtgccgtattctctttccatcccgtgaaacatatcgctacgggtgagggaggcatggtgaccaccaacagcaaggagctctatgacaagctttgtctttaccgtacgcatggcattacgaaagaccctgccttattgcacgagcatcatggtggctggtattacgagatgcaggagttagggtataattaccgtctgactgattttcaggctgccttgggtatttctcagctggagcgtgcgaaagcaggtcttgaacgtcgtcatgaaatcgtaagacgctataatgaagcgttttccggaatagatggtatcaagactccgttcaatactgccgatgtctatcatgcttatcacctttatatcattcaagtagctgaccgcttgggtctttataattatctgcacgagaacaatgtctatgcgcaggttcattatgctccgcttcatctgatgccttactatcagcagtggggcaataggaaaggcgatttacctatagtagaagagtattacgaacattgtctgagtcttccgatgtatcccacgctgacggacgaggaacaggagtatgtgattgaaaaggttatagaatttgtagcgaaatgaaaaatatagcaatcattcctgcacgtggcggcagtaaacgtattccgcgtaagaatatcaagccctttatgggtaaacctatcattgcatattccatagaggcagctttacaaagcggtctttttgaggaggtgatggtttctaccgatgatgaggagattgccggaatagcttgtaagtatggtgccaaagttccttttatgcggagtgccgagatgtcaaatgaatatgccggtactgatgatgtaattcttgaagtactgaggaagtataaagagcaaggcagggagtttgaaacggtttgttgcatttactcaacggctccttttgtcactcccgaaagactccgggaagcatacggaaaaatgaattcggagatagattccgttttcacttgtgtggcttattcctatcctatacagcgcagccttcacatcgtggatggaaaaattagtatggtttatcccgaatacaaaaatgcacgttcccaagatttagaaccgatttatcacgatgccggtcagttctatttctctcgcactgctccctttgtggagagccggactttttggggtgagaatacagccgggttggtactttccgaacttgaagtgcaggaccttgatacacagactgactgggcattggcagagatgaagtatgagttgcttcataaatgatgtaatgcagaaaatctatctccgtgccgatgcaagtgctgccatcggctacggtcactttattcgtactctggctttggccgatatgctgaaggacgattttgattgtaccttctttacttgccatcctaccccttatcaggtgagtgagatggagaaggtatgtcctttcatccccttacaggaagaatcacattatgatgagttcctttcccttttgcaaggtgacgaaattgtggtacttgacaactatttctttactactgattaccagcgtgccatcaagcaaaaaggttgctgtctggtgtgtgtggatgatatgcacgacaagcactatgtggctgatcttatagtcaatcagggattgggttacacgcgtgatgactattcgtgtgaaccatatactcaatttgcctttgggcttcaattttcattgttgaggaggcctttcttcaatgttgcgctgcagaataaacggaacaattattcaggaggtttatatgtattggtggcttttggtggttctgatttcttgaatttgacgtatcagaccattcatgcaattaaagccaaagacaatgtgaagaagataacggcaattgtcggtgattcgtatgcagccgagaatatggttgatgaccccaaagtaacctatcagaagaatttgtctgccggttccattgcagacttgtttagtactgtagatgtcgccatattgcctgcctctacgatgatgaatgaggcattggcctgtggaactcctgttataggagggtattatgttgataatcaggagcacgactattatatgtttttgcgtgaagggctgattcagggggcgggtgattataccgatgccgctgcctttactcttgttgctgagaatttggataagatggccattcgtaaaagacatgccatcactccggatattcccaaacggtttgtcaatttgtttaaaagtctgttgatatgcaagtaacttcacaaagagcttcggccatattgtataattatctgtctggcaaccattttgataaaccgttcttattgccggcaaatgtgtgtcctgtagtgcccctgtcgtttatgaaagcaggtgtcggttttgagtttatagacatagatgaaagccatgccatgtcaaccgagaaatgtttgacagctatagaggcgggaaaatattccggtcttgtatttgtgcatgcctacgggaaaaagtatgacaacaaagaattttaccgggcagtgaaaagtctcgatccaaatctttgtatcattgatgattgttgcttgtgcattcccgaattggcagattccttgcctgaaaatgtggatctctgcctttacagtaccggatatgccaaattcatagaactttcctatggtggctatgcaagttttaggggggggtacgaagttgttgattatcagtatgatagcattagtgaacaaaagcattcggtatatataaggaaatgtctcctggagaatgtcagatatatgcttccggctgactatccttggctggacgcctcaaatttacaaatgaccgatgaggaatattttgacatcattgaaagaaagctcccaaaagtgattgcggaaaaagagaaaataaacaagatatacaggaatctgcttcctgaatcgattcagatgggagatgatttccagaactggaggttcatgattgtcatcgagaaccggcagaaggttcttgacgcaatattcaaggccggtctgtttgccgggactaatttcccttcggtttcatacatgttcaaaggtgtttcttctcctgttgcggaagtggaggcgaagcatatcgtcaatttgtttaatgatttccggttcagtgaagcacaggcaagaaagatctgtgatgtgataaattcggttatatgaataaaagattattgatactgggcgcaggtgaaatgcaggttcctgtcatccgaaaggcgaacgatatgggattgcataccatagtcgcagatatggatgcgaatgctccgggaatggggtacgcctcggaaccggttcttgtcagcacgatggataaggaaggtgttttggaatgtgccaaacgtcactctgttgacggcatacttactacaagtgacgcgcctgtaaatgtggtttcctatgtcggggaacagctggggcttccgtccatgtccactgaggtcgcaaaaatctgtacaaacaaatacttgcagagggaaatgtttgcggccaacgggattgatgtaccatttttcatgctttgtgataaagatacggacttgggcacattgcaagattatccatatattgtcaaaccggtagattcctctgcaagccgcggagtaaaaaaggttacaaatcataaagaacttgtacttgctttttccgaagctctcggttattcccgtaccggaaaggccattgtcgagggctttataacaggccgtgaattcagtgttgaaacatatacgcaaaacaataaaactaccgttgtcactattacggagaaactttgtatcggtgaggcagaaggcttctttgttgaagatacgcacattgaaccggcgcgtataacgaaacaggagtgggagctggtttcggagaccgtatcaaaagcactttgcctgattggacttaataattgcccctcgcatacagaaataaagctgaatgaatcgggcgcttatatcatagaaattgcttgtcggcttggaggagattatataacctctgatttggttccattgtcaaccgggatagatatgctgagaaatctggtgaactgttctcttggtttgcccgttgatgtccttcgcaaacatgaaaaatgctcagcggtacagttccttaatccgctcaactatcagcgttgtgtggattttctaagctcttcccggtcatcggctgtttttcggtctgaaataagaccttattctgaaaaaaaaataaaaaactctttagaccgtttagggtatatcatacttcagactgatagtatggaagagcttgaaagtattctaaggacgattaaatagtaaagacatgagagataagtgtatgattgtggctgagatgtctgccaaccataacggtaagaaagaaacagccattgaaaccgtcagggctgcaaaacgtgccggagccgatgccgtcaagttgcagacctatcgggctgataccattacgcttcgctgtgacaagcctgattttataattaatgaaggctctatatgggacgggcaatatttttatgatttgtatgaacaggcttatactccttgggagtggcatgaagagttgttccatgtggccaaggaagaaggactgatctgtttttcttctccttttgataagacagccgtcgatatgcttgaggctttggactgtcccgtttataagatagcttctttcgaaattacggatattccattgatagaatacgcggcttcgaagcataagccgatggtacttgctacaggcatagccaccgaagaagatattcaattggctgttgaagcttgccgcagaatgggaaataatgatattacggttcttaagtgtacctcttcttatccggctccagttgaggaagccaatctttgtatgattcgtgatttggcagaacgtttccaggtaaaaagtggactttccgaccataccctggggagtgtctctcccattgtggcggttactcaaggtgcgagtatgatagaaaagcactttattttgaatcgttccatcggtggtccggattgttctttttctatggaagagaaagattttgcccaaatggtaaaagatgtgcgcatggctgagttatctttggggaaaacgacttacgaattgacggagaaaatgagaggtagccgttccgcatcacgttctctctatgtggccgaggatatgaaggccggagaagtgattacggagcggaacgttcgctccgtccgtccgggcttcggcctgcaccccaaatatctgaaagatatattgggaaagaacgtgaaccgggatttggagaaagggacgaggtttgcattggagtacgtgaatggttag

SEQ ID NO: 178 - DNA, 15630 bp, unidentified
  source 1..15630: mol_type = unassigned DNA
ttagcctaatcttgtggcgctgtaatgccggaaattcctgccgaaataaacttcgttggtacagggcgctttattgccaatttcaggtgccttgataccggataatagcgttaaaggactttcttcgacaaaggcttcatcccataattccgcatcgataaaggactgtaacaggatgtttccgccttcgactaacagagattgtagtccctgcatgtacaggtgtttcatgatttgcggcagtatatcccgttggaagtcaatggggatgtattcaacgttgggttgtggcaggcacggtttctcggtgaacacaagtgtgcggacatttccatcgaatacatgcagcttgggagacagccgcaactgtctgtctgttacgattcgtactggcgaccggccttgccagttccgtacggtcaggctggggttgtccagctctgccgtacgtgtacctaccatgatggcactgtgctctgcccgtttcttatgcacaagcatggatgtcaggggggtggatagaatgaccggttgcccgtcctcacggttcttatcgatgtatttgtcggcagactccgcccatttcagggtaatgtaggggcgatgaagggtatgaaacgtgataaaacgccggattagacttctgcattcatcttccagcaccccggtgatgacttcccgccctgcatctttcagcttccggattccccgtcctgctactttggcaaacgggtcctggcagccgattacgatgcgcggaatctctttctctatgataaggtcggcgcagggcggtgtctttccgtagtgggcacaaggctccagactgacgtagattgtagaacgcttcaacaacgaggggtcttttacggagcggattgcattgacttcggcgtgcgcctcgccgcaacgcacatggtatccctcgccgataatttttccgtcgcatacgattactgcgcccaccatcgggttgggggctgcattgcataacccgttttgggctaactgaatgcagcggcgcatgtatttttcttcttccatactttgtattactcttaaacttccactatttttgcagcccgaaatgccgaatgttatgactgtttccgtttctcatatccgccatgctttgcaggagagttactctgcgcaagaagctgccaatctgtcccgcattgtctgttgcgaaatgctggggcagactgcggtcgattattacctgggcaaagatatgattttatccccaaaagagatgcaggatttagacaccattcttgcccgcttgcgtaatttcgagccgatacagtatgtgcagggcaccgcccgttttctggaacgctcctaccatgtggcccccggcgtgctgattccccgtccggaaacggaggagctggtggaggtgatgctgaaggaagttccgtccggagcccgtattcttgacattgggacggggagcggctgcattgccatttctctctccaagatgctgccggatgccaaagtgacggcatgggacatttcggacaccgccctccgcatagcccgccgcaataatgaggcattgcaggcatccgtgtgctttgtacagcgggatgtgctggcgtatgttcccggcagcggggaacggtatgatgtgattgtcagcaatccgccatacgtcactgaatcggaaaagcaggaaatggagcgcaatgtcttggactgggaacctttttcggcattgtttgttccggataatgatccgctgcttttttaccggtgcattgcagagttgggcaagggtatgctggcgtccggcggcagactttattttgagataaaccgtgcgttcggggaagctacggcaacgatgcttcgcgcacaggggtacaccaatctacgggtgttgaaagatatttccggaaatgaccgaatagtaatcgcagaacgatgatagaaattacagaaacagatgctttaagccgcgtggctgcttattgctccactgcggagcattgccgtgcggaagttacggagaagttgcagcgttggggtattccctatgatgccatagaccgcataatcaaccgtttggaacaggagaaatatattgatgaggaacgtttttgccgtgccttcattcatgataagtaccgcttcgccaaatgggggaagataaagatagggcaggcgcttcaactgaagaaaattccccaaagtgtattttaccgttacctgaatgaaatcgacgaggatgaatatcttgccgtgctggataatttgctggcggtaaagcgcaagagcgtgcatgcggagaatgagtacgaactgaacaataaactggtgcgttttgctttgagccgggggttcgaaatgaaagatatccgtcactgtattacgctttctgatgaaaatgacgaattggaataaaatttatccgtattcttttttattctcgtcagctttctgtatttttgcggcatatttatcataatagttagtttggctatgaaaactttagaaagattgtttgcagagaagttgctgaagattaaggcgattaaactacaacccgctaacccgtttatctgggcgtcaggatggaaatccccgttttactgtgataaccgtaagactctttcatatccttctctccgtaatttcgtgaaagtggaaattacacgtctgattctggaacgtttcggtcaggttgatgccattgccggtgttgctacgggagctattccccagggtgcattggtggcggatgcgttgaacctgccgtttgtatatgtacgctctaccccgaaagaccacggtttggagaacctgatagaaggtgaacttcgtccgggtatgaaagtggtggtggtagaagatttgatttctaccggcggaagcagtttgaaagctgttgaagccatccgtcgcgacggatgcgaagtaatcggtatggttgccgcttacacatatggattccccattgcagaaaaagcattcaaggatgcaaaagttcctttggtgacattgaccaattacgaagcagtgatggaagttgcccttcgcaccggttacatcgaagaggaagatgtgcctacgctgaacgaatggcgtaaagaccccgcgcattgggaagccggaaaataagacttattttacataatgatagattatgacaaaagaaccattcggatagttgctgtccggatagttctttttgtcttttaaagaccattgtattatgactaaatttgaaagtgcggtaaaggtgatacctgcttcgcaaaaagctgtttatgagaagctttcagaccttagcaatttggagaaagtgaaagaccgcctgccgcaggacaaagtgaagaatttgagtttcgatgcggaaacattgtcgatagaagtaccgccggttgggaaaatagtattacagattgtagagaaagagccttgcaagtgcatcaagtttgcaacaaccacctcgcctctgccctttaacctgtggatacagatagtgcccgttacggagacggaatgtaaaatgaagcttaccatcggaatggagttgaatccgtttatgaaaaccatggtgcagaaacctttgcaggaaggattggagaaaatggcggaaactttgtcgctgattaattattaattactaaatcttatggctcagaaactttgggaaaagtccgttcaggtaaataaggatatagagcgttttacggtgggacgtgaccgtgagatggatctttatctggcaaagcatgatgtgttgggttccatggcacatatcacgatgctggaaagtatcggtttgctgacaaaagaagaattgtccctgctgcttgcggagttgaagaatatctacgcaactgctgagagcggggagtttgtgatagaagagggggtagaggatgttcactctcaggtggaattgatgctgacccgtaaattgggtgatgtaggaaagaaaattcatagcggacgttcccgtaatgaccaggtgctgctcgacttaaagctctttacccgtgcggagataagggacatagccgaggctgtagaacagcttttccatgtgctcgtcatgcagagcgaacgttataaagatgtattgatgccgggttatacccacttgcagatagcgatgccgtcgtcgttcggactgtggtttggcgcttatgccgagagtctggtggatgatatgctgtttttgcaagccgcctttaaaatgtgcaaccgcaatccgttgggttctgctgccggatatggctcgtctttccctttgaaccgtacaatgactacccggctgttgggcttcgattcattgaattataatgtggtgtatgcccagatggggcgtggtaagatggagcgtaacgtggcttttgcgctggcaagcattgcgggcaccgtttccaagcttgcgttcgatgcctgtatgttcaacagccagaacttcggatttgtgaaactgcccgatgactgtactaccggttcgagcataatgccgcataagaagaatccggatgtgtttgagctgacacgtgccaaatgcaacaaactgcaatcattgccccagcagataatgatgatagccaataacctgccttccgggtatttccgcgatttgcagattattaaggaagtattcctgcctgctttccgggagttgaaggattgtttgcagatgacgacctatattatgaatgaaatcaaagtgaacgaacatattctggatgacgataagtacctgcttattttcagcgtggaagaggtaaaccgtctggtgcgcgaaggcatgccgttccgagatgcttataagaaggtcggtctggacattgaggctggcaatttctctcatgacaagacagtgcatcatacgcacgaaggcagtatcggcaacctctgcaatgatgaaatatccggtttgatgcagaaagttgtggacggctttaattttgaggtaatggaacaggccgaaaaaacgttgctcggccggtaatcataattgattaactgcttgtggtgtacgatgttggctttctctgtttagggtataaacgtattaatgacagtctggttaatatcgtacatccctatttatttaacttttttccggtaaaaagtttggctgtaacgtagaaactgtttatctttgcacccgttctccagaaacctgcggaaatagctcagttggtagagcataaccttgccaaggttagggtcgcgagttcgagtctcgttttccgctctccttttttgaggatgctcgaatggtggaatggtagacacgaaggacttaaaatcctttggccagtaatggctgtgcgggttcaagtcccgcttcgagtactcatctaaggctttgtaaatcattgatttatgaagctttttttatgctctttatctaaatcggaaatcttatttttttttcggaccgccctgtttttcagcaaaaatagagttgcattttaccttgaattatgccgctcatgtaaaccaagatgtaaaccgaaaaagtatatacgttagctgtttcagttggaatcccctgtaagaaatatcgttgtccatagtgtattatgtcgtaaaggagcattgtaaatgcagctgtatatcagcaaaaacctcgttttgcaattgcgggctctacggttgccaattgcgggccgtacagcccgcagatggaaaccgtatggttcgcaactgcaaaacggaatttatcaagagttatgacggcataatataaggtgcaacgcaagaaaaagaacaaggagaaagtgtattttccttgtgcattttgggacaaaatgtaaggggttggggtactttttccccttaatatgggcagaatgcctcaaaatatgatgagatgtgtattattgggtaaagtaacagataattaagtagttatagaagatgaaatgctgaaaaagcggacattttagtgatgaccgatagtttctcgtcaccggtcgtcacacttctcgtcacctctgtatcgccctctggtaaagggatacgggcaataggtgacgagtgacgaccaaaaaacagttttctttatttcaatatcagttcataatctgctacatccagccattctccgaacttcatgcctacttccttgaagtgggaaacttgtgtaaagccaagtttgctgtgtaaggaacaactggccgtattacaagcggtaatacaagctatcagtgtgtgataattatgttgccggcattcttcgatgagaacctgcatcagcagtttgccgagtccttttcctctatgtcgggcagacaggtatactgtcgtttcgagggtatatcggtaagccgtccgttgtttccagggatgtgcatagcagtatcccacaactttatggtctgtttcgcatacgaaaaagggaaagtggggaaaaatttctgctatacgcaggcgcatctcatcttcagatatcggctctgtttcgaatgtataggtactgttgaggatgtactcattataaatatcggtgatgtacttgacatcttgaggttgtacaggtctaatcataccgaaaaatcattgtttggataatttaagcaggtaagtgcttgctaattaacgatacagccggggacgcctgttattaaaccgataccctatacccagcatcagatagttgggttcatgaaaatccttcaggttgtagccgacatgcaggaatgtgtcgcgggtcatatctattttgagcgccaggatttggtagaatgattgcaagtcgcccccgccatgcaggatattggctccgaaacctatgccgacggtaaagtagggcattacccattctccgcgtgccgagacacccagagagagttgtttgcgaagcgggggagtgccgaatgcctcttcctcgctggcatcgtcgagctgggtagcgtaatcctttgtataaatgttggcactggcatcatagacaccgtccagagatactcctgcacggaatttatatccgaagttatacatcggagcgaaacagaacccggctacgccgtatttgccgggagcggggacttgtccgccgggaacgtttacggctttccgtctccacgaaccgaacagcataaggtcatagctgacatgccgggggaatgccggaaccggaatttgctgcaacggttgcaaggttttgtcaatgtcccggttgaaattatatgccactccgattttaaaatctatcgtgttcagtccggtgttggggtaccgggtattgccgttggagaaatgtactgccgttgcgccgatattgaggtcgaaccgcggggaaagtatccagttcaggtgaatgcctgcgctgagataggcgtttactttgcttcccattacagtattgttgggattgctgagatagtcatacggcttccagccaaaagatgcgccgaacccccattcgtagttaagcgacaagcggggagtgattccggcgatgcgggcgccttggaaggcgtagagggcaacgggaattcccatttccctgcggttgccgaaatcgaaatagcccaatcctattccctgataggaacttccgtatacccggtcggcggcagtacccggtggcagccggaatgagtacttcaagtgggcggagcaagcagacctcattattttgcgcatatcgttttcaccccgcagaaaggagctggtggggaaaatatatcccgcccggccttcaatgccgagacggtggatataagcatcttgtgcgcatatattattggacagaaacagtataatcattaagagaatcatatctcttccggtccgcattttactattcatgatgtcgtggcgttctctgaatcttgtgcaaatataatccttttatctttttatttgcatgaaaatcttatatttgcaaggttaataattcgtcatctatgttattcaagaaatatgctggtcaatcggaataacagtggaatttccggtggcttccttattcgttgactattcgacggactgaacttatccggggtgcttatggacagggtatattcctgttacatggaaacggagttctcgctctttcctcgtatggcggcattggccgagaatgtgtggtcgccggcagagaagagtttgcaggatatagtacggaagcggtagtcttcattccaaagaacaggacagcggttgtatcaattatagaatgacagataatacgtcagtcatcattttgatacaaccgctgtctcttttacaagccatctatgcttctgcttattccgaagcggttatttctcgtcgttcttccggatttccacacggcgtatcttaccgctgatggtcttgggaagttcgtcaacgaactctatgacacgggggtatttgtaaggagcggtcactttctttacgtggttctgcaactccttgaccagttcctcgccggcgcggttcttatagtctttggacagtacgatggtggctttcaccacttgtccccgtatttcatcgggaactccggtgatggcacattctataactgcgggatgcgtcatcagggcgctttccacttcgaacgggccgatgcggtaaccgctgctcttgataacgtcgtcggcgcggcctacaaaccagaggtagccgtcctcgtccttccaggcaacgtcgccggtgtaatagatgttgtcgtgccatgcttcgcgggtgcggttggcgtcgcggtaatattccttgaacagaccgagcggcttgcctttgtcggtacggattacaatctgtccttgttcaccggcctctaccgaacggccgtcatggtctatcaggtctacgtcgtattggggattgggcaatcccatgctgcccggcttgggttgcatccacggcatggtggctacggtaagggtggtttcggtctgtccgaaaccttccatgaggctgatgcctgtcagtttcttgaatgtatcgaatacggcggggttcaacgcttctccggcaatggtgcaatactgcaatgaagagaggtcgtacttcgtcaggtcttcgtgaatcaggaaccggaagatggtaggcggtgcacaaagcgaggtgacgtgatagtcctgtatctttgtcagaatatcggcaggagtgaatttctcgtggtcgtatacaaagatgttggctccggctatccattgtccgtacagtttgccccatacggctttaccccagcccgtatcggcaatggtgaggtgcaggctgttttcgtgcaggttgtgccagaaacttccggtaacgatgtgccccaacggatacgtgaagtcgtgcgccaccattttgggttcgccggtagtgccgctggtgaagtacatcaaagaaatatcgtcgttgctgttgggatgctccggtcgtgcgaaaggggcggcatcggcaatgcctttgtggaagtcctcaaaaccttcggctatctccgggcctacgctgaccagcttcttcacactcggagagtcgggcatggcagccgtgatgtggtcggtaatgacgctttcgccggcacagacaatcatcttgatgtctgcggcattgcagcggtatacaatatctttcttggtaagcaggtgtgtggcggggataacgacggctcccagcttatgcagtgcgatgatgctgaaccagaactcatagcggcgtttcagaatgagcattaccatatcgccgtggccgatgccgaggctctggaaataggaagccgtcatgtccgtatagcgtttcatgtcggcaaatgagaactggatgtgctcgcccttgtcattggtccagagcagtgcgggcttgtcgggatgttcggccgcccaggcatccactacgtcataaccgaaattgaaattctccggtacgttaatctttaaattcttgatgaagtcctcttgagatgtaaaggacgtttgcgataaaaatctttctaccataacttttggaatttcttcattcaccgttcttcatttatgtgttgttacatgattacagcaaggaaacgtactttctttccgtccagcgctttcatgccgtgaggcagtttggagttgaaatacaaactgtctccttcgtttaaaatcaagtctttgccgtcgatgctcagcatcatgcggccttccagtacaaggttgaattcctgtccggagtgactgttgtagtgtatcggctcgttatccggcttgggttcgacggtgacgatgaacgggtcggcgttgcggttcatgaagccggcagccagtgactggtatttataggcttttgtacgctcgatgctggttcccttgccggcacgggtaaggaagtagctgctcatcttcggctcttcaccgaacatcagggcatccagtgcgatgccgtaacggcgggctatcttttgcagcatgcttacggagatgtcgaattctcccgtttcggcaagacggtactcttctgccgggatgtcgcaatcgcgggcgatgtcttcggcattcaattccaatacgtcgcgcagtccgcgcaggcgttcggctatttgtttaatctgttcgtccatgtggtttttattaagtggattagtacggttatttacttgctttgatggcattgataatggcggaagagaatccttgatgttccagttcgttgatacccttgattgtaattccgccgggagtgcataccttgtcaatctctatggcgggatgcgtgtcgttgttcagaatcagttcggcggcgccttttaccgactgggctatcatgcgcatgccgtccttggggtaaacgcccagttctattccggcctgcatggctgcctggatatacttcagtacataagcgatgccgcaggaagtcatggcggtggttgccgctatcttatcttcgggaatcagcatggcaagtcccatttggttgaagatgtcgagcaaaagctgttcctgttccttgctggcgttacggcttgcaatgagcgtcatgctttccatctcgctgatggcggtgttggggatgaggcggaacatggtcatctccttgtctgccacgtagtgtgccagttcttcgaaagggatgccggcagctacggagataagtatctgcttgcttttcagcttgagttcgcttaccaccggttttatcagccacggtttgacggcgagtatgatgagctcggcgccggtaacggcttcctgattgtcgcgtgtggtttgcaaagtggggagctcagcctttaacgcatccagtttgccttgcgtgggattagaaacaatgatgtcgctggcggggatgatggttccttttgccagaccgcgggcgatggagccgcccatatttcctgcaccgataattgctgttttcatatcatcttgtcatttaaaaagttgtcttcgggcaaaggtaaagattttaatgaaaaaacgaccgaaacaggaaggtattcttctttcggtcgtatcttttgccggctgattatccgtaaattgtcaaagtgctttcttaaaacgttccaggaagaggttcgcttcgtccatgccgagacacaggggcggcaataggcggagtacgttcgtgccgctgacaccggtaaacacatgctgttctttcagtaacctcaaacgcagttctttgacaggctcttcaaattcgaggccaatcatcagtccgcgtccgcgcacttccttgatttgcgggaatttcttcagctcttccatcaggtatgcgcctacttgggcggcattctctacaagagcttcctgctctatgacatccagtacggcaagcgcagcgctgcaagccagatgatttccgccgaaagtggttccgagctggccgtaaacaggagtaaacatcggactgataagtacgcccgccatcgggaatccgttgcctatgcctttggccacggtgatgatgtcggccttgataccgttgtactgatgggcgaagaacttgccgctacgtccgtaaccgctttggatttcgtccagaatcagtaccgtattgtgctctgtacaggccttgcgcaaggcttgcataaactcgtcggtgggcaactgtatgccgcctactccctgaatgccttcgatgattacagcgcatacatcgcctttcgccagttcggctttcattgcctctgtatcattcagcgggagataggtaacgtgtccgcagttgttgatgggagcaatgattttgggattgtcggttgcctctaccgccaatgaagtacgtccgtggaaagctttcgagaaggataccacgcgagttcgtccgttatggaacgaagcgagcttcaacgcgttttcgttggcttcggctccgctgttgataaggaaaagggaataatcattgtatccgcagacctttcccaaccgttctgccagttgctgttgcagttcgttgataacggagttagaatagaatccaagcgtggctacttgcttgccgagcatctctacatagtgcggatgtgcatgtccgatagagattactgcatgaccgccatagaggtcgaggtactccgtacctttatcgtcccatacatggcagccttttcctttgacaatattgatgtcaaaaaggggatatacatcgaatagtttcattctttcagtaactgattacaaattaaagatactttagaaagcactgggtttcagtctcaaaccgacagtctcttccagattgaacatcaggttcatgttgtgtacggcctgtccgctggctcctttcagcaggttgtctatgcaggagatgataaggagcttgtcgccatgcttttccaaatggataaggcatttgttggtgttgacaacctgcttcaaatcgatgttcttgccgacgatatgcgtgaaggagtctttggcataatactcttcatacatgcggacaatctcttccaacgccactttggtctttatcacgatagtggtaaaaatgccgcggggaaaatcaccacgataggggatgaaatcgatgtccgaatcgaaactgttctggagctgtttgagcgattgcttgatttcgggcacgtgctggtgctcgaaagccttgtacacactcaggttgttgttgcgccagctgaagtggctcgtagctcccggcttgacgcccgcaccggtgctgccggtgatggcattcaccataatatcgccgttcagcatcagatgcttggcaagcggaagcaggcccaactggatgcaggtggcgaagcagccggggttggcaacatgctttgccgtgcaggtggcacggcggttcagctcgggaaggccgtagatgaagtcatggtcgtcgctcttgatgcgatagtccatggagaggtcgattatcttcaggtcttccggtacgttgtggctttccatgaattttctggtgtcgccatgcgccgtgcagaagaaaagcacatcgatttcgtccaacggaagttcgtcggtaaacgttaaatccgtctctccgtacaacccttcgtgtacgtcggttattttgttgccggcattgctcgagctgtttacgaatacgatttccgcttcgggatggttcagtaacaggcgtatcagttcgcctgccgtgtatccggctccgccgatgattcctactttaatcatgttgataatatctattgggttcttctggtattataactaatagtatgatatatataagcgtacctgcaaacgcagtgaagatcgtagcaaaaacgtagatgatgcgtaccagtgacacgtcgagtccgaaaaagtttgccagtcctgcacatacgccggaaagcattcttccgtttcgggggcgcgttaatttttgcttccggttcatcatttagatttcttcgtctttgtggtttgagtaataggcacgcagtgcggtagaagtcaccttgatgaagcctttggcgtcttccgcagtccagcctttctgcatttcaccgtattcgccgaatttattctttacaaggtcgtcgtcgctttccacgcctacggtagagaaacagagcggatgaagttcgagaatcgcagtaccgtttacattgcgttgcgaagactccagcatggcttcgatgtcgcgcattaccggttccagatactggctttcgtgcaggaacataccgtaccagttggctacctggtctttccagtattgctgccatttgcttaatgtgtatttctcaaggaacttgtgtgcgccgataatcagcatgggagcggctgcttcgaaacctacgcggcccttgataccgataatcgtgtcgcctacgtgcatatcgcggccgatgccgtaagccgcaccgatttcctctaccttctggatagccttgatggggtcgtcgaatttttcatcgttgaccgctttaagctcacccttctcgaaggtcaggcgcaactgttcgctgccttctttcgtgcaatgtttcagataggcgctttcgggaagtccctgtgcggaatccagaatttcaccgccgcaaatggaagtaccccacagacctacgttataggaatatttcagtttggcgaagtcggctgcaaagccgtgcttgttcagataatctatctcttcctggcggctcaaagccatgtcgcgtgtcagcgtgatgatttccacgcccggagccatgacaaggaaagtcatgtcgaaacgaatctggtcgttacccgcaccggtcgaaccatgtgcaatggcgtctgcgccgatttcgttggcgtagcgtgcaatggccagcgcctggaatatacgttcggagcttacggaaataggataagtaccgttacgcaatacgttgccgaataccatgtatttcaagctcttttcgtaatattcctgcgttacgtccaaagtaatatattttacagcacccagtttgtaggcgttctcttcgtttgtcttcagctgttcggggctgaaaccgccggtattggcacaagccgcatatacctcgtatcctttctctttggccagatacataactgtgaatgaggtgtccagaccaccgctgaatgcaactactacttttttcttcttttccataatacttatgaattttgaatgttgaattataaattgggaatcaggcttgtaaacgagtctgtgtgttcccattcataattcaaaatctataattaattatattttatcttcctcgtgtaacttcgggtcgtaaagcattgccgtgcaaatgcagaacttccggtttttggctaccagtatgtcatggttgatacagccctcgcagcctttccagaaagcctcgtcgtctgtcagttcattgaaagtaaccggtacgtagcccagttcggtattcattttcataacggccgctccgctggtcagactgaatatcttggctttgggccaccgcaggcgtgccaggcggaaagaagccgtcttgatacgtttggccagtcccaagccgcggtaatcgggatgtacgatgaggcccgatgttgccacgtactgcttgtttccccagctttctatgtaggtgaaacctgcaaattcgtctccacataaagctatgatagcttttccttctttcattttagtcgccacatattcgtgtgtgcgttctgcgatgcccgttccgcgcaccttggcagcttctcggatggtatccaaaatcttatccacgtaaacttcatgtgaggcgtcggccaccatcacatcaatctgtttcgaatccat

SEQ ID NO: 179 - DNA, 7216 bp, unidentified
  source 1..7216: mol_type = unassigned DNA
ctaatccttaatcccttgtttcaagtattcgtaaaagctatattgcgaccgtaccttctccttttgcggtcgtgacgacttccagcggtttcgcaaccggtcgtccacgaagcaggctttccgtttgtccgacagttgtatggatagcatatcgatgagctcttgcttcaagtccgggtccagaatgggggtgacggcttcgatacggcggtacaagttacgccgcatccagtccggcgagccgaggaagagcttgggtgcgccgccgttgccgaagtaccacacacgggcatgttccagaaaggtatccacgatgcgtgtcacgcggatgttgtggctgtactcctgcccggggatgaggcagcagatgccgcggacaatgaggtctatctctacaccggcttgcgaggcttcgtagaggcggtctatcatggcggggtcttgcagggcattcatttttaggataatccgtccttgcttgccttgccgggtcagttctatttcgtgattgatgaggcggttcagttcaggaatcaggttgaagcgggccacaagcaggcggtggaacaccggattttcctttccctgcagagtacggaacaagttgtgcaggtcgtttacaatcaccgggttgcaggtgaatagtccgctgtctgcatagagggtggcggtcttttcgttgaagttgccggtgctgatgtaggcgtagcttgtcagtttgcgcccttccttgtcgcggcgtagcacgagggctactttggcatgtacctttagtcctggtatgctgaaaatgatgttgatgccggcggctttcatcatctcggcggtggcgaggttgttttcttcgtcgaagcgggctttcagttccacaaagacggtgactttctttccgttctgtgcggcggctattagggtgttgatgacggtggagttctctgccacgcgatactgggtcaccatgatttcacgcacggtgggttcgtggacggcttcatatagaaaatggatgaagtggtcgaaggagtggtagggataatgcagcagcaggtccttcttctccacatagcggaagatggattcgcgttcgtccaggcaggtcagcttcatgggctggggtttcttgatgggacgtacgctttggttgggattaggcagatgccgcaaatcctccatgttgaggtgcttgtctcccggcaccagctcccggcggtctatgcggtaggcatctaccagaaagtcgaggaagtcctggggcatggcgcggtcgtatacaaaacggcacacggcgcctatcttgcgtttctttaccttcttcttcacctgctcgatgatttcggaggtattggcggcatcgtctatcagaatatccgcatcgcgtgaaatcttgatgcaataactgctgtccacttcataaccggggaagatggtatccagattggccttgatgatgtcttcaatgaacatcagataatagtctttccccaccttgggcagctggatgaagcgcggcactttgctgtacggcagtttcatcacgaaatactggatgcggtttggagaactggcgggagctcctttcagatgaagccgtacggctagatagagacggttgtcgcgcaggaatgaaatcaccttgtccttgcttacgggcaccggggccagataggggaatatctcttcgcggaagaagctgcgcacaaaatcgcggtgaaacggttctacgttgcggctttgatagaatatgatgtgatgtttccgcagggcgggcagtatcttctgttcgtagatgcggatacgttcctccagttggcgattgacttcttggttgatttcatctaccagttcggcggcagactgcatagtctcttcatcgctttgcgaggctccggtggctatggccttatggtcggctacgcgtatcttgtagaattcttccagattggaagagtatatagaaataaagttgatgcgttcgtatagcggcaatgtctcgtcttccgcttccagcagtacgcggtagttgaaggaaagccagctgatgtcacgtttgaaatatctgttgtccatggtgttaaggtgttaatgtggcatattagcacattaccacattgtattcttcccaaatataattacctttgtcttaataaacaaaggaaagatgacaaaagttggtttattatcggatacgcatggctactgggatgaaaagtacctgcaatattttgagggctgtgacgaaatatggcatgccggtgacatcggttcgctggaagtggcacagaagctggcggctttccgtcccttccgtgccgtgtatggcaatattgacgggcaggagatacggcagctctatccgcagattctccgtttcacggtggatggggcggaggtgctgatgaagcatatcggcggttatcccggcaactacgacccttccatcaagggcagcattctggtgcgtcccccaaagctgttcatcagcgggcactcgcatatactgaaggtgaagtatgacaagacgttggatgtactccacatcaatccgggcgctgcgggcattcaaggtttccataaggtgcgtacgatggtacgctttgcggttgatgggggaacgtttaaagatttggaggtgatagaacttgctgaccgatgatgtagtttgtttattttcaatggattgtatttaccgattgcttgcgctatagtgtaaaagccgttacatgctaatgtaaaggttgttacgctattgggtaaaggccgttacactatttggtaaaggtcgttacacgctgaggtaaagaccgtttcatcaaggggtgacggccgttacgcactgaagtaagcaaaacaatgtaccggagtaagcaaagcaatgaagtaaaaagatgaaaccaagccttcacttaatcgaatttttccattatctttgtacccgaatagcaagtagagccgtggggcatcgtcctccttcttattttattctccattttgaagtatcaccgaaaaagaactgaaatatgaaaggaattattcttgcaggtggcagtgccactcgtctctatccgttgtccaaggctatctccaagcagataatgcccgtctacgacaagccgatgatatactacccgctctctacactgatgttggcgggaattcgcgaagtgcttattatctctactccacgtgacttacccatgttccgcgatctgctgggaaccggtgaagaactcggtatgtccttttcctataagatacaagagaatcccaacggactggcacaagcctttgtgctgggtgcagagttcttggacggcggaccgggctgccttattctgggcgacaacatgttctacggtcaaggcttctccgccatgctgaagcgtgccgcttccatagacaagggtgcctgcatctttggttattacgtcaaggacccccgtgcctacggtgtagtggagtttgatgccaacggcaaagccgtctcgctggaagaaaagcctgccaatcctaaaagcaactatgccgtccccggactgtacttctacgactccaccgtgacagagaaagccgcctccttgaagccctctgctcgcggcgaatacgaaattaccgacctcaaccgtctctatctggacgagggcacgctgaaagtggagctcttcggccgtggctttgcctggctcgacaccggcaattgcgacagcctgctggaagccagcaattttgtcgccaccatccagaaccgtcaaggcttccgcgtgagctgtatcgaagagattgcctggcgcaagggctggatagatgtagaccagctgtatcgcttgggtgaacagcttggcaagaccgaatatggcaaatacctgatggaactggctgaatcgaagcgatgaactctttgttccccaaaaagagaaggagaatagttctcctataaaggcccgctgactttaatttttaatttataatttttaattctcatgaagacttatctcgtaaccggtgccgccggttttatcggcgccaactatattaaatatatcctggcaaaacataatgatattaaagtggtgatactggatgccttgacctacgcaggcaatctgggcaccattgccaatgacattgacgatgaacgttgcttttttgtaaaaggtgacatctgcgaccgcgtgcttgccgacgaactgtttgccaagtataagttcgattacgtagtgaattttgctgccgagagccacgtagaccgtagcatagagaatccccagcttttcctgatgaccaacatcctgggtacacaaaacttgctcgatgccgcccgccgtgcctgggtcacgggtaaggacgagtccggttatcccacttggcgcaaaggcgttcgttaccatcaagtgtctaccgacgaagtttacggctcacttggtgccgaaggctacttcacagagcaaaccccgctctgcccgcacagcccttacagcgccagcaagacgagtgccgatatggtagtgatggcctatcacgatacctataagatgcccgtcactatcacccgctgttccaacaactacggtccttatcacttccccgaaaagctgattccgcttatcatcaagaatattctcgaaggcaagaacctccccgtctatggcgacggcagtaacgtgcgtgactggctctacgtggaagaccactgcaaagctatcgacctggttgtccgcgagggtgtggaaggcgaagtctacaacgtaggcggtcacaacgaaaagaccaatcttgaaatcgtgaagctgactattgccaccgtccgccgcttgatggaggaagaaccccgttaccgtgcagtgctgaagaaacaagtaaaagccgccgacggcacgattgacatcagctggataaacgaagaccttatcaccttcgtcaaagaccgcctaggtcacgaccagcgttatgccatcgaccccacaaagattaccaatgccctgggctggtatccggagacgaagttcgaggtcggcatcgtcaagaccattgaatggtacctgaacaaccagccgtgggtggaagaagtgaccagcggtgattatcagaagtattacgaacagatgtatggaggtagaggttaaggtttagggattagggtctaaccgctaatccttaacctctaacctctcaattcagcgccaccgctaacagtaatcctaagaacagcatattgcgcgacgtctcgcccagtatgctgttcagctttttaccgctacctatctgtatcattttgcgccacgtcagtgcgtgcatatagagatagacgcagggagcccagataaattccagcggagtcagcttgcccgtgtagacaaaccagaagcagagcagcacggcggcgatgcccagtgccagatacatattctcaccgaacttcttgccgtagcgtaccaccagcgtacacttgccgctcacggcatcctgctcgcggtcgcgatagttgttcaccatcagcaaggtgtctatggcgaggccactgacgagcgacagcaccaccacatccatattcagcgtataggcctgcacgtagtaggtgccgcatacgggcacgaagccgaagaacaccagcaccagtacgtcgccccagccccgataggagagcagcgtggtatagaggaaagcaaacagtatgcacaccacgcccagcaccaccagttcccagcctccgtggggcagctgcccccagacggtgaacagcactgccagccctgccaggcacgacagtgtcagtgcgatgccgatgccggttttcatggctgccggcgtaatccaaccttcggcgcaggcgcgctgtggccccagccggtcttcccgacggtcggtccctttctggaagtcgaagaggtcgttgataaagttggcggcaatctgcatgccgcaggcaaagagggcgcacagcagggcgggtgcggtcttgaactgtccgtcgctgaaggtaagggcactgcccagcaataccgggatgatggctcccgtcaacgtcttggggcgggcggcgagaaaccatgcgtagggtgaattctgtttaatctcgttcatcgtagttccaatttagttcggcatctgccagcaaaaatactgaaaatccctatatttgtacccacttatgatgaagaagttagtctacatatccattctttctctgctgctcttgtcttcctgccgttccaagcggatgattaccgtgtcgttgccgcagccagtcatgcaggcagacagcacgcagcttggcgatactatcgggttgcctgcccgcctttcgccgatgttcacctttgaccagtctgatttgcgtaatgtccgccgccagccggcgaagggcgaggtaaagaaacagcagataaagaaaacggcaccggtacaaaaggtaattgtgcagcgaggtacaagaatcacatcgaaaaccacccacgtaggctcggcctataagggcgtcagccgcattaagacgtacgacttcacgcatcgcgacgtgcctgccgccttcgagggcttccgcatcgcctttgtctccgacctgcactacaaaagcctgctgaaggaggagggattgaaggacctggtccgcctgctcatagaccagaaggccgacgtgctgctgattggcggtgactttcacgaaggctgccagtacgtgccgcccgtcatggctgccctggcgcaagtgaagacgccgttgggcacctatgccgtgcttggcaacaatgactacgaggcttgctatgacgacatcgtgcgcgaaatgaggcattatggcatgcatctgctggagcataaggtggacaccctgcggcgtggcggtgagcggattcttgtggcgggcgtgcgcaatcctttcgacttgggcaagaacggcacatcgcccacactcggcctttcgcccgacgatttcgtaatcctgctgacgcatacgccagactatgccgaggacgtcccggtgacaaactccgatctcatcctggccggacacacgcatggcgggcaggtgacgctgttcgggctttatgcaccgatagtcccctcgcactacgggcagcggttcctctccgggctgaagtacaactcaaagaacatcccgatgattgtcaccaacggcatcggcacttcgcagaaagccatccgcatgtttgctcccgcagaggtggtgatgattgtgctgcaccggctgacggactga

SEQ ID NO: 180 - DNA, 10572 bp, unidentified
  source 1..10572: mol_type = unassigned DNA
atgctgccggaatccgacagcatgcgcacacaacccgaacaaaagaaggataccactttttccggtggtattcggtatttcatgaaggagaggtcaaacatcgtgagtaagaagtatgtttatctgttttcagagggcaatggctcgatgcgggaactgctcggcggcaagggcgccaatctggcggaaatgaccagcctgggcatgcccgttccccacggcttcaccgtgaccaccgaagcctgcacccggtattatgaagacggcaagaccatcgcccccgagatcgaagcggagatcttcgaatttgtttccaagctggaagcactcgcgggcaagaaactcggcgataaggaaaatccgcttctggtttcggtccgttccggcgccagagcctcgatgcccggcatgatggacactatcctcaacctgggcctcaacgatgaagtggtggaaggcattgccaagctcacccagaacccccggtttgcctatgatacataccgcagatttattcagatgtttgccgatgtcgtggcagaagttcccaaggaatacttcgagcgtgccatcgacctgatgaagcagaagaagggcgtcaagcaggataccgagctggacgctgatgatatgaagcagctggtagagcagttcaaggcgctctacaagggtcacatcggccgtgacttccccaccgatcccaaggtacagctcatggagagcgtcaaggcggtattccgctcctgggataacccccgtgccatctactaccgccgtcagaacggcattccctcgtcctggggtactgctgttaccgtgcagatgatggtattcggcaatatgggcaatgactgcggtaccggtgttgcctttacccgtaaccccgccaccggcgagaagaagttcttcggtgagttcctggtcaacgcccagggcgaagatgttgtagccggtatccgtactccccagagcatcgatgagctcaagcagctcatgcctgaggtttacgatcagttcctggagattgccacccgtctggagcggcactacaaggatatgcaggatatggagttcaccattgagcgcggcaagctgttcatgctccagacccgcaatggtaagcgtactgcccaggccgctatgaagatcgcctgcgatctggtagacgaaggccttattactgaggaacaggctgtcctgctggttgacccctctcagctggatgccttcctccacgatcagttcaatcccgccgagctcaagcgtgccaagatcctggctactgctctgccggcttctcccggtgctgcctgcggtcaggtagtctttgacgccgaaactgccaaggaatgggtagcggaaggcaagaaggtaatcctggtgcgcctggaaacctctcctgaggacattgaaggcatgcacatctccgaaggtatcctcaccgtccgcggcggtatgaccagccatgcggcggttgtagcccgcggcatgggtatctgctgcatctcctcctgcggtgacatcaccatccgcgaaggcgagcactgcttcgaggtggacggcctcatcgtcaacgagggcgattacatctccctggatggctccaccggtcgtgtttacctgggcaagatctccactgtgggcgctggtctcagcggtgattacagccgtctgatgggctgggctgacaagttccgcaagctgcaggtccgtgccaatgctgaaacccctgccgatgccgctcaggcttacaagttcggtgcggagggcatcggtctggtgcgtaccgagcacatgttcttcgatgagcagaagatcaaggctgtccgggaaatgatcctcgccaagacccagacccagcgccagaaggctgtggataagatgcatgtgatgcagcgtgaggacttcatcaaggtattcgaggccatgcagggccagcctgtgaccatccgtctcatcgacccgccgctgcatgagttcctgcccaaggagggcgagaacctggaagctctggctgcagagctggagaccactcccgctgctctggaaaaggccattgtagagctgcatgaggtcaacccgatgatgggtcaccgtggctgccgtctggctgtttcctatccggagatcgccaagatgcagaccgaggccattatcgaggctgccatcactgtaaccgaggctcataaggactggcggtttgtacctgagatcatggttccgctcatcaccgacctcaaggagctcaagtacatcaagagcatcatcgtggctgctgccgaggctgttctcaaggctcacgacagcgacctgaagtacatgatcggcaccatggtggaaactccccgtgctgctctgctggctgatgagatcgccaccgaggctgacttctactccttcggtaccaacgacctgacccagatgaccttcggcctgagccgtgacgatgctgcttcctacctgggcagctactatgacaagaagatctttgacttcgatccctttgctaccctggatctccggggtgtaggccagctcattgagcgtgccaccgaactgggccgctcggtgaagccgaacctcaagctgggcatctgcggtgagcatggcggcgatcccgcttcggtagagttctgccacaaggttggactcaactatgtatcctgctcgccctaccgtgtgccgattgcccgtctggctgcggcacaggctgccatcaagttcccccgggactaaggcatctccccgataaggcataataaaaatccccgtgcagtacgcacggggattttttgcgttccgggaagacccggtcaggacggaatcctggacgcctggcggaagaggatcagccccaccaggaagagcagggcgatcatgcccacgcccaggctgatattgccggtgatctgggagaccacgctcaccaccgtggtgcccatgaaggaggcacccttgccgcagatgtccagcaggccgaagtactcacccgactggctggagggaataatgcgggcaaagtaggaccgggacagcgcctggatgccgccctggaacatgcccaccagtaccgccagcatccagaactgcgcctgagtgcgcaggaacatggcaaagacggcaatgccgaagtaggccaggatacacagagggatcagctgatcgcccgaaaacttccgggccagccgtccgaacaggatggcgaaggggaacgccaccacctgggtgagcagcagcgccagcagcaggccggtgctgtccagtcccagggcttcgccgtaggcggtagccatgtcgatgatggtgtagacgccgtcgatgtagaagaagaaggccagcaggaagaggaagattttcttctcctgccgcacgctggcaagagtccggcccagccgtgcaaagctctcccggatggcatggggctgacgctcgacgaagtgcttctgctcataccggcggagcagcggcagggtgaagcccagccaccacagggcggtgatgccgaaggagagccccatggcagtgaccatggaaagccccagcgcactggagcccagcaccagagccaggcatccggcaaagggaatgcagctgccgatatacccccaggcatagccctgggaggatacatgatccatgcggtcggcatcggtgatgtccgagagcatggaatcgtagaagatcaggctgccggaatagcccacccgggccaccacgaagatcagaaggaaccagagccagtgggcggcaaagcccagggcgatgcagccaatcagtcccacgcccagaaacagcaggaagatgggctttttgtagccctgggtatcggcgagggtaccgaacaccggccccagcaccgccaccagcagggtggcagccgatgccgcatagccccagtaggccaggtactgcacattggaaagcccggcctcctctgccagaaagttgaagtagatgggaatgatggtggcaatgagcagcgtgaatgcggaattgcccacatcatagagaacccagctgcgctccgccggggtgagtttcagtttgttcatgcgtttgctgcctcctgttccggcttgggatcaaaggtgcgcccatagatggggtcctctgcctgaccgctctccaccacccggtcaaagtccccgatgagccgggctgccagctccgctgcctgatcgaaccgccggagcagttccgcattgctgtcctcacaccggggttccggatcagggccgaccaccagcccgcccagcttctcaaactgacctgccaggcgcagggcggtgaagatcacccagcgtttcagagccgaaggcgccaccagcagattcagataaaagaccatgccccggagggaatccaacacctgttcctgtgtgacttccgggaagaaatcggcgatcacggcggcattctcctccgacggcaccagatgtccggtggggcggtggcttgccgggtccagtccgtcccggagcatgagcgcccgctccagctccgattcgatccgggcatggctcaggccgcttgccgcctccttttccgccacatagtcatggctgagggtatccagcgcgaaatggcagaggaacccgtatacataggcccggtgtgccaggctgtccggatgcatctgcagcacccgggcggcccgctcaaaaaaatcccggcccggacggtcatggaattcatggcccaaccggctcaccggatttttcgagagaggcttatagtaaaagaacagatccgggccgtgcagaccgatggaatagagctggggatagcgtgtaatggcctccagcggctccggcgtaagcagccgggcggtttcccgtcccagacaaaagtgtgcgtatgtagatggcaaagtgaaatttctcctttccgacggcagatgccgcccgggaacaattccctggggtcatggtgccgtggggcagcacaccaatcgcctcccaccggaaacactttggcagctgtctgtgcgccatgacagctctccggctgtgatgccgggaaagcctcagcggaattgtatcatcgtccggccataaaatggatcatagccagtccttggttattatatcatttttgggcctgctccgtcacccgcacagcgtaaattgtgtgtaaacagaaacaaaaaagcccgccttaaaaaggcgggctttcatgctgtcagcacaaggggttcggggagaggtatcccgaactgtttctgccgggatttttacttcttgcccgaacgctttgccacaaagttggcgagcatgggggtcaggaaggaagtgataataaccgaagcggctacctgcgcagtggcaatgggagccacagctgcataggaggggtccacagcagccagagcgccggggttggatacaccgctggcggcggtgctggagattgccgcgccagctacgccgttgcctccggtgatcttatccatgaggatggtcacaccgcctactacaaagacggtgatcagacccagcaggataccggacagaccgccctggaacagctgctggatggacattccgcagcccagtgcaaagccgaccacgatgatggacggagtaacaccggcagagagagtctgcttgaaccacggggaaacattacccaggataatgccgaggatcaggggcagaatggagccgatgatcgaccagatggagatgctggcaagaccggcagagctcagggcgatcatggtgacggtggggccgacactcagcgaagtgatggcaacagcgcccttgacggcatcgtcgtcatactgggatacaatgcccgaatagagggcgttgttggcaaccgataccgcgctgatgattgccagcgaggaaagacccaggaagttatcgccgaagaggaaggccacacccaggcccaggattaccgacatggcaaccttggtgccgatgatgacagcaccgatcttgatggccttgggggtacttttaatatcgatggtagcgcccatgaagagcaggaatacaccaaccagtgcgctggtgccggtaaccataccggtgaagaagccgccgatctgcagcacctgcggtacgaaggaattgagcaccacgccgatgagcatcggaacaacgatggtatcaccggggaaacgcttcattttcagtttgctcataaccgtaaaactctcccttatgtgttagtccagaacgataccgccgtcgcagtcgccgatctcgccgtttacaaagcttgcagcatcggaagcgaagaacagaatcatctgagcaggctcgctcgggtcagcagcacggcccagggggatcatgccgattaccttggcgctcttttcagcgtcgtcagacagagccttggtcatgggagttacagtgaaggacgggcatacagcgttgcaggagatgccgtacttgccgccttccttggcgatggccttggtcagaccgttgacaccggccttggaagtggcataggcagctgtacccagcagaccgccgccgatcttaccggcaaccgacgatacattgacaatccggccgcccttcttctcgatgaagtagggatagatagcggagcaggtggtgaaggtaccggtgaggttgatgcgcagggtgcggtcccactcagcatcggttacttcctggaagggaacagtggatacaacgccgccgcagttgatgaggacatccacacgctcaaagtcgcccagaacctttgccataacggcacggatgttgtccttgtcgcccaggtcgatcttgtaaaccgagcagttgcccagctcttcagctgtggccttggccttttcctcattgaggtcgaggattacagcatgaccgccgccgtttacaacgccgcggacaacttccttaccgatgccctgagcaccgcctgtaaccagaactgtttttcctgtgaagtcaaacatgataaatgcctcctgtattcgttcccttccattcttcggaagggatcactttctttattttgttggggtaccgccctgccggcaaagagcgggttttcgattgacaaacaattaactatcaatcttctgcttaagattatagcattgcaggcatcgaaaaaatatggtatcatagcctaaaaagtgaagctgattttaggctgacagcacaaggaggaatcgctatggatgaacagctcaaatgggaactgatccaggccgcgctggatggagaggagctggaccggatcaccgaccgggccgcccattacctgggaagccccctggtggtcatctccaccaccagcaatatcatcgcccattccgcctccctcaccccgccggatgaaacctggctgcacgctgtggagcggggatatatcaccctggaatttgtggcgaccctggcgggctgggacaagcataaagatcacggcacccggtatgagtgcatcaccgttgccatcaacgaccggcgccggcggttctacaagctcaccatccattcccagctgctgggctatctcaatgtcaccgagctggacgggcatttcgatgcggtcagcgaggaggagtaccattttgtggcccagctcatcgccaaggaggtctatgcccggctcaaggggcaggacttctcccgcaaggcccgggacgaggacttcctgctggaactgctccacggcagctttgtgaaccggggccatttcatcgaccggatgcgtctgagcggcttcgatccctcggcccagtaccgggtgctctgcatcgagctgggagacttcctctcctataacgccgatgaagataccttcaagcgggatctgctggaactgctcccgggcagcaccatgatggtcagcgaccaggtactggtgatcctggcctccgaccggctcttcctgccggaacgggccccggcaatgctccggaatctggacagctacctccgctcccagaagctcctctgcggcatcagcgatgccatcggcgacctctactacttctccacttaccgggatcaggcgctcagtgctgcccgctaccgcaagtatctcatcgaccagtccctggcctatacgttctatgatgaggtcaaggtctatgatattctccagcagatcccccacagtgagctgatccactactgttcccggcaggtctatgagatctatcaatatgacgctgcccagcataccgactatatcaccaccctactggcctatctcaaagccaaccgcagcgtgaagtccaccgctgcctatctgcacgttcaccgcaatacggtcaactaccgcattgcccgcatccgggagctgtttggactggatctggacagcttttccactgtccatcaaatcctgctctcctgccagatgatccggctgctccaggattaacccccatgaaacaaaaaatggtgttgtttcccgccattttggggtttgacggcggctcggatttgtgtataatgagtatacaggcagcctgtaatttttttgagattgttactttgtgtatcacacagatgctgccccaggagggttattatgaatattttgattgttggctgcggcgataccggttcccagcttgccaatgtactggatcacatgggcaatcaggtatctgttgtggatcgcaaccccgaaactgctgcggaactttctgactcctttaccggtatgtttacggtgggagttcccattgaccaggatgtgctgcgtcatgccggtatcgaaggctgtgatgttgtaattgcggtcacccgggacgacaataccaacctgatggtcgctcagctggcccgggatatcttcggcgtgcccaaggtaatctcccgggtatccgatccccggcgggaagaggtattcagcagcttcggcctgagtaccatctgtcctaccaacctcacggttgcttcggtggtagccgcactggatgaccgccgcaaacataccgaagaagtttatttcggcagcacccggatctcctttgaacagatggagatcgaccgccggtatctgggtgaatttgccgaagccattgaactgcccaagggtactgccctgatcggtgttctgtcccagagcggcaagctgcggctgcgcggcgaaggcatgcagactgtcatcggtgaaggcgatgtcctggtactggcccgttccatcggctgatgaggaggatcaatcgagatgaatgttattgtagtgggcggcggtaaagtaggctattatctggcagaaaccctgctggaacatggtcacaagccctttgtaattgaaaccgataaggagatctgccggaagatcgccaacaatctggatattccggttatcaacggcgacggcaccaccctgggagccctggaaagcgccggcgtggaacattgcgatgcctttgtcagcgttaccggacaggatcaggtcaatctgatcgcctgtcagctggcaaaaaaacgctatggtgtggaacgcaccgtagcccgggtcaacaaccccaagaacctcaaggtaatgaagcgtctgggcgttgatattcccgtatccagcaccgacaacattgcccggctcatcgaacgggagatcgatgtggcaaccatcaagcgtctgctctcgatcaaccggggcgaagccaccatcagtgaggtggagatccccaagaattattcccgcaacggcaccagcctgatggacttcaaccttcccaatgaatgtgttatcgtatccatcacccgtggggacagcctcatcattccccgaggcaatacccagatcttttcgggcgataagctgattgtcatctgccgcaacgagtacctgcatcagctgctccatgccctgcgcattgaataggaggttccctctgtgaagaataaaaccgttctggtcaccggcgctgccaccggcatcggacgcagcaccgcggaactctttgccgccatgggctatcaggtggcaatcggctgcaaccactcctttgccgagggactgcagtttgcccgggccctgtccgaaatgggcatgagcaccatggcagtcaaggcagacctcagccagcccgatcaggtggacgccatgttccggcagatcgagtcggtatggggcggtgtggatatcctcatcaacaacgccggtattgcccagcagaagctctttaccgacatcaccaacgaggactggaacgccatggtgggcgtgaacctctcgggcgccttttactgctgccgggcagccctgccctatatgatccgccagaaggcgggcagcattgtgaatgtgtcctccatgtggggcatctgcggcgcctcctgtgaggtgcactattccgctgtcaaagccggtgtcatcggcctgaccaaagcgcttgccaaggaagtgggccccagcggcatccgggtcaactgcattgcgcccggcgccattgccacccgcatgaacgacaacctggacgaggaagcagtggccctgctccgggaggaaacccctctgggacggatgggcacaccggaagagatcgccaaggccatcgccttcctggcactggaggacagtgccttcaccaccggacaggtgctcagccccaacggcggactggtgatctga

SEQ ID NO: 181 - DNA, 7584 bp, unidentified
  source 1..7584: mol_type = unassigned DNA
atggattcgaaacaaattgatgtgatggtggctgatgcctcacatgaggtttatgtggacaagattttggataccatccgagaagcagccaaagtacgtggaaccggtatagcagagcgtacccatgaatatgtagctactaaaatgaaagaagggaaagccattatagctttatgcggagaagagtttgccggcttcacctatatagaaagctggggaaacaagcagtatgtagcaacatcaggactcattgtgcaccctgaatatcgtggcttgggactggccaaacgcattaagacggcatctttccgcctggcacgcctgcgatggcctaaagccaagattttcagtctgaccagtggagcagccgtcatgaaaatgaataccgaattaggctatgtacctgttacgttcaatgaactgacagacgacgagtctttctggaaaggttgtgaaggctgcatcaaccacgatatattagtagccaaaaaccggaagttctgcatttgtacagcaatgctctacgacccgaaattacacgaagaagataaaatataaataaatatggaagcaaaaaagaaaaaagtagtagtcgcattcagtggtggtctggacacctcattcacagttatgtacctggcaaaagagaaaggatacgaagtgtatgcggcttgtgccaataccggcggtttcagccctgaacagttgaaaacgaacgaagaaaacgcctacaagctgggcgccgtaaaatatatcactttagacgtaacacaggagtattacgaaaagagtttgaaatacatggtattcggcaatgtattgcgtaacggcacttatcctatatccgtaagttccgaacgtatcttccaggcactggccattgcacgctatgccaacgaaatcggagccgatgccattgcacatggttcaaccggtgcaggcaacgaccagatacgtttcgacatgactttcctcgtcatggctccgggcgtggaaatcatcaccctgacacgcgacatggcattgagccgtcaggaagagatagactacctgaacaaacatggtttcgcagccgacttcgccaaactgaaatattcctataatgtaggtttgtggggcacctccatttgcggcggcgagattctggattccgcacagggacttccggaaagcgcctacctgaaacattgcaccaaagagggcagcgaacagttgcgcctcacctttgagaaaggtgaacttaaggccgtcaacgacgaaacattcgacgatcccatcaaggctattcagaaagtagaggaaatcggtgcggcctacggcatcggacgcgatatgcacgtaggcgacacgattatcggcattaaaggtcgtgtgggttttgaagccgccgctcccatgctgattatcggtgcgcacaagttccttgagaaatacacattgagcaaatggcagcaatactggaaagaccaggtagccaactggtacggcatgttcctgcacgaaagccagtatctggaaccggtaatgcgcgacatcgaggccatgctggaatcttcacaacgcaacgtaaacggtacggcaattctcgaactccacccgctttgtttctctacggtaggcgtggaaagcgaagacgaccttgtgaagaacaaattcggcgaatacggcgaaatgcagaagggatggactgcggaagatgccaagggcttcatcaaggtgacctctaccgcactgcgtgcctattattcaaaccataaagacgaaaaaatctaaatgatgaacgggaaacaaaaattgacacgcccgcgaaacggaagaatgttgtccggcgtatgcgcaggactggcagactttttcgggcttgacgtatcattagtgcgcatcatttatgttttcgcaacagtctttactgcatttgcaggcatactcatatacatcatattattaattataataccagaagaacccaatagatattatcaacatgattaaagtaggaatcatcggcggagccggatacacagcaggcgaattgatacgcctgttattaaatcacccggaagcggaaatcgtattcatcaacagctcaagcaacgccggcaacaaaattaccgacgtacacgaaggactgtacggcgaaacagatttagtattcaccgacgaactgccgttggacgagattgatgtgctctttttctgtacggcacatggcgataccaagaaattcatggaaagccacaacgtaccggaagatttaaagataatcgacctctccatggactaccgcatcaaaagcgacgaccatgactttatttacgggctccccgaactcaaccgccgggccacctgtacggcaaaacatgttgccaaccccggatgcttcgccacctgtatccagctgggactgcttccacttgccaagcatctgatgctgaacggcgacattatggtgaatgccatcaccggcagcaccggcgcaggcgtcaagccgggagcaacgagccacttcagctggcgcaacaacaacatgagtgtgtacaaagccttcgagcaccagcatgtgcccgaaatcaagcagtcgctcaaacagctccaaaacagttttgattcggacattgatttcataccttatcgcggcgattttcctcgtggcatttttaccactatcgtgataaaaaccaaagttgcgttggaagagattgtccgcatgtacgaagaatactatgccaaagactcctttacgcatatcgtcgacaagaacatcgatttgaagcaggttgtcaacaccaacaagtgccttatccatttggaaaagcatggcgacaaacttcttgtcatctcctgcatagacaacttgctgaaaggagccagcggacaagcggtacataatatgaacctgatgttcaacttagaagaaaccgtaggcttacgattaaagccgagtgctttttaatgataactcaggctatctgtcatattctgctttattacgaagaatttcagcaaatagaagatgctattgccagagaaaaggaactgaaaggatggagtagaagtaagaaagatactttaattaaagaaaagaattctacattagaagatttatgtaagtatctgcaatggaatggataagagagtaaatgctttgcttgaaataccaaatggtcttagttatattatcagtaacaacttgattgatacaatctttaaacaaagaagaaaatgaatttattcgacgtataccccctttttgacattaacatcgtcaaaggaaaaggctgccacgtatgggacgataaaggtacggaatacctcgacctctacggcggacatgccgtaatctctatcggacatgcacatccgcattacgtagagatgatcagcaagcaagtggccacacttggattctattccaactcagtcatcaacaagctgcaacaacaagtggcagaacggttgggaaaggtctgcggctacgacgattactccctgttccttatcaacagcggagccgaagccaacgagaatgcactgaagctcgcctcgttctacaacggacggacacgcgtggtatctttctcaaaggcttttcatgggcgtacctcattggccgtagaggttaccaacaatcccaaaatcatcgctcccatcaacgactgcggacacgtcacctatcttccgctgaacgatatagagtccatgaaatccgaactggcaaaaggcgatgtgtgtgcagtgatcatcgaaggcattcagggagtgggcggcatacagttgccaaccgacgaatttatgcaagccctgcgtgaaacctgtacaaagcacaataccatactgattctggacgaaattcagagtggctacggacgtagcggcaaattctttgcccatcagcacaacggcatccaagccgacataatcaccgtagccaaaggcataggcaacggcttcccgatggcaggcgtacttatcagtccgatgttcacccctgtctatggacagcttggaacaactttcggtggaaatcatctggcttgcagcgcagcacttgccgtactggatgttatcgagcaggaaggacttgtggccaatgcagccaaagtaggcgcgtacttactggaagaactgaagaaattcccgcaaatcaaagaagtacgcggacgcggcttgatgatcggtctcgaatttgaagaacccatcaaagaactgcgtttgaagttactgaaagagcagcatgtgtttaccggcgtcagtggaacaaacgtactccgcctcttgccgcccttgtgcctcagcatggacgaagcagacctcttcctggaacgttttaagaaagtactttgatatttgaagaataatcagccgacaaaagagacgaccgaaagaagaataccttcctgtttcggtcgttttttatagaaaatctttacctttgcctaaagacaacattttaaattacaaaacgatatgaaaacagcaattatcggtgcaggaaatatgggcgggtccattgcccgcggtttggctaaaggaaccatcattccggccaacgacatcattgtttctaatcccacgcaacataaattggatgttctgaaggcagagtttcccgctttacagactacccgcgataatcaagaagccgttacgggtgctgaactcattatacttgccgtcaagccatggctgataaaacctgtcgtaagcgaacttaaactgaaaagtaaacagatacttatttccgtagcagccggcataccttttgaggagttggcacactatgtggcagacaaggagatgacaatgttccgtcttatccccaataccgcaatcagcgaaatggagagtatgacactcattgcaagccgcaatgccagcaaggaacaagaacaactgttgctcgacattttcaatcaaatggggcttgccatgctgattcccgaagataaaatcgcagcggccaccgccatgacttcctgcggcatagcctatgtgctgaaatatatccaagcagctatgcaagccggaatagagatgggtatttatcccaaagacgggatgcgcatggtggcccagtctgtgaaaggagccgccgaactgatactgaacaatgatacacatcccagcatagagattgataaagtgtgtacccctggcggaattacaattaaaggcattaatgaactggaacggcaaggattcccctcagccattatcaatgccataaaagcaagtaaataataaaaataatcacttaatactaaccacatggacgaacaaattaaacaaatagccgaacgtctgcaaggattgcgtgaggtattggaattgacagccaaagacatcgcccgcgattgcgatatttcggaagaagaatatcggcttgcagaaacgggagaatttgacatctccgtaagtatgctgcagaaaatagcccgccgttacggcgttgccctggatgcactgatgtttggcgaagagccgaaaatgagcagttacttccttactcgtgccgggaagggaaccagcattgagcgtaccaaggcctacaagtaccaatcgttggccgccggtttcatgaaccgcaacgccgacccgttcatcgtcaccgtcgaacccaaaccgaacgacgaaccgatacactacaacagtcactccggacaagagttcaacctggttctggaaggacgcatgatgctgagtatcgacggcaaagacttaatcctgaacgagggagacagcttgtatttcaactccaaactgccacatggcatgaaagcgttggacggaaagaaagtacgcttccttgctgtaatcatgtaacaacataaatgaagaatggagaacgaagaatgaagaataagctgtacgcttatgccgtacatcaggttcttaattctcaatttccaattcttaattcctaaagttatgatagaaagatttttatcacaaacgtcctttacatctcaagaggactttatcaagaatttaaagattaacgtaccggagaatttcaactttggctatgacgtagtcgatgcctggtctgcagaacagccagacaaacctgcattgctctggaccaatgacaaaggagaacatatccagttctcatttgccgacatgaaacgttatacagatatgacagcctcctatttccaaagcctcggcattggacatggtgatatggtaatgctgattctcaaacgccgttatgaattctggttcagcatcatcgcactgcacaaattgggcgcggttgttattcccgccacacacctgcttactcaaaaggatattatatatcgttgcaatgccgcagacatcaaaatgattgtctgtgcaggtgaaagtgtcattaccgaccacatcaccgctgccatgccaagttctccgagtgtaaagaaactggtcagcgtaggtccggaaatacccgaaggatttgaggactttcataaaggcatagccaatgccgctcctttcacaaagccggaacaccccaacaagaacgacgacatctctttgatgtatttcaccagcggcactaccggcgaaccgaaaatggttgcccacgacttcacctatccactggggcatatcgtaacaggaagtttttggcataatctgcacgaaaacagcctgcacctcaccattgccgatacaggctggggaaaagccgtatggggaaaactatacggacaatggatagccggagccaatatctttgtatatgaccatgaaaagtttactcccgccgatattctgaaaaagatacaggactatcacgtcacctcactttgtgcaccacccactatcttccggttcttaattcacgaggacctgacgaagtataacctttcttctttgcaatactgtaccattgccggcgaagcattgaatcctgccgtattcgatacattcaagaagttgacgggtatcaaactaatggaaggcttcggacagactgagacaactcttaccgtagccaccatgccatggatgaaacccaaaccgggcagcatgggattgcctaatccccaatacgatgtcgacctgatagattatgacggccgttccgtagaagccggagagcaaggacagattgtaattcgtaccgacaaaggcaaaccgcttggcctgttcaaagaatattatcgtgatgccaaccgcacccacgaggcttggcacgataacatctactacaccggtgacgtcgcctggaaagacgaggacggctatctctggtttgtaggacgtgccgacgacgttattaaaagcagtggttaccgcatcggcccattcgaagtggaaagcgccctgatgacgcatccggcagtcatagaatgtgccattaccggagttcccgatgaaattcgaggtcaagttgtaaaagcaaccatcgtattatccaaagagtacaagaaccgcgccggtgaagagctggttaaggagttgcagaaccatgttaaaaaagtaaccgctccttacaaatacccgcgcgttatagaatttgtagaggaacttcctaaaactatcagcggtaaaatccgtcgtgtggaaatccggaagaatgacgagaaataa

SEQ ID NO: 182 - DNA, 9155 bp, unidentified
  source 1..9155: mol_type = unassigned DNA
ttaatcgaccatattatctgtcttcgggcgcaggaagaacaactgaagagccaaagcaaccagaacgatgacactcaacatggcaaagccctgtcccaatccacctccgtcagtccatttgcctaaaagctccgttacggctgcaccggcaaatacgcctgtcatgttcatgattccgtatgccgttccacgatgtttgtctgaaacaaactgacacagaatcggcatattgttggcatcgaagataccgtaacccacaccaaagagcaagccggctcccaccacactcacaaaactgtgtccgaaacccaacagcaacaaggaaggaaccgtcagccccaagccaatggcaccggtataaacacgtccgcggatattcttctgcacccatttatccgacaggacaccacccacaatgacaccgataaatgatgacagagcaatggttatagtagaaatcggacctgcctcagccatggggatattcagactttcggagaataatgtcggaagccagttcttggttgcccatcccggcaaactgggagctgcaaaatagaacaggataatccagaaagcccagttggatagtacaattgccagtccgctgaacacagaccctttcttgcgaggcgtttcttttgcaagtttctctatctttatatgagtaggattttcgtgcaggaacagcaccaataccaatgcatagacaatacccacaataccaaaccaatggaaagtaagctgccaggagaaagcggccgccaccgttgcgccgaaacctccgatagcctgtccggtgtacagaccggtcatgtgaataccgatggccagagagcgggatttatcctgatgccagtcggcaatcagtgaaagtgctgaaggaatatatagagcttcactcacccccatggtggcacgcagccagtaaagttcatggaaatcagtcgcataacccatcaaataagtcacggcagaccatacaaaaaggctaccgacgattaaccatttacgactcacccgatcagcaataacaccggctaccggactcataaagccgtaaatccacaaaaatacagccatcaaagctccaaaagcctcagccttattgagctccacaatgtccactttcattgcttcctgcatagtagaaagcatctggcggtccatatagttgagaagtgccacaacccacaaaagacctaccaccacccaaggatagattttcttgtttttcatttatattaaatcaattcgactgcgcaaatataggaacttaatttaataacacaaatagatttaatgaaatattttacgatataacgattattttttaaacagaggtaagaattaaaacaagatgctgttattgaagccttctttaaggtaaagtaagtataaatcatttaaatttcatacagaataaaagagggaaagaagaccggcatcctgcaaaattcccctccataaaagtataaaaaaaataattcggcgaactattatattaataaatcaccgaacaattcataaattaatttattatatcaggaaagagagtcacttctttgccaaatcgtccattgtcttaccctcgtaagcacaaatcgcctgtttatactcctcggctatctgcttcggctctttggttgcaatatcataacccaccatcactgtacggcactcacattttacctcctgcgtatccgttgtcacagcacgttgcagcaatgtgaagcttttatgccctaactgaacaacagctgtctctattaccaaatggtctgaaaagaatacaggcgcatagaagttggcattgatatttgctactacaatggccatcttattccaatccgcactccccaacacatcttttatataagttgtctttgccaaatcatataaagaaaaataaaccgaattgttcacgtgtccgaactggtctacgtcactgaaccgtatttgtaccggcatcgtatgcctgaattttatttcctctcccatagttatgcttattaatttcattcaaatataatacttttcctaataaaagaacactaaataagagattattcttacttttgcgttcaatttatttaaagtgaaaccattaacttaaagaatagacatggataagaagtttagcaaatccaccctttgcgtacaaggaggatggcagccgaaaaaaggagaaccgcgcgttttgcccatttatcaaagtacaactttcaagtatgataccagcgaacagatggctcgtttattcgaccttgaagatacgggctatttctatacccgcttgcaaaacccgaccaatgacgcagtggcggcaaaaatagctgcattggaaggtggtgtgggcgccatgcttacttcatcgggacaggctgctaatttctatgccattttcaatatctgtcaggcaggtgaccattttgtatgctcgtctaccatctacggcggtactttcaacctcttcggagtcacgttgaagaagcttggcatcgaatgcacttttgtcaatgccgacgcacccgaagaagaaattgacaaggctttccgcccgaacaccaaagcattgttcggagaaaccatctcaaaccccagcatcgatgtgctcgacattgagaagtttgcacgtattgcccacaagcacggggtgcctctgattgtcgacaatactttcgccactcccatcaactgtcgtccgtttgaatggggagccgacattgtgactcactctaccaccaaatatatggacggacatgccaccagtgtaggcggagccatcgtagacagcggcaatttcgattgggaagcgcatgccgacaaattccccggactgactcagccggatgaatcttaccacggactgacttataccaaagcattcggtaaaatggcctatatgaccaaagctaccgcgcaactgatgcgtgacctcggttccattcagtcaccgcaaaatgcgttcctgctgaatttgggactcgaaacacttcatctgcgtgtgccccgtcactgtgaaaacgcacagaaagtggccgaatggctggaagccaatccacaggtgaaatgggtaaactattgcggtctgaaaagcagcaaatattatgaactggcacagaaatatatgccgaacggctcttgcggtgttattgctttcggactgaacggcagccgcgaagaggccatcaagtttatggatgcactgaaactggcctgcatcgtgactcatgtggcagatgcccgcacatgcgtgcttcatcctgccagccatacacaccgccagttaacggacgagcaattgatggaagccggagttgctcccgacttaatccgcctgtcggtaggtatcgaagatgccaacgacatcatcgccgatctggaacaagctttagaacagattaaataagataagccatgtcagtcaaacgggttgttatcatcggagccacttcgggcatcgggctggaagtagccaaaggctacctgaaggccggatggcaggtaggcatagccggacgcagggaagaggaattggaaaagctccgccggactgctcccgaacaggtgtgtgcccaagtcttggacgtcactcacgaagatgcaccctatttgctgaaacaactgatagacgagttgggaggtatggatttatttttgctgagctcaggcattggtaaacaaaacctctctctgacactcgatatcgaattacagactgccgccaccaatgtggagggtttcatccgcatggtgacggcagcctatcattattttgaacagcaagggcacggacatctggctgtgataagttccattgccggaaccaaaggactgggttcggctcccgcctattccgccaccaaacgttttcagaatacttacatcgaggctctcgaccaattggcgcatatcaaccgcctacccattgtgtttactgatatccgtcccggatttgtagccaccccgctactgaaagacgacaaatatcctctgctgatgaacgtttccgcagtcgccgcccacatcatcaatgcactcaacaaaaagaaacgcaccgtcatcatcgaccggcgttatcaagtgctggtgttcttctggaggcttattcccaaatggttatgggtcaagttgcccgtcaagaattaaaaagcgaaaaacctatcacaggcaaccactttcattttaccttgtaataaaaaaggaccggattagaatcctcttccacccggtttaacaattccagcatcttcacggtggtctttgccttgactttcggataagtttcaaccaaagacttcaaactcatcaagcttcctgccatagccacaaagcatatcctttctttttcaccgcccaccggagtataaccgtgcaagttatacccgtattcagactggaatatataatcatatttacgaacagcgtcgtcccattttgacaagatatacaacctatcaaacaagttcgttcggaacaataaatgttcggaagtttcggtcacatccgtcatcaaataaaccaagcctttctctgtggagaatttattcaagtcacggcagtcatacaccttatcctttgcatcctccggaaatgtttcattcataaagtcaatagtataagaaggagataccgattggttttctaacttataaattgtattatcaaatttccgggtaaacagcacaggcgatgaagcactcaactgatgccctgctataaaacaaaatggggcaatttctatcaatggttccaacaagcccgttgtctcttccccgtgaatcgcagttatagaattttccgacaaccggccattggcgtaagtttcattctccaaataaataaaatctccgtccaaagcaatagagtgataataaccgggcaattttcggctactgatgaaattgccttccgcatcaaaacgcagcaacgctgacggttcggtcaacagcaccaactgattttttcgtttgtcaatggcgacatccatcacagcactatactctggccccatcccaacccgatggatagtaaacaaatgtttcccatccatattaaaagccaccacttgtttccccgctttatcaagtatataaaggttccctttccattctatcaacctgttgacacgggcaatcagcgcatcgtctttcgtctctaaggcaataacgcgagaatcatataagaatgtagtatctgctatcgatggctctccttcttctaaaacagccgttgcttcacttccatattgtgaagtagcgcaccctgctccaagcaataacaggaacaacaaaaggaaatattttgtccgcataatatttatgtttctcaaggtcatacagatatatcaacattgaaaaaaggattcaggtcctttttcattaactacttgagatataagcctatactcgcacacagccaaagtgcacaataataaattccttttcataagtatttcaattttaaagttaacaattacactaatatacatcttatattgaatagaaaaaaataattttatgcttttctttgtaacaacattctctctgcttccgtctatctagatgaaagcgcttttaaaaagagaacctgaagtataaacataaacaaaataaaaccatgaaaaagtatatattggcattagcactgttgtttgtctgtcacatcggttttgcccaagaccttaattctctgttcgatgaattcaagaaagagcctaacgcagactgtattagcatttcacctttcatgatggctatcggaaagatgttcatgggcaacgacagcgatgcgaagcttgcccgaaagttcaaatcaataagaattttggatttggaagcctgctcgacaagcgtaaaggaacgcttcagcaaaaagataaacgcacagcgaattaaagactacgaaacgctggttcaggtaaacgatgaaggtgaaaaagtgcacattctggcaaaaagtaagaacgacgtgatacgcgaactgctcatcgtctgcaccgggaacggcgattgcacattggtacagttaaagggaaaagtaagcaaagaaaaaatagccaaactactggcaaaagaagaaatgatgtaacatggacgccgctagttttaaacaacaatttctaccttgccatgccaaactctatcgagtggccttccggctgatgggcaacgttcaggatgccgaggatatggtgcaggaagcgtatctgaaattgtggaaaaagcgcgacgaactttccgaagttgccagcatcgaggcttattgcgtgacgcttatcaagaacttgtgctatgattccctgcgttcctgccgaccggacgaagacagccgactgcccgaagagcttaagcttccgacagacagcaacatcgcccgcgagatagaacaaaaggacgaagcaaggcaggtaaaaagactgattagacagttgccccggtcacagcaacaaatcatcttgctgcgtgacgtgaatgactgttcctacgaagaaatagaacaagtcaccgggcttacagccgtcaatatacgtgtattgctgagccgcgcccgcaaaaagatacgtgaacaatttaatgaaattatgaactatgaaagtaaatgaaatagaagaattactggtccgatattatgacggtgagacgaacgaggccgaagaaaaggaactgaaagagttctttgcccaagcggacgttccggcacatttacttgccgagaagagactcttcatgcagctcgcctcacaacctgaaccggagacacccgaaggactggaaagtaaattaagcggtctgatagacgaatgggacacgcatgaacggcgaagcacgaagataaaaaagcatacacgcatcatccacttacagtgggtaggcagcattgccgccagtctgctcatcttgttctcggtaggaatgtatctgtacaaaccttacactcctcccactccgcaagacacctgctcttctcccaccgaggcatacgcagaagctcagaaggcactgttcatgttctcgtcagcacttaacaagggagtgcaacaaatggaaacggtgcacgaaaccaccgaaaaagtacaaaagaatgtaaaccaacagttgaaacgatttaaaaacttgagacaatgaaacgtacatatattattaccctgctattgtccctttgctcattattcacttatgcgcaagagtctttttttgacaagtatgccgacatggaaggcgttacgtccgtatatatatccaaggcgatgctcagcctgatgcccgatatgaaaacagaggaaatctatatcggagagctggcaagcaagttggacaatattcagattctgaattgcgaaaaagcatctgtcactgcacagataaagaaagatatcagctacatcagtcccaagaacggctatcaagagctgatacgtattaacgatgaaggtgaaaaagttacgattttccagaaacagaataagggaaagcaaaaagaattcgtattgctgtgcgaggaacagaatgagcttaccatcatcatcatcaccggaaacttaacattgcaagaaattcaaagcatcgttaataagaattgacgaaggagtgctcaaaaaagaccttgaggttttgaagaaagaccttgaggtttttgaaaaagatgaaagagtttttttaaaagacccaggtcttttatcagggaactgttatcacgaaaagccttccgcctttttcattataacggttctttgtgacagattttatccatgtaacacgtttcacatcaatccattataaatcaatatattatccccacaatatgtgtgaaacatgatttgtatttatctctgttcaaacacttttgccggaagaaaatccgtaaatatgtacccaaaaggtctcttaagacctttcccaaacaatagggaaagttttctccaatagtagtaacagtcttcaagaacaatacctattgtttgggatataagataccgtcacattatctcagttcttatacttcaccagcataaccaccggattagactcctcatccaatcccgctgtcacctctttcagtcggcccttcaatccatcttcttgataagcctcgacaagctgaccggccgacaatgtctgaacagccgcgattccattattattgattggatgcaaaaacatatccacactgcgtttctttacaaaatcactattgagcacctttgccttataaagctcattggtctgcttatcgtacataaaatcgttcataaagaatcctcgcccggtagtaaaatcaaactctttctttacagtgtgaagaaaataataacgatcggtgacagcccccattgtcagaagtatctccgggtccttggtaggtgctttcacaaagaacggaaccagtttattcttttcgggcacataattatatactgtgtccgaagaacagtcaaccagcagccattctccccgattcggaataatcggacgtacagaagtcatcgccactccgtctccctgatgcacacaaggggtcttgattatatcataaggaagataaatgtcgcgggtaacacttccatctttcttagaaatgagcgaatgataagatttcccttcctctctggactgcccgtccttataataaacagacgcatcataacaaatcagattgtctttgtcataattgagaacatccatgtattcggtatctttgggatgagcgaaagagcgcttgaagtttcccgacaaatcatacacataaatcttcttcgctgcagcgcagttgacaaacatttcatcgttgttttcatccagaataattccgctgataaaattatattcttcggcaccttgtcccttccggtttattttccgtatggctttaccggtttttctgtcataaacaaaaatgtcgccatcgtttgcccagttcttcaccaacagatacttgtcacctatatccatcacgctcccctgagtcacaaattcatcacttgtctccaacggaatgtattccacatccataaaatcctgaagaactacttccttctcggaatgttcggtggcaatatccaccgtgaccatcgttgtctgctctttttccgctccgcatcctacacacacagccaccaagagcagtatcgcaaatagttttttctttttcat

SEQ ID NO: 183 - DNA, 15003 bp, unidentified
  source 1..15003: mol_type = unassigned DNA
ttaagcctgctttgcagcagcctcagccttgatgcggccgatctcagcctggatctcttccatcttctccttggtcaggggatagaagtgcatggcaacaacgttgcacagccagccaacgatgggcagcaggacaaagcagccgatggttgcccagaagatgccgtcagagtacggagtcagggtgtcgggcagagcgtccttgaagccgaccatggagtagaacagggccaccagagtggttgccagagaagagaccagcttatccacaaagctgaacagggtacccatcaggccggggacgtacttgccggtacggtagacttcgtagtcggcgcagtcagcggtcatggtgataacgatggaggaggacagagcctgcacaccacgccatgcgatgatcagcaggatgaagatcaggccggtagcagtccagccgttgaacagggtgccccaggtgtcgggacggatgatacggaatgcaggcagcgcaaacttggtagcatcgcccttggggttcacaaagaccaggaacagggtgatgatgacagaaccgatgatgccgccataggtaccggtcatcatggatgccttctggcccatctgacgtgcgatcttgttcatcagcaggatggagatcagagcgatggggatagaggtgatctgagagtagctggagaatgcggcatagttgccgaagatgatgccgaacaggcagatcataacagtggagttgctcatggtggacatgaacagcttatcggtagatgcggagaccaccagcatctggatggcgcggttgtgagccagggtgtcaacgtaatccttcacgccgaccttctgggcggtgcccagaccgaagtacttggagttatccttacgccacagggcaatgatggcgcagactgcaaacactgcagacaggccgccgaacatcagctgcatggtggtgaacaggccggggttgtagaaagcggacaggctgccgccggacttctccacgatgcctgccagagcggggttctgtgccaccagagaagcgatctctgcagcgttgttctcagcagtcagggtgaacttgggaaccaggctgtcggtaacgatgacagggatgacaatgttcatcaggatgatgttgtacacggtatcgcacattgcgaagatggggcgctgcttgggatcgttggtcaggcaggtctgagcagacttggtgacaacgcactggcaggtgtagcccaggatgtagatcatgtagatgatgatgaacgcaacaaagcggacaccagtgcccatcttggggatgaagttgaacatcacgaaggtggtgacgaacatgatgatctgaccgatgacaatgaacggacggtttttgccgaacttgccgttggtcttatcgaccatcataccaacgaacgggtcggtgacaccgtcccagatacgcatgatggtaacaatggaaccggccagcacggatgccagaccgacgataccgatcaggaagtagctgatgtaaccgaccaccatcatgtaggtgttggtggaggtgttgttcagagcgtacatcatgatctcccacattttcgctctgtggatgccgttttcttcaagcggctgtttgacctttgccatagagaagctctcctttcaattctgcggccggtgtgctgccactcactccggcctttcattcggtcccccgtgggctgcggctgccacatcgcgaaccgggggatttttatgtatacattatgaactatccatcaaatttctgttagtaaaattttgtgggaaaacaggacaattttactctccttgggcgaaatcaacagttttaaaaaacagcgttcgtcattttgcacatgattgcaagatactagtacagcacattccacaaaacagacttgtattccaaccgcgcgcaaaaaaagaatacaaggaaagtgcggaaatatccaaaaaattttctagttgttccgcgcggcggcctattataataggtatagcatctgcggctctgtggcatgggccgctgcgttcaaaagaaaaggagaaaacactatggcagtgaaagcatccgagcgtgtaaagcgctaccagaaccccaacggccccaccatcagcaccgtggagcgcaaggtcatcgagcaggacggcctgtatttcaaggacatcgacggcaccggcaccgtcagcgcagtcaacgactggcgcttgaccccagctgagcgcgccgaggcctatgtcaaggttctgaccaccagcgagaagatcggccagatcttcacctccgactggcgcatgggccccaagtatccttccccccgtctggcagccaacggccacaagcccgtggcggacgaaagcggcctgctggacgaggcacccgtgaacgtctccgacagcatcttcggctcccagtccctgcccagcacctctgacatggtcaagaagagcttcaaccgccacgtcatcctgcgcgagagccccacgcccgaggatctggcagattacctgaaccagctgcagtacctgaccgagacctgtgatcactttgttcccatgcaggtcatgtccaacagccgcaacgagaacggcgaggtcgtgttcggcatgaacgatgccaccggcgtgtttgccacttatcccggcaccctgggcattgctgctgccgtcaagggcaccgcacgcatcgacatcatcgacaagttcgccgacaccatccgccgcgagtggaacgcctgcggcctgaagaagggctacatgtacatggccgactgcgtcaccgacccccgttggcagcgcaccttcggtacctttggcgaggaccccgcactgatcgaggagatcttcgaccacctgatccccggcatccagggcggcagcaacggcgttacccccgagggtgtttccatgactgtgaagcacttccccggcggcggtgcccgtgagaacggctttgacccccactatgcagcaggccagtggaacatctacgccacccccggctccctgcagaagtaccacatcccggcattccgcgcagccatccgccacaatgccgagtccatcatgccctactactccaagcccagcgccgagaagagcgctccgcaggaggacttcaacggcaaccccatcgaactccagccctacggctttgcctacaacaaggtgttcatcgacggcctgctgcgcggccagatgggcttcaagggttacatcaactccgacaccggcattgtccacaacatgtgctggggcgttgacatgctggacgagcccgagcgcatcggctatgctgtcacccagagcggcgtggacctgatctccggcctgctggacaacgagctgggcgaggagagctacgcccgcggcaccaacgactactacgacacccacgcagtgcccgccggcttcaagaaggaagatctggtgctgaccgatgccagcctgaaccgcgctgtcagccgcaccctgaccgagctgttccgtcagggcatgttcgaggacacctacgccgaccccaggaaggccgccgaggtcgttgccaccaaggccgactgggaggaagcttcccgcgtgcaccgcgagtccgttgtcctgctgaagaacgacggcaccctgcccctgaaggacggcaccaaggtctacgctgaggcctttggcaagagcgccgaggccggtgaggccgccaccaaggccctgcgcgagatgctgggcaatgtcactctggtggacacccccgatgaggcccaggtggccctgctgatggtcagcccccagtccggtgcatacttcaacgccaccccgggctacctggagctggacatctgcgaggacaagactgtctgcaacgtggatgagagcggcaagcccaccaccgagacccacaaggagaccactctggtgggcgcaaaccgtctggccggtatcgctgctgcggtccacgcccacggcggcaaggtcgtttccaacatcaactgcccgctggcctgggaggtcggcaatgtggaaaaggtctccgacgctctgaccgttggctttgacacctacccctccgcaacgctggatgtgatgttcggccgctttgctcccgttggcaagctgcccctgaccctgcccaagggcgacgaggtgctggctgtgaacgcggacggtgtctgcatcagccccaacgacgtgcccggctttgcaaaggatgcctacatgcccgacagcatgaaggacgagaacggcaaggcttacgcctaccgtgatgccgcaggcaactactacgagatgaacttcggcctgacgttctgagggcagccctctccgtcttgctcaaaccaaaggagacactttccatggcacaaacgcagaaaaaacagcaggatatgggcacgggtgacgtgaaaaagctcctgctccagctgatgatccccgccgttgtggcgcaggtggtcaacctgctgtacaacatcgtggaccgcatttacatcggccacatctcggggatcggcgcggcggctctgaccggcgtgggcctgtttacccccatcctgatgctcctgaacgcctttgccatgctcatcggctccggcggcgcgccccgcaccgccatcgccatgggccagggcgacaagaagcaggcagaaaagatcgtcagcaacagctttaccatgctgctgctcttctcggtcgtcctgaccatcgtcttttacgccgccgcacccaccctgctgcggctgtttggtgccagtgacaccaccctgccctacgctctggcttacagccgcatctacattctgggcaccatctgcgtgctgatcgtgcttggcatgaacaccttcatcactgcgcagggctttgccaagatcagtatgctgaccaccgttatcggcgcggtcatcaacatcgtgctggaccccatcctcatctttgggctgggcatgggcgtaaagggtgctgccattgccaccgtgctgagccaggcagtgggtgccatctgggtcatccgcttcctcaccggccccaagaccatcctcaagatccgcaaagaggacatgaagctggaagggaagatcatcatgcccgtgctggcactgggcatttccaccttcgtcatgctctccaccgagagcctgctgtccatcagtttcagctccagcctggcccgctacggcggtgacgtggccgtgggtgccatgaccgtgatcaccagcgcctcccagctgtgcaccatgcccatctcgggcatctgccagggcggccagccggtgatgagcttcaacttcggcgcaggcaagaaagaccgcgtcaagcaggcattccgcttccagctgatcctctgcctgagctacaccaccatcttctggctgctgatgatgctggttcccggtgcagtggctggcatcttcacctcggatgcctccctgatcgattacaccacctgggccatgcgcatctacatggcgggcatcttctccaccggtgtccagatcgcctgccagcagagctttatggcgctgggtcaggccaaggtcagcctgctgctggcctgcctgcgcaagctcatcctgctcatcccgctcatcttcatcctgccccatgtggtcgcgaaccccgtgttcggcgtgttccttgccgagcccgtcagtgacatcatcgccgctgccgtgaccgccaccaccttcttcctccagttcaataagatcctggacaagggcgctggcagggtctgatgccttgtccgcctgaaaataatcatccgtatcaccacaaccatctgatcaaaaaaggagtatcctcgtggaaaagaatgttctgaacaccgacctgtccggcaaggttgccgtggtcaccggtgccagcggcaccctttgttccattttcgccaaggctctggcccgggcaggagccaaagtggctctgctgggccgcaacatggagaagctgaaggagctggccaatgcgatcgaggcagaaggcggcgtggccaagggctacacctgcaacgttatgaacaaggccaactgcctgcaggtggcagaggaggtgatggcggatctgggtccctgcgacattctggtgaacggtgccggcggcaacaacccccgggccaacaccgacaaggaattcttcgagatggcggatctggacgatgacaccgtgaccttcttcgatctggacgagagcggcgtggagatggtgttcaacctgaacttcatcggcaccctgctgcccacgcaggcctttgcccgacagatggtgggccgccccggctgcaacatcatgaacatctccagcatgaacgcctacctgcccctgaccaagatcccggcctactccggctccaaggctgccgtcaccaacttcacccagtggctggcagtgcacttcagcaaggtgggcatccgggtcaacgccattgccccgggcttctttgccagcgagcagaacgcacggctcctctacaacgaggacggcacccccaccgcccgcaccgaaaagatcctggctgccacccccatgggccgcttcggcgacagcgaaaaggatctggtgggtgccctgctgttcctgctgaacaacgaggctgccggcttcatcaccggcatctgcctgcccattgacggcggcttctccgcctactctggtgtctgatgagggccccggcctgagctgcagaccctgagagaaacaataagagccccggagctgcagtttccatgcagctccggggctctttctcgttttttacagaccggccagcaggatggccagcacggctttctgcacatggagacggttctcggcctcgtcaaagatctcgtcggcgtgctcttcaaagacagcggtggagatctcctcgccccggtgcgcaggcaggcagtggaggagcatggcatcgggctttgcgccctccatcagcctgctggtcacctgaaagcccgcgaagtcccgcagacggcgctcactttcgggggtgccgggggccgtgttccatgcggcggtcaccaccacatcggcatccttcacaccctcggcggggtcggtgagcaggtggaacttttcgccatacttgtgggcgaacatcagcacgtcggcggcagggcggtagccctcggggcagacacaggtcacacgcatccctgccagcaggccgcccacgataaggctgtttgccatgctgcagccatccccgatgaagcagagcttctggccctccagcgtgccccggcgctcccggatggtcatcaggtcggccagcacctggcagggatgggcgtagtcggtcaggccgttgatcacgggcacaccggccagctcggcaaactcttccagatcgcactggcggtaggtgcgccagaccacgcagtcgtagtagcggcccagcacccgggcggtgtccttgaggggctcgccccggccggactgcagctcggtggcggcgttcatgtaattgcccagaccgcccagctggtagacacccacctcaaagctggtgcgggtgcgggtggaatttttggagaacatcagcgccacgctcctacccttgagcagcgccggggtcgtcccggccttctgctctgccttgagctcctccgccacatcaaggatgtggtggagctcagcgggggagaggtcgctcattttcagcagatgtttcatgcctgctcctttggagccttctgctccatctcggtcagcacctcgttcaggatgcccagagccttttccacatcgtgggcggtcagggtcagcgggggcagcagacgcaggcggctcttggccgtgagcaccagcaggcccttttcgcggcaggcagccagcacgtccgcggcctggatgccgccaaagaactcgatgcccaccatcaggccaatgccggaaaggttcttgaccatgggcagcttggccagaccagcacgcagctggacggcccgctcactgacattggccaggaagctctgatccatccgatccaccaccacattggcaccggcgcagaccaccgggttgccgccaaaggtggatccgtggctgccggggcccatgccctcggcggtcttttcgttcagcagaacggcaccgatgggcaggccgccgcccaggcccttggccagcgtgacgatatcgggcttgaggttgtagtgctcacagcacaggaaggtgccggtgcggcccacgccggtctgcacctcgtccacgatgaggacaaggtccttttcatcacagagggcgcgcacagcctgcacatactcagggtccagcgccatcacgccgccctcgccctggatcagctccagcataatggcgcaggtatggcggtccaccagttcccggaggccttcgatgtcaccggcggtggtatagacaaaaccctcgttgaaggggccgaagtagttgtggaacacctcctgaccggtggcggtcagggtggcaatggtgcggccatggaagctgttgaccagcgtgatcacaacatcgcggcccttgccgtagtgatcaaagctgtacttgcgggcagccttgatggcaccctcgttggcctcggcaccggaatttccaaagaacaccttgttcatgccggtgcgcttgcacagctttttggccagcttgccgcagggggcagtatagtaaaggttggaggtgtgctgcagcttgtgggcctgctcggagacagcctcggcccaggtcaggtcgcagtagcccaggctgttcacgccgatgccgctggtgaaatccagatacttctggccctcggggccctcggcatacaggccgtggcccttttccagtgcaatggggttgcggttataggtgtgcaggacatattcgttgtcccgcttgatgactttttcggaatccatagatataccctccttggttagcgtcctcgccctctcagtctcgcattcgctcgccagcccaggttgtggctcccagcagctgcttcgtgcaattgcactcgcaccttgctggccactgccccaacaactcctccctcaatccgccactggcggcggtcgtcgtcgttgcccccaaagggggagcctattcatctttattatatcgcccgatataattttcagcaagccttattcctgatggctgcggcggtagaaccgggtgccggagccccggttggagaacagctccagcaggatggagtggggcacacggccatcgatgatgaccgcctcgtggactccctgatagatggcatcggccatgccgccgattttggggatcatgccgcccgcaatgatgccggcagccttgtagccctcgatctcgctgacctccacctcggggatcagggtagtctcatcgtccttatcccgcagcaggccggcgatatcggtcatggaaaccagcttctcggccttgagggcaatggcgatctgtgcggcagcggtgtcggcgttgacattataggcctggcccagatcgtccatgcccaccgttgcgatcacggggatatagccgccatccagcagggtagagatcagggtggggtccacatggatgatctcgcccacatggcccagcgcggggtccagctcggtgcagcggagcatctggccgtccatgccgcacaggcccacgccgcggccgcgcagctttgccacaaggtccttgttcaccttaccggccagcacctgctgaacgatctccatggtagcgtcatcggtcacgcgcagaccgttgttgaaatggctctccacgccgacttttttcaacatctcgttgatggccgggccgccgccgtgcaccagcaccacccgcacccccagcagggtcagggtgacaaggtcgttcatcacggcgtttttcagcgtctcgttgatcatggcgttgccgccgtatttgatgaccatggtcttgccatggtatttctggatgtaaggggtcgcctccgaaaacaggagggccatttcttcgtttttcatatactctccttgccgccagcacacttgctccggcattcattttccaccagacaaactccttccgtcatcgctgcgcgatgccacctccctcaaagagggaggctttcagaccccttccttgagggggctgtcgccgcaggcgactgggggagttttatcaggtccgataatccccgttgatcttcacataatcataagtcagatcacagccccatgccttggcgctggcatcgccggtacccatatccaccttgacaaggatatcatgctccgccagaactttggcagcctcgtcctcgctgtaggggtggtaggcggcgttctcgcagacatagacctcacctgcggcactgctcagccagacacagaccttgtcgatggagaaatctccgggggtgtagccgatggcgcagaggatgcggccccagttggcatcgcggccaaagacagcagccttgaacaggttggagcagaccacgctgcggctgacggcacgggccgttttcaggtcgggggcgtgggtcacctcgcaggtgatgaggtgggtggcaccctcgccgtcaccggcgtgctcggcgcacatgtgctcagcaatggcggtcagggccgccacaaaagcatcgtagtcggcgttctcttcgcagatctcggggtttccggccagaccggaagccatgatgatcagggtatcgttggtggaggtgtccagatccacgctcatctggttgtaggtaccgggcaccacggtcttgagggccttttccagcagagcgggggaaacggcggcatcggtggtgtagaaggccagcatggtggccatgttgggggcgatcatgccgctgcccttgccaatggcacccacggtgcaggtcttgccgcccagctcaaactggatggcgtactcctttttgtgggtatcggtggtcataatggccgtggccgcatcggtgctgccctgcgcagtggccgccagctttgcggcagcggcagggattccccgggcaaaggggtcaatgaccatgggctggccaatgacaccggtggaggcgggcagcacatcctcggcagggatgtgcagtgcctcgcccaccagcgcacagcactcctcggccagagccacgccgttggcggcgcaggtgttggcgttgccgctgttcacaaggatggcctgtgcatagccgtccttcaggtgggcgcggtccaccttgatgggcgcaccacagaccttattggtggtgtagacaccggcggcggcacagcgcacctccgccttgatgagtgccagatcgtatttttcattatggtttgcgcggatgccgcaatgcacgccagccgctgcaaagcccttgggggcacagatgccgcccgcaacttccttatactgcataacgattttcctttcccacaaagaaatactccctcagtcacggcattcgccgtgccagctccctcacggagggagcctttgcgtaaccgtcagctgcaaaagcctccctcttcgagggaggtggatgcaaacaccgtgagcagacgaagggagtttttattccaacccctgggtctccggcagacccagcatcagattcatacactggactgccgcgccggacgagcccttgcccagattatcaaacagggagaccagcatcatctgatccccggcggcgttcacggtgctgtacagctccatgcggtcggtaccggccatggcattggaatacaggccgttctcgggcagcggctcgttcagggcgtgtaccttgatggtggcggcatccctgtaatactccgccagccctgcggccaccttttcggcaccgccccagaccggctggaagggcaccagcacctgcatcccgctgtaataatcgcagaccacaggcacaaaggcgggcgggtttgccagcccgctgatcttctgcatctcgggcagatgcttatgggcaaggctcagaccgtagctcttgggtgcatccagcttgctgtgggccggacggtcggggctttcgtaatcagcgatcatctttttgccgccgccggaatagccggaaataccggtgcagctgtaaaaatcacccgctccggcaaggcccagctccaccagaggccgcatgatgctgataaacccgctggcatagcagcctggcaccgccacgcggcaggcgtttttgatcttttccttctggcccctgagttccgggaagccgtagacccagttgggatccgtgcggaaagccgtggaagtatccagcaccttgacatccggacggagcaggggcatgacctctctggaggcggcatccggcaggcagaggaaggcgaggtcagccgaattgatgacctttgcccgctcgttcacgtccttgcggccctcctcggagatggagagcagttcaatttcgggccgggcagccagacggtcggcaatgcgcagacccgtggtgcctgcggagccgtcgataaagacctttacgctcatgcgttgttcgcctcccatgcggccagctggtccatggccagccggatctggttgttgacgcttgcctcgctggggccgccgtagctggtgcggccctcacagcacttgatgaggtcgatggcatcatagatatcgttctcgaacagggcgctgtatcccttgaactcgtcaagggtcagttcctccagggtcttatcctttgcgatgcagtcggagaccatgcagccggtcagcttgtaggcatcccggaagggcatccccttcttggtcaggtagtcggcgcagtcggtggcgttgataaagcccttggcggcagcgcggcgcatgttggcaggcagggtcttcatggtgtccagcatgggggtgacggtcttgaggcacagctccagcgtatccactgcatcgaagatggcttccttgtcctcctgcatatccttgttgtaggccagaggaatgcccttcatcatcaccagcagggtgttcaggtcaccgtagacgcggccggtcttgccgcggatcagctcggtgacatcggggttcttcttctggggcatgatggaggagccggtggtaaaggcatcgtccagctcgatgaacttgaactcccagctgcaccagaggatgatctcctcggaaaggcgggacagatgcatcatgcagatggagatggcgttggccagctcgatgcagaagtcacggtcagaaacgccgtccaggctgttggcacagggtgcggcaaagcccagcttttcggcggtgaactgacgatccagcgggtaggtggtaccggccagagcgccggagcccagcgggcactgggcatccatgcgggcggtggcatcctcaaagcgctgcaggtcgcgcaggagcatggaggcgtaggccatcagcgcatggccaaaggtgatgggctgggcgcgctgcaggtgggtgtagccgggcatgacagcggtggtattctccgcggccttcctgcagatgaccttgatgagctccacgatgtaagcctgcagggtgtggctgtagtcccgcagggtcaggcggatatccagcgccacctgatcgttgcgactgcggccggtgtgcaggcgcttgcctgcatcgccgatgcgggcggtcagggtctgctccacgaaggtatgcacatcctcggcgttggggtcgatctccagcgcaccgcttgccagatcgtcggcaatggaggccagcccgctgaggatatcctcgcagtccttttcggagatgatgccctgcttggccagcatggcggcgtggaccccgctgccgcgcatatcctgcgcgatcatccgctggtcaaagcggatggaggagttgaaatcattgacgcgcgaatcgaccgccttggagaagcggcccttccagagttgttctgccatcgttattgtccctctatctcgtaaagtatctttatcttacggaaagcttttcctccgtacaacctctccgtcatcttcgctttgctcgatgccacctctcctagtaggagaggccttggcataccatcgcgttttcgggggttggcgcttcgctcctgtttgccctgcggcaggcattggctttggagcgtcagtgattattgcgaaaaataaatcttctgccaagggctcccctactaggggagctgccaagcgccagcgaaggctgagaggttgtacagagacgggcctgaccacaagcatacatttcctttataaacggcaaagccgccgcaggggaaaacgctcctgcggcggtgccgccggcaactatgccggttttggaactccgttgtgaaagtgtagaaaacacaccggagagaaagttggctttgtgtgatcccggtggatcagccgcttagtcctcgatcttcggccagctcttggacagctttgcgcgctccttgatggacaggccgaacaggttgatgaagcctgctgcatctgcctggttgtaatcctcgtcctcaccaaaggaagcggtctgctcatcgtacagggtgaacggagaggtgacaccagcgttgatcatgttgcccttgtacagcttcagcttcacatcgccagtcacggtctttgccaggctgttggcaaaagcatccagagcctcacgcagcggggtgaaccactggccgttgtagacgatgtcggcatacttctgagccagctgctccttgaggtgtgcgctctccttgtccagggtgatggtctccagaacattgatggccttgtacaggatggcaccgccgggggtctcgtacacgccgcggctcttcatgcccaccagacggttctccacgatatccagcaggccgatgccgttctcgccgcccagcttgttcaggtactccaccagctccacagcgcccatctccttgccgtccacggcagtgggaacgcccttttcaaagtggatggtcacataggtcggggtgtcgggagcctgctcagggctgacacccagctccaggaaaccggggtggttgtactggggctcgttggcggggctctccagatccaggccctcgtggctcagatgccacaggttcttgtccttggagtagttggtctcgcggttgatcttcagggg

SEQ ID NO: 184 - DNA, 9191 bp, unidentified
  source 1..9191: mol_type = unassigned DNA
atgtactgcacgagaaaggtaaatgacgattacacgtgggtaggcgccgacgggcggcggctggccatgtttgagggtgtgttcgatgtacccaacggcatctccttcaacagctatctgctgagggatgaaaagaccgtactgtttgacacggcggatgcggcggtgcgccgcaccttccgggaaaacctcctccatgcgctggaggggcggtcgctggactacgtggtggtacaccacatggagccggatcacacggcggagctggaggagctggtgctgcgcttcccggaggtgcagatctattgcagcgccatggccaagaccatgatgacccaattcttcggcaccggccttcaggagcgcatccatgtggtgaaggagggggataccctctgcaccgggcggcacacgctgcgctttatagcggcccccatggtccactggccggaggtgctgatgacctatgatgagacggatcgtctgctgctgacggcggatgccttcggctgcttcggggccttgaatggccggctgtttgccgatgaggtggacttcgaccgggattatctggacgaggcccggcgctactacaccaatatcgtgggcaaatacggctctcaggtacaggcggtgctgaagaaggcggcggagctggacatcgccatgctgctgcccctccacggctttgtgtggcggaaggagttggggtatctcctgcacaagtacgacctctggagccgctacgagccggaggagcggggggtgctcatcgcctatgcctccgtgtatggcaacacggagaacgccgccaacattctggcctgccgactgtcggagcggggtgtgaaggtgcagatgttcgatacctccgtgacgcctacctcttacattctgtcggcggccttccgttacagccatctggtgtttgctgccaccacctacaatgccggggtgttcatcaccatggaggagctgctccacgatatcgctgcccacaatctccagaatcgccgggtggtgctgctggagaacggctcctgggccccggccagcggcaaggagatgcagaagatcctccagcctctgaaggggtggcagcagatggaggacacctttaccatccgctccgccctgcgggaggatcagaccatgcagctggagcggctggcggccacgctggcggcggacgtacaggctgcggccccggcggaggagaagccggaggggcagcaccggtatgtgtgcaaggtctgcggctatgtatacgagggggactccctgccggaggattataagtgccccctgtgcggcgccggtgcggagtatttcaagcaggagtcgtaaagagcgcttttccccatgaaaaaaacagcaggatggcaataccatcctgctgttcttatatcattctacggaagaagcttccaccggagcagcctccgcaggttcctcctccggctccgtccacggctccatggtagccacgcagcggttgatgttcttccccagctcatagaacttggcctcgtagtccgtcatgactcccacggggccgttggcgtggaggttacgggtcacctccgacagggtaaagccatactgggggatctcctccacggaccactggaacagcttgtcgttgtcggttttgaagtgaatctgcccgcccataggcagcacctgccggtagcacttgagaaaattgccgtgggtcagacggcggcgcttctggttgctcttgggccacgggtcgcagaaattgatgtacagccggtccacctccgccggggcaaacatatccggcagcagggcggcgtcccccaccacgaagaatacgttgtgcagccccgccgcttgcgcccgttccatggccaccaccatggcgtccggcaccttctccacggcgatgagcagaacatccggctccgcttgggccgtacccacggtgaagcgccccttgccgcagcccagttctacccgcagctcacgggcatcgggcatcagctcccgccagtggccccgcatggcgaaggggtcctgtacctgacaggcccggcaggcctccatccggggcagtagattcttctttttccgcatacgcatggtgtcgttcctcctgaaaaacgccgcatggcgatggtatccgactacccaatataccggttttccggtgaaaaagcaagaggaaacgccggaaaatctctcccggcaagggagagccgccgaagcgacgttttcgtaggacggcgcatcgaagaacaggtgcggcaaaaagctggaaaagtaccaaaaaatccgacgaaatttgtgacttcctctaaaaagcaaaaagccgggtgagaagtgcttgataaattttagacgaacgtctataatggataaggtatatgagaaggcgcattttgcgggtgaaacacccctgtagaaagcgctttttcccatgacgctgccgctgcttcggcggcggctgccacagtaaggaggaaccattgtgacgaacgtactgttggagaaaaaaggtccatatgccgtggccaccatccaccgtccggaggcgctgaacgccctgaattctcaggtgctggcggatctggcggagctgctggacaccgtggaggccgacgaggagatccgtgtactggtcatcaccggcgccggggagaaggccttcgtggcgggggcagacatcggagagatgagcaccctcaccaaggccgagggcgaggccttcggcaagaaaggcaacgacgtattccgccggctggagacgctgcccatccccaccatcgccgctgtcaacggctttgcactgggcggcggctgcgagctgagcatgagctgcgacattcgcatctgcgccgacaccgccgtgttcggtcagccggaggccggtctgggtatcacccccggctttggcggcacccagcggctggcccgtctggttggccccggcatggccaagcagctgatctataccgccaagaacatcaaagccgacgaggccctgcggatcgggctggtgaacgccgtttatccggcgcaggagctgctgcccgcagcggagaagctggccgggaccatcgccaagaatgcccccatcgccgtgcgggcctgcaagaaggccatcaacgacggcctgcaggtggacatggatcgggccgtgaccatcgaggagaagctgttcggcagctgcttcgagacggcggaccagaaggagggcatgagcgcttttctggaaaagcgcaagcacgagccctaccagaaccggtaaagctctgtcagaacgttgttttccgggcataacgtccggtgggcaaaccaaggaccctatatattctaattaggaggaatcattatgaagatcgctgtttttggtgcaggtacgatgggtagcggtatcgctcaggtgttcgccggcaagggccacaccgttctgctgtatgcttccagcacggccagtgcgcagcgccacaaggataagctggctgcttctctgaataagcgtgtggccaagggcaagatggcgcaggaggccgctgacgatctgatgagccgtgtgctggtggaggagttcgaggccgccgctgacgccgatctggtcatcgagtgcgtggctgagaacatggctgtgaagaaggagctgctgggccgtctggacgttctgtgcaaggacgaggccatctttgcctccaatacctcctctctgtccatcaccgagatgggtcagggcctgaagcaccatctgatcggtatgcccttctttaaccccgtgcctgccatgaagctggtagaggtcattgccggcggcaatacccccgctgagctggtggactacatcaagaacctgtccaccgagatcggcaagacccccgtggtggtcaacgaggcccccggctttgtggtcaacaagatccttatcccctattgcaacgaaggcgtttgcgttctgcaggagggcgttgcctctgcggaagatatcgatattgccatgcagctgggctgtaaccaccccatgggtcccctgcatctgggtgacctcatcggctgggacgtggtgctgaacatcatggatgtgctgttcaatgagacccacgacagcaagtatcgtgcaaacgtattgattcggaagatggttcgcgccggcaagttgggcatcaagtctggcgagggcttctttaagtataccaagtaaaatttcgtaaaggagaaaagagtatggacttccatctgactaaggaacagctgctcgttcgcaagatgtaccgcgaatttgcagagaacgaagtgaagcccctggccgccgagatcgacgaggaagagcgtttccccatggagaccgtcgagaagatggcgaagctgggcatgatgggcatttacttccccaaggagtatggcggcgccggcggcgacgtcctctcctatgccatgtgcgtggaggagctggccaaggtctgcggcaccactgccgttatcgtttccgctcatacctctctgtgctgcgctcccattttcgagcacggcaccgaggctcagatgcaaaagtatctgcctgacctgctgtccggcaagaagatcggtgctttcggcctgaccgagcccggcgccggtaccgacgcgcagggccagcagaccactgctgtactggacgagtccggcgagaactacatcctcaacggctccaagtgcttcatcaccaacggcaacgtggctgataccttcgtcatcatcgccgtcaccggtaagaccaccgacaagcgtggccgtgccatgaaggagatttctgccttcgtggtggaaaagaccgaccccggcttcacgcagggtaagcacgagaagaagatgggtatccgtggcagctccacctgtgacctgattttcgaggactgcgtcatccccaaggaccgtatgctgggcaagaagggtcagggcttcaagatcgccatgcagactctggacggcggccgtatcggtatcgcctctcaggctctgggtctgggcgagggcgccgtggaggaggccgtcaagtacaccaaggagcgtgtccagttcggtaagcgtatctcccagttccagaacacccagttccagctggccgagatgcacacccggatgcaggctgctcagttcctggtctactccgctgccatgaagaagcagaaccacgagccctactccatggatgccgccatggccaagctgttcgctgccgatgccgcttccgacgtgacccgtcgtgccgtgcagctgttcggcggctacggctacacccgtgagtatcccgtggagcgcatgatgcgtgatgccaagatcaccgagatctatgagggcacttccgaggtccagcgcatggtcatcgccagccatctgggcgttaagtaattgaggaggtataaggcaaaatgaaagttattgttactgtgaagcaggttcccgatacctccggtaaggtggctgtgaaccccgatggcactctggaccgtgcgtccatgcagaccatcatcaaccccgatgatatgaacgccgtcgaggctgctctggccctgaaggacgagctgggctgcaaggtcgtggccttcaccatgggtccccctcccgccgagggtatgctgcgtgagctgatggccatgggcgtggacgagggtgtcctgatcaccgcccgtgagttcggcggctccgatacttacgccacctcccagatcatcgccgccggcatcgacacctacggtgtggatgaggacgacgtcattctggccggccgtcaggccatcgatggcgataccgctcaggtcggcccccagatcgctgagaagctgcatctgcctcaggtcacctatgccggtgagatcaagaaggagggcaacaccttcatcgtcaagcgtatgctggaggatggctacatgaccgtcaaggtcaacaccccctgcatgatcacctgcatcaaggagctgaatcagccccgttatctgtccgttggcggcgccttcgaggcttacagcaagcctctggtcaccatgacctacgagacgctgaaggatcaccccctgatcgatgccaccaccatcggtctgaagggctcccccaccaacattctcacctcctttacgcctcctcagaagggcgccggcatgatgcttgagggcgccggcaaggagaccaccgacaagctggctggcattctggccgccaagcatatcatctaaggaaggagataagaaaatggcttttaatagtgctgataccgctgccttcaaaaacgtctgggttttctgcgagcagcgtcagggcaagatgatgcccactacctttgaactgatctccgagggtcggaagctggctgacgaactgggcgttgagctgtgcggcattctgctgggcgacaacgtggacggcatcgccaaggagctgggcggctacggtgccgacaaggtctatgtctacaacagccccctgctgaaggactacaccactgatgcctacaccaaggtcatcaccgacgctgtggaggagatcaagcctgagatcctgctgttcggtgcctccaacatcggccgtgatctggctccccgctgcgcagctcgcctgcacaccggtctgtgcgccgactgcacccatctggacatcgatatgcccatctacaagaacttcctgcgtgaggcttccaccctacctgaggagcgtatcgagaagctgggtaccgtgaagatcaacggtcaggatcacgatgtctcccgtgacatcaagatgacccgtcccgctttcggcggccacctgatggcctccatcttctgcccccgcttccgccccgccatggccaccgtgcgccccggcgttatgaagaagcgtgagttctgcgccgactgcgccgagaaggttgagatcctgcatcccgctttcgagctgtctgccagcgacatcaagaccgaggtggtggagaccgtcaaggctgccaagaagctggtggacctgatcggtgccgacttcatcgtgtccgtgggccgtggcatcagcaaggatgtcgagggcggcatcaagctggctgaggagctggccgaggttctgggcggcgtcgtgggttcctcccgtgcctgcgtggacgccggctggatcaccgctgaccatcaggtcggccagaccggcaagaccgtccatcccaaggtctacgtcgccctgggtatctccggcgccatccagcacaaggctggtatgcaggactccgagtgcatcatcgccgtgaacaagaacgagaacgctcccatcttcgaggtggctgactacggtatcgttggtgacctgttcaaggtcgttcccgagctgatcgagtccatcaaggctgccaaggctgctcagtaatcgatcccctttacgaatcaagaagggctgtcccgctgtgggacagcccttctttcattgcttggatcatggtcaggtggtgatatgccagtaggtgacggtatcctcgatatccatttccgccagataaccacctactccgtcagagcagaataccgtgggccagttttgataggtggcaaagtcgttgatcacaaggggatcggtctgctgcgtatccggatagaggatatgggcagcaaaggtatcgtctacatacatacagctgctgccgcttccggtcagacgccacaggggcactgcggaatcagcggtggatacctttccgtcgctgatgcggatcgtctcataggaaaatttttgagtctccgggtcacccaaaccgcacaccatgtactcgcccgttatggcaaaggttgtgacctgctgcgaaagctccttctggtacagaataccggacgcattgcagaggaacgccgtccagtaggcgtcgtttttggcagaggccaaaaaggcgaattgcgtaccattggtgcaaacggttacatcggacatggtgtagtcggtgaggttcagcacgctggaaacggcactgccgtccacacgatatacggatatgccggtatcctctgattgcagatacatgggctgaccgttcaggcagaacaacgcagggacctgatcataggaaacggcttgaccggaggcgagagtgcttttccctgtgtctgtggagcggatcagagaccatttgaggccggaatccacggcttcatagtccacgtacagagcatcggctccgtccagaacggcggagatgatataggccggggaggaaacgggaaactgcttggtggtcccgtccgaatagttccagtagagcagataatcggtattataaagggggccggtctgagccgtgttgcgatgcccgacagccaacaggacgctgttttccccgcagcactgtataagggtggcggcctcatcctcggaaagctccaatggcgaggtgagccgctgcaccgtgggggcgggaatctgttccggcgccttggagcaggcggagaggggaatggcgcatatcaggaagaaaagaatgataattttcttcacgtgggggcctcctttcgttagtgggcaatatagagaccggcatttgcgttgatggcagaattcatttcagtgtaagtgcaagtatatcggccatagtatttggaaacattattgggatcattaaaggtgagaatggtttcccgcccgccagtggagccgccctgtgcccaagaatagccgatcactacaacataatgaccgcttgcatgcccatcatagtgcggcagcttctttgtttgtgtatggcatacgatcgggtagccggcatcaatacttggaactatctttgtaccgaaggatagctccgatgtgtaaatatatgcgtatttcccgcttccgagataggaattaagaccatttgcaatttgatagacataagttccatctgaggaatttgtattcattatgctacccaacttgctttgtgtggcagtatacccaaagtactttagtaccatctgcacgctggccggtccgcagtagtagttgttttcctgcttatacagcggtacacttagagtctctgagccgctgctgcagggagcataggtattgttgatagcgtcattcgtttcagcaatgatacgctgaatttgctgcaaacgttctgggtcatttcggtctggggtatgtttgtcataaaggtcatccgcaaaggcaggagaagcgataagagagagcgccaagaggaaaaagacgaaacgataagcaattttcttcat

SEQ ID NO: 185 - DNA, 6684 bp, unidentified
  source 1..6684: mol_type = unassigned DNA
atgttatgtacccgctgtaaaaaaagacaggcggttgtgtttgtgcagcggctggaaaacggcaaaccggtgcaggaaggctactgcctgacctgcgcgcgggagctgcatattcagcctgtggatgatttgatgaagcggtttaatatgaccgatgaccagttggccagcatggaagagcacatggccgacctgatgcagcaagcgcaggaaagcggcgccatgatgcccatgatggacggcgatatgcagaaccccgacgataccggggatgattttgtgcccggcggttcgccggtgttcccctttggctttggcggaacccccaaggctgaggagaagggcgaaaagtccaaaaaacagcgcggccgcggccagcgcaaatacttggacacctattgcgaaaacctgacccagaaagccaaggacggcaagctggatgccatcattggccgtgaccgtgaggtataccgcacggtgcagattctgtgccgccgccagaaaaataacccctgcctgatcggcgaagccggcgttggcaaaaccgccattgccgagggcattgcccagcgcattgccgaaggcaaagtgcccgcccgcttacaggataaagaaatatacctgctggacctgacggcccttgtggcaggcacccagttccgcggccagtttgaacagcgcgtcaagggcctgctttctgaaatcaaggccgccggcaatgtgatcttgttcattgacgaaatccacaacattgtcggcgccggggattcggacggtgccatgaacgccgccaacatcatgaaaccggccctgtcccgtgggcagatccaggttatcggcgcaacgacctttgccgagtaccgcaagtttatcgaaaaagattctgcgctggagcgccgcttccagcccgtcaaggtggaagaaccctccatcaatgatgccattgcggttatccgcggcgtaaaaggttattacgaaaagtaccactgcgtgcgtgtgcccgattccatcgtggcggatgtggtacacctgtcggaacggtatatcaccgaccgctacctgccggataaggccattgacctgctggatgaatcctgcgcctgctgcaatctgcgccaccctgaaattaccgagttcctgaacctgcaaaagcaggtggcagagctggaaaccaaagagcatgacctggaaaaccccgaccccgaaaagcagggcgatgccgctattgattacgaggaactggccaaaaccaagaccgagctggcccagctgcgccaaaagctgcccgcgctggagctgcgcgtggccgatatccaggtaacggcggacgatgtggcccaggttgtggagctgtggaccggcattccggcggttaaaatcaaagagaccgagtatggccgcctgatggggctggaagatgccctgaaagagcatatcatcggccaggacgaagctgtgcacagcgtagcgctggccgttaagcgtgcgcgggcagacctgtctggccgccaccgcccggcaagctttatctttgtcggccccaccggcgtgggcaaaaccgagctggtcaagcagctggccaatcagctgtttgataccgtggacccgctgatctccattgacatgagtgagtatatggaaaagtacgcggtgtcccgcctgatcggttcccctccgggctatgtgggttatgatgaagccggccagctgaccgaaaaagtgcgccgccatccttacagcgtggtcctgtttgatgaaatcgaaaaggcccaccccgatgtgatgaacatcctgctgcagatcctggacgagggcaagatcaacgatgcccagggccgcacggtggatttttccaataccgtgatctgcatgacctccaacgccggttcttcggaccgcaccgccctgactggctttggccgcaccgaagagcaggtcagccgcgaaaagagcatgaaagcgctgcaggagttcctgcggccggagttcctgggccgtgtggatgaagtgatcaccttccgcccgctggaacaggctgacctggaaaagatcgctgccctgatgctggacgagtacaagcccggcctggaagcccgtggcctgaagctggaatataccccgcaggcactggcagccatcgtgaacgaaacatccacccgttttggtgcgcgtgaactgcgcaagaccatccgcaaaacgctggaggaccccgtggccgaagccattgtggcgggccgcctgaccggtggtcagaccgtgaccctggcagcggatgctgacagcaagccgcagctggtgctgccggagtaagcgcgaatgaaaaagccgcgcgtattgctccaccttgccgcccttgccatggggctctgcctgctggccgggtgcgcggcacagcctgccgcacccgcacaggcaacgatcccccatatcgaaaccagcccccagcccaccgtggcccccagcccaacccccacccagacccctgcccaacagcaagatttacagcaggtgtacggcagctgtgggctgctggcatggcccagcgtgctgtacagcatttatctgcaggacgacgccaacccctggaccgaggaagccctggcccagacgcggcagaaccttgccgtggcggtggactggatcacccagcaggcgcagacctataacgcccagccgaaaatctattacgataccggcgaaaacaatctgagcacctttgccgcctacaaagccggtctgacggaagataccaccaccggcacaacgttctatgacgatgtggacaccctgaccgcacaggtggatgtggaattcatccagcagcaatacggcacggcaagcattggctacctgatctttctgccggtggagggggcttcctactccattctgcattatctggaggatggcggtaattacctgaatgaattcagctgtctttatctctatgattcctatgcgggggagaaaacctacaacagccccaccgtgtatgcccacgagatcctgcatctgtttggtgcggcagacctttacgtcggcagccgggatacgtttgtgacccagccgctggcgcagtatgtgctgaacacctggccggatgctattatgtattacacctacaacagcgataatggcatcagctatgaccatatcgaaaaaacgctctgcccgctgacggcctaccgcctggggctggtggacagcttccccgggagcgagcagttccctgcggcaacgcaggacccgcccggtgtgttcagcaacggcgcaggccagaactggaccgcaagcgatgaatcagcttgaacaggggaggtgaaggcatgtatggggatgaatggccgctgcgggtaacagggattgccagcgcggcggaatccgaatggcgcattggccagcaaacgccggagcgcacctgtgagggctggctgctggtatatgtaaaaagcggtatggtggaagagctgtgcgatacccaccgggtgctgctgcgcgccgggcagattttgttccaccagcccgcagagctgtttgccatgcgcgcagtgggcgaagttccgccggaggtgttccgcgtggaatttaccgcggacggcagtgcgatggattctttccgcagctgccacatgcggctcggcaacgccgaaaaaagctgtctgcgccagctggcagaaacggtgcgcgaggtgttccagccggtgcaggatgcctgccagatgcccacccgccgcgcggaaatcccgtttggcggcaaagagctgcaaaccatctatctggcacagctgctgtacctgttggcccgccgcaggcaacgcacccgcaaacaaagcccccgtgcccgcgccgagcaggagcaggcagcccttgtggaaagcgtgcgcctgtactttgcgcagaacattgaaaagccgctggcgctggaccaggtgtgcgatgccaatggctgctcccgcgtggcattgcagcaggcgttccgcgcccgcacccgcatggggccgatggagtatttctcctgcatgaaagccgaacaggcagcgctgctgctgacccaggggtacggccccggcgaaacggcccgtatgctggggtatggctccctggcgtggttcagcaggcggttccacgccctgaccggccaaacgcccggcgcttaccgccacgccccgcacccgctgcatctgtgcgaacggtaaaggtaacaacaaagttacatatcaaacatggaaacatctatttccatattgcgataaagacgttagaataaaatcaacaagggaacgaagcaaaccctgcggatgccctgttgaagatacaaaatcccggcaacaactttccatattgtgtaaaggagcgatcagtatgtctattttggtcagcggcggcgccggttacatcggcagccatacctgtgtggagcttctcaatgcgggttacgatattgtggtggcagataactattacaactcctgccccgaagccctgaagcgtgtgcgcgagatcaccggtaaggatttcaagtttgtggaagcagacatgaccgaccatgcggcagttgaaaaggtctttgcggaaaatcccggcattgactgtgtgatccagtttgccgcctacaaggccgtgggcgaaagcgtttccaagcccatcgagtattactccaacaacctgaactgcaccctgaacatcctggatgttatgcgccgttacgattgccataacatcatcttctcctcctccgcaacggtttacggcgaccccgccagcgtgcccatccgcgaggatttccctgttggtgcaaccaccaacccgtatggcactaccaaggtgtttaccgagcgcatcctgaccgactgctgcaaggcagacccggagctgaacgttgctctgctgcgttacttcaaccccatcggtgcacatccttccggaaagatcggcgaggacccgaacggcatccccaacaacctggtgccctacatcgccaaagttgccgttggcaagctggaaaaagtgcatgtgtacggcaatgattaccctacccccgatggcaccggcgtgcgcgactacatccacgttgtggacctggcccgcggccatgtggcagccatcaaaaagctggaagaaaagcccggcctgttcatctgcaacctgggcaccggccacggctacagtgtgctggatgtgattcatgcattcagcaaggcctgcggcaaggagctgccctatgtcattgacccgcgccgccccggcgatattgccgagtgctggtgcgatcccagcaaggccaagcgtgagctgggctgggaagctgagtacggcattgacgaaatgtgccgcgacagctggaactggcagagccacaaccccgatgggtataagaccgctgaataagctcacggttcaaagaaagcaataaaacgagagcaataaaacagggcgaccgggaaaacttcccggccgccctgttggtgtatcaggtagcgtttgtatgggtttaatgcgttagaaaaaagcgtttgaccctgtggagcccgtgggagcgcacattgtacgcccggccacgtaaggcgggatgccctcatcccgacgtgtgcgcatattacggcccaccatgcaggacgatgcgagcgtcgtttcctacacatggtttgcaggttcgcagcccaatatttgcgtttcttccctgtgcgatgagggcatcgcgccctagggtgtatctcaagcatccggttcctttttctcctgccccatcccctgaatctttgcgttcagcccggcacccaaaaacagcacattgatgttcacattcagccaaagcgtaatcagcacgattgcagccaaagaaccgtaaatgtacgataacttccagaaatgcccgatgtaaaacgagaatattttggaaaacagcgtccacaccgctaccacagcggcggcccccggcagctgatcccgtatgcggcgcttgccgccgggcacataggtgtagatcagtgttaccgccagcagcgaaagcgccaacgaaagcacagcactgatgctgagcaggctgtgcagccgctgcagcagcccgcccaccagggtatgcagcggcagcagcccggccagcccgcgcaggattggactcaggctttgcaccaccatggcaaccagcatcaggccctcaaacaaaaaggtatacagcacagcccacaaacggtcaaacattgttttgcgggcaccgggggtcagcttttgcaggcccctttgcaccgcggccatcccaccggaagcggagatcaccgtggtgatggcggcaaaggaagccatgaaggtggtggactgatcattcaggttggcaatcacatccaccgccattgactggatggccgggatatccggcaaaagctgggcaaccagcgcggcaatgtccgaaaccgaataaaacggcagcatgttgatgatgaccagcacccacatcagcagcggcagcgatgccgtaagcagcagcaaggtggcgtgtccggcgtatacggccatatccagcaccagatactgccgcagcaggtccagcagtgcaggcagcagggttgaggcttgttttttcatggcgttctcctgaatccccccgcgctcaggggcaaaataaaaaacattataaggcaacaccgcacaattcccgccttgcggcttaagcaccgctccggcagc

SEQ ID NO: 186 - DNA, 13468 bp, unidentified
  source 1..13468: mol_type = unassigned DNA
atggagttgcgacgaatcttgatgggcttatatctgttggccttccccgccatgatgtggggacagactccggttgtgcccggtactgctgacgaagagcattccggacaccgcaaggaaactccggtcaatttcggtttcaaaggcggtttcacctcttccttgttccttgtatcccagttcagcgtcaacggagtgcccatcgacgaagtgcagaacaattacaagataggatatttcggctcccttttcatgcggataaacttcgaccgccatttcctgcaaccggaaatatcctacaacatcaaccggtgcaacatcaccttcgagaaacctctgcccgaagacgccgcatcaggagcccggccggaggaagcctccattacatcgtccatccacagtatagacatccccgtcatctacggatacaacttcatcaaggaggggccgtacagccttgccgtctttggaggacccaaagtgcgctatatatgggacaggaaaagtgacatcgacttcgagaatttcgaccaggtgaatatccgtgaaaggctgcgtccgctcaatctcagtttcaccgtcggcgtatccgtcaccatctcacgcgtctttttcgacttccgttacgacatggggctgcacaacatctccaaaaacgtgacatacgatattccggccgacaacaacgctgctgacgaaaacacgaaaaacgaaatccgttttcaccgcagggacaatgtgctgagtttttctttcggagtgttcttttgacagtaaatttcttccttttctttcaatttattcatttatttcccgtaaatttgtgcgcttaataagagaacacagatttatcaaacttatctaataagcagaatgaaaagagatgatttaattttcgaacttatcgaaaaagaacaccaacgtcagctcaaaggcattgaactgattgcatcagagaactttgtaagtgaccaggttatgcaggcaatgggctcctgcctcaccaacaagtatgctgaaggataccccggcaagcgttactatggtggttgtgaggtagtagaccagagtgagcagattgccatcgaccgcttgaaacagatcttcggcgcagaatgggccaacgtacagccgcactccggtgcacaagccaatgcagccgtattcctcgccgtgctcaatccgggcgacaaattcatgggactgaaccttgcacacggcggtcacctctcccatggctcactggtcaacacttccggtattatctatactccctgcgaatacaatctgaaccaggaaaccggacgtgtggactatgaccagatggaagaagttgccctgcgcgagaaacccaaaatgattatcggcggcggttctgcttattcccgcgaatgggactacaagcgcatgcgcgaaatcgcggacaagataggtgccatcctaatgattgacatggctcatcctgccggactgattgcagccggtgaactggataaccccgtgaaatatgcccacatcgtgacctccactacccacaagactctgcgtggtcctcgcggtggcgttatcatgatgggtaaggacttccccaacccctggggcaagaaaactccgaagggagaaatcaagatgatgtcccagttgctggattcagccgtattccccggtatccaaggtggtccgctggaacatgtcatcgcagccaaagccgttgccttcggcgaaatcctgcaaccggaatggaaagaatatgccaagcaggtgaagaaaaacgccgctgtcctggcacaagccttgatggaccgtggcttcactattgtttccggcggtacggacaaccactccatgctggtggacctgcgcagcaaatatcccgatttgaccggtaaggttgccgagaaggcgttggtatctgccgacatcaccgtaaacaagaacatggttccgtttgacagccgctcggctttccagacttccggtatccgtctgggtactcctgccatcacaacccgtggtgccaaggaagacctgatgctcgaaattgccgagatgattgaaaccgttctgtccaacgtagacaacgaacaagtcatcgcagaggtacgtgcacgcgtcaatgcgaagatgaaagaatacccgctgtttgcttattaataagcaaacagaattaaaaattaagaattaaaaattaaaggctgcgcaatgttcgctttgaactgcgcagcctttaatttttaattctaaacgcgctccgcgcgtttagctcagcccttctatatttccgtccacaatatcaatgtgttcggcttgtggtttcttgggtaatcccggcatacggagaatttcaccggcgatggctacaatcatttccgcaccgttattgaccacaatatccttgatgtggaactcaaagttgttgactgcaccgtatatcttcgggtcggcagagaaggagtactgcgtcttggcgatacagacagggtaatggctgatacccatctgctctatcagtttaataaccttgcgggaatggagactgtaagtcactacacttgctccgtagaggttgcaggctaccttttcgattttacgttccacgcaatcgctctcttcgtaggtgaaggtcagcggttcggatggtttgttctcgatagtatctactaccagattggcaaggtcaacggctccctctcctcctttggcaaaggcgttgttcacggcaaaacctacctcaagcttttcttcgcaatggcggcggatagcttccacctcctcgtccgtatcactggcaaaacggttgaatgccacgatgacctgctggccgaatgaacgcaaattgcgtacatgcttgtccagattgccgaagccctctttcagtccttccatattgggttccttgatgcggtccagactgacaccgccatgcatcttcagtccttgtgcggtagcaacgattatcgtcaacttgggctgtaggccgctcttgcggcacttgatgttgtaaaacttctccgcacccaggtcagccccgaaaccggcttccgtcactacataatcgccgaatgtcatggccatttttgtggcaagaatggagttgcaaccatgggcaatatttgcgaacggtcctccatgaacaaaagcagcagagccttcggtagtctgtaccaggttggggttgatagcatctttcaacagtacggtaatggcacctgctactcctaactccttcactgtgaaaggagtaccatcgaaacggaatcccagaataatattttcaatacggcgacggaggtcatcgaggtccgttgccagacagagaatagccataatttcggaagccggggtaatatcgaagcccgactcctcggtaatgccgttggtgctcggtcccaatccggtgacaatgctccgcaaggaacggtcattcacatcaagtacgcgccgccagatgatttctttcagtccgaagccgtccgcctgatgctggtacaagtaattgtcgagcaaagcggaaatcatgttgtgtgcggaggtaatggcgtgaaagtcgcccgtaaagtgcagatttatcttctccatgggcagcacctgggcatatcctccaccggcagcaccgcctttcatgccgaagcaaggacctaacgagggttcgcgtaaagccacaatcgctttcttgccaatcttgttcagccccaatgccagcccgatggacacggttgttttaccgatacccgctttcgtagccgtgatagccgtcaccagtatcagattgctcttcttcactttctcttcatcaatcagatgcgtaggaatcttggctatgtaacggccatagttctctacttcgtcacgcgggatatccacactttcagccacctgctttatcttcttcagctctatgctgcgggctatttcaatgtccgatttcatacagagtcttttctttaaataacaactttaatgttttgaaagttgcaaaagtacgaaagatgtggcaaagtacaaaagaataccgtattttcacctgaccacctgcatcttctatctatttgaaccgcgacgtatccaccgcctcccgttgcttctccttatatccaccgaatttataagtaaacgatacgccgaattcgcggaagcatgagtaatgattcgtcacattctgcgtcttgaaacggatgcggggagaaatctgtcccgtctcaaaaatatcgttgcagtagaggttgaggatggctttgttcttggcaaagccgtagcgcagggcaatattcacattgcccgacgtgggcaggtcgtaaatgccttgaatggctttgctatgcacaaatccggccaccgtcagcttcaaatcgggcttggtggagagagtaaaagtattgttcatctgggcaatgccatagcattgctttctgtcgaaaggaatatcccagaaatcaccatccttttcgcgatgccacaagccgatgagggtaaggcgagaattcaaccaatccttcaccttaaatgggatagagacttgtattcctgcttgttgctgataatcaaaattgagtgtcttgtagatttcaaccagacgttcggaggattggtagagtgtctgtacggagtagtccttggtatggttgaaccaagcgctgaagatgtatttgcttttcaaaatataggtcattttcagctcatactcttgtgccggtttcagcaacggattaccatgcagctcagagtatccgccgccgatgtaagagacggcatcctgcaccgcccagtagtcgggatagtccttgtcgctgctcagagagagctgaaggatatgtcccggtgctggcatatagttcaagttgacgatgggataccagtcccactggttccagacgggagtcttgtaatgctccacagccagggaagcgtccaaagcgagtttgtcgccgaaactcttgctggaacctgcatagatattccaggtctgctcgcggcggcgggacttcatattgctcaaggcatccgatgaggtcagttgtccgccggtttcggggtcataataatattggtagctgttgtcgatgctggtagtatagatggctccgtaattcaaatcccaaccttttcccagactgtgctcctgggccagaaagaatttccagcggttgatgcgctgacagtcttccgtgtagaaatcgagttcctcatcctgcatacggctatgcagtagttggttggacggagagcggtagtaggtcagttcggcaccggctttgaggccgaaaggggtacgatagtccagacggccgttgtgcagccagtcggtgctattgctatgagttgtggacacctgcgtgcccgtcacgctcttccagttgtgggaggtggaatagccaccgttatagacgaaactcagctgatggttcttggcgatattatagtccgcccctaccctgaaattatgggtatggctgcggccacggcccacctcatctgttgtcatggggtgaaccgagccgtccgccagggtgtgcacagcctctttgtcggtagtagagtagctccggccatggctgtgcgagtaaagaaaatctgctgagaatttatttttgctgaagagcaggctggcgcgttcctcaaagccttcgttatgcttctggcgatacttggcatagagttcgccttgccaggagccggggccgcctaccgattgtttcaaggtgatattgatcagtgcgccacgcacctggtagcgtgcaggggcgttgtacatcacttccgccttctctatgcggctggcagggatgctgcgcagcaaagaatagagctgctctgtgctgagggtggttactttgccgtccaggataacggtgactccctgacctgccaactgcagcccgccattcatctcgatgacgccgggaagctctttcacggcatcgtaggcattgtctacggggaggttccggataaggcggggcaggtcgtacaccagcttgccttgcgctgcctttacgatggggcgttcaccggtaatcatcacttccggcaaggtctgataaaggctgtccagacgggcatcggtcgtgataaggctgtcggcgctgaggatgcggttgtcgtccgcaccggaggtggttgcagtgccgttgttctcttgtgccgaaaggctgatgctcaatgcacagcatacaagagggagtaaatagaatcgtttcatgttcttctttttatttatgttcatattcttcttctgcaaatcttcgtctgcaaagtacggcagaatcagcagaaacttgtgttatcagcggcttaccaagtgttatccagtgttatcgggagtgttatttagtcttatcggatgatagggttcacaatattagtcttacctttgtatgtataaaagtaaccggaaacaaacatgaaactgccattcaaatatattgccatacttgtcatcgtctccctggccggcatcttcgcctaccaagcctactggctgacggggctctaccataccatgcacagtgaaatggagagggacatcaccgaagccatgcgcatgagcgactataacgaaatgatgatacgcgtggataaaatgaagcaggacgacataaaccacggtgaagtcagcgtatcagccggatacagcgatgacggaaaatcatttgtccgtagcagtaccaccatctcccgtgaagattctttggacaacaccaccctgcacgaaaccttcatgcccaaaggagacagtgtttacgtgacccacccgaacgattcaacccgcgtggaagtcagtgtcagggactcggacagctctccccaatccgcattgagtgccaaagggggactggatgtgattttgcgcgaccaaaacagtatgctggaactcgccacctacttccagcgcggactgcattcgggactggacatcatttccgaccccgacgtaatgctttatgacagcctgctgacttcattcctgcatgaccgtaacatcaatcttccccataggctgctacatcttcacaaaggcagcaaatgggactctaccattctctatatagatacattggtaaacatcggtacccccggctatgtgcctacctcaaaagccgtggaatataattattctttcgacatcaatacaagtcaaagctaccgtctcatcatggaaccagccggcacgttggtcttgcgacagatgtcgggcattctcaccacatcattcgttattctgatcgtactcgctttctccttctggttcctgatacgcaccatcctgaaacagaagacactggaagagatgaagagcgatttcaccaacaacatcacccacgaactgaaaacccccatcgccgtagcatatgccgccaacgacgctctgctcaacttcaaccaagcggaggaaaaggcccagcgcgacaaatacctgcgtatctgccaggaacagcttcagcgcctcagtggactggttgaacagatactttccatgagtatggaacgccgcaggactttccgcctgcactcggaggagtttgcaatacgtgatattctggaaacgctcatcgaacaacacaagctgaaagcggaaagctccgtccacatatcggtggacatcgaaccggaagatttgagcgtacttgccgaccgcacgcatttcagcaacatcatcagcaacctgatagacaacgccatcaaatattcgcacggagaggccgaagtggccatccattgccgcaaggtaaccgtcgaagggcagaatgaacagactgaaatctccgtcagcgaccacggtatcggtattgctcccgagaagcagaagcacatcttcgacaaattctaccgcgtacccacgggtaatctgcacgatgtgaaaggctatgggctgggattgttctatgtgaagaccatgatagagaagcatggtggcagcatatcggtaaagagtgagttgggaaaaggaagtacctttacgataaggatatgataacattatttgttagggtactttacattacttgttaaggagctttacattacttgtaacaaaagcgacaattatggaaaagataaccgtacttctggttgaggacgaacagaccctcgccatgattatcaaggacacattggaagggcagaacttcatcatccacaccgcagcagacggtgaagagggattgcgcaagttcttcgacctccgccccgacgtgctggtggcagacgtgatgatgccccgcatggacggctttgaaatggtgcgccgcatccggcagaccgacaaacagaccccggtactgttcctcaccgcccgctccgccatcaacgatgtagtggaagggtttgagctgggtgccaacgactacctgaaaaagcctttcggaatgcaggaactcattatccgcataaaggccctggtaggcaaagctttctcctttacagaagaaaatcccaaggaaactaccgtttttgaaatcggtgactaccgtttcaattccgtcactcaacgacttgcttttgcaggcagcaccccgacttcacctgacgcggatacggaagtggaactctcccaccgcgagtccgaaatactgaaacgcctttgcgagaaccgcaaccaggtggtcaacacccagaacgtattgctcgacctctggggagacgacagcttcttcaactcccgcagcctgcatgtgttcatcaccaaactgcggcataaactggccggagacgagcgcatccgtatcgtcaatgtgcggggaataggatataaactaatagtaaactaaactaaaactaaactactatttatgagaaagttattattcattacttttatctgttcctcactctgcgcctatgcacagagcgagattccggaagacacaataaagaaccggcctcccgtaaagaaagagcagattcccttttctccaaaagagaacaagcgtacgggccttgatgaaagccagccccaacaaagtctgcagggcgaacagcaggaagagataaatctccatctccctccctccgactatgtggagcccctgccctggacggacatgaagaagatacactttcagaagaacatctttgaatgggacttccagcgtttcgccgatttcctgctctcgccggaagtcgtactgacgatgtacggcagccataacacctatcctgcaatgggctccatcatgcaggctggcgcaggaattacttattacagtcccgacggacattgggaactgagcggcggagtgtatgccgcccactattccatctcccaaccttcatccattaccggtgcccagtatgccaaaagggatgccccccggggtactcaatgggacataggctacaatgcctccgtatcctaccgcatcaatccctacatgcgcctgcatgccttcggccagtattcgggctacgggagaagtaactcctttcatggatatatgaacccgatgtatccgcaaagcggttatggcatggtactggaactgaaagtgacggactggctcgacctcaacggagggatggaacgaagatacgaccccaccaaaatgaaatgggtgacttcgcccgtcttcgcccctaccattcgtataaagaaatagaaataatacaaagatatttccagaaatagagggaaacgagtatctttgttcagtctgcccctatgcggtggacagcaactgaaattgtgaacaaagaactatgaaacgaatcttcttctgcatcatcattttacttgcaggcatgtcatccgtcagcgcacagagcgagatgcctgccgatacggtacgtactgcagtacgtggcaaagcgtctcccgaaggcatgtctccgtctgaaaaggagcttctgccggacgtgaagaattacgacggcttcctgctggatatggggctgatgaatctgtccaccccactcttcccaaattcactttggagataccggatgccagcaaagactatagccgcatcttccagttgaacccgaacgtgacttattcacaaggtctttcgaacatattctcactcagcaactcccggtatttcagttcgaatcccttcggactgacgggcttctggggctctactgacaacctgcaaatgggaagtttcactttgaagaacggcatgcgcatccatacgtacggcgaatatgacaaggacggctggaaagtgcccaacccttccgcactgccttgggaaaagaacaatttcaaaggggcgttcgagctgaaatcagccaacggagcctttggcatacgcatcgaggtacagcagggcagacacgtgccctattgatgcccatcacttaacaacagaatcaatgacaagaaagaaaatactggtgataggcgccaacggttttaccggcagacgcatcctggatgatttgtcccgcaacttgtcttaccagacaacgggctgttccctgcacgacgacatctgtcctcattcgggcgactatcgctttatccgtacggatatatgcaaccgccaggcggtggaaaagcttttccaggaagtacagccggatgttgtaatcaatacctccgccctctccgtccccgattattgcgaaacgcaccatgcagaagcggatgccgtcaacattactgccgtggagcatctggcagaatgctgtgaggcgggaggcagccgttttatccatctttccaccgacttcgttttcggtggtgatacggaccgaccctatacggaggaggatattcccgctcccgttaattattacggctacaccaaactggaaggtgagaaacgtatcgctgccgtttgcagggattatgccatcgtgcgtgtagtggtggtgtacggtgccgccctgcccggacagcatggcaatgtgctccaactggtggcaaacagattaaggagcaatgaggaagtgttcgtcgtatccgaccaatggcgtacgcccaccttcgtgggagacgtgtcgcaaggagtggagaagctgataagtcatccgcaaaacggtatctatcatctctgtggcagcgagtgcctgaccattgcagacatcgcttatcgggtagcggacgtattggggctgaatcgctcgctcatccgtcccgtcactacgaaggagatgaatgaaaagacgccacgtccccgtttcagcgggctgagtatagaaaaggcaagccgggaactggggtatcagccgcgcacgctggaagaaggaataaagcagatgttcggatggtaaataatgcaggtgcggatggcagcagattagactacagcaactccggctctgccagtcctttctctttgcgataagcacgtaccatctccagaatcacatctccatatttctccacccctttctttccgaagtacggaatacgtacaagcatggccttatccgaaggaagcagattgctgatgcctagaattgccttctgctgaatgacggtgtatacgggcagccctaatgcggaagcttctgcattgcgccatgctaccaagcggttgtaaagttccggatgcagcacatccgtgggtacttcaacagccgtagcatcgcgtttccgctcacgcggacgtttctctttatcagcctgcttactgcttccctgcccttctttggcagaagcacttctccctttgcctttacccttctgcgaagccgaatcatcaatggaaagcagtgctttctgcttcaagtatcctgccatatggaaaccattctccagcacataatccagcaaatcagtcttcatgtcaaacacttcctccagctcctccatggcatcccggagcttcttcttcaactctttattatcagaagttaccgtactcgccatcaccgcatccagcggttgcaactgctcttgaaaataagtggcggcagagtgtatgcgcccctgcaaagtcgggtcggctgcatagtcctgcgcagtatcaatcaggcgggtatactggatactgaacttctgggctactttcgtcactttgtcgtgaaaacgttccatttcctccttgcaggctgcgagttgcttgggaaagagcttgtacaagtgttcgtctatcagccgcacataccgccgcaaagcctgctccatgggctggaaatcgaacaagcccgacagcagttccaggaaataggtctgctgcaaggaacggaagcgtttctcgtccggctcgtttctccgtgcctccatcgtgaaggtatctactgcatggtcactgataacggcctttgcagaaagcggggcactgagcaccactccctccaatgtcttgcagcggctcagagccacataggtctgcccatgcgcaaaggaggcactggcatcaatcacggcacgttcaaacgtcagtccctggcttttgtgaatggtaatcgcccacgccagcttcagcggatattgccggaatgttccttcaatatcttctgtaatctccttggtttcctcatcaagcacgtatttggcattcgtccactcttcctcttgaagtaagaaggtagcgtcgcttcccttactgcgcacttcaattccatctgccgacacggctgtcacctctccaatcatgccattgtagtaacggtgctcaccggagatgtcgttcttcacaaacattacctgggcaccgcgtttcagttccagtacttcatccgtgggataggaatattcgggaaactttccgtcaatcttggcacgaaaggcatacgagcgtcccggaagttgttccagctcatggtcattaatccgttgggcctgataattgtgggtcaccaggcggatgtatccttcttctttatctggtacgaaattgggaatataccggcggttcaaggcttccagcacttgcccgtcacaacggttttcgcgaatgcggttcagtaattcaagaaaagtcccatcgttctgccgatagactttctttagttctatggtgcaatattccgtctgcttcaatgcctggctggagaagaaataaggcgtgtcatagtatttgcgcagcatctgccactcatcgtctttcactacgggagacagctgctgtaagtcgccaatcatcagcagttgcacgccgccaaagggtttgttccggtcgcggaaccgcctcaagacggcatccaccgaatcgagcaagtcggcacggaccatactgatttcatcgatgaccaataaatctatgctgcgtataatgttgattttctctttcccgtaacgaaaacggtaggttgccttgccatctgcgctgaatgagctttcgggcacataaggagcaaaaggtacttggaaaaaagagtggatggtgacaccgcctgcattgatagcggcaattcccgtcggtgcaagtacaatcatccgtttcggactctctgccctcagttttcgcaggaaagttgtcttaccggtacctgccttgccggtcaaaaaaagatgagtgcctgtgttttcaatgaattgccatgcaagcgctatttcgggattattctccat

SEQ ID NO: 187 - DNA, 11709 bp, unidentified
  source 1..11709: mol_type = unassigned DNA
ttacttaaagagattaaccatagtcgcaatcatcgctgcaatagaagctgtcgtacttcccattcccagaatttcagtagtagtcatcttccttttctgttctttacttggaacaattatttcacaacctggttcaatggctttcttgtttcctgctcttaaacgagaaactgtaccattcatgtatattacatagaccttgcgtttcttggcgtcattaccaaagccaccagcctggttgatgtaatatttcaagctttcaccctttttatataaaactgtattcggatacattacagcaccgttgattttcactgtacttacgtactccggaacaaataatacatctccctcgcgaagcaccatatcagcatctgaaccaggatttttcaaggcctctcccagatttatacctacagaataggtatcggacaaatccaatctttttacagatatggaatctccgcctcccgcttgcgccatacgcagagcatcttccttacggcggaattcttcttcggtcatcctacgtataagacgcgctccttttatataagcatcgggagttactccaccagccttagctatcaagtcactcaaacgttcattctttttcgatagtgcataattaccgctaaaaaggacttctccgcccaccataacattctgttgtttaaaataggacggactcttacgaacataaatttcatcaaaaggctcaagatggaaatcctggcttccttctcccaccaataagccatctttcaaatcaaaagagaaattctggcctactgtagtactgaaagatgtactcttcggatctttcatgcgccgtgcaacttcaacctttgttgtagccgccgcctccaacaagccaccagcctgcaacaccaaatcctctactgtcattttatcagaataaagatatgtacccggattggcaacttcaccatgaatggtaagtgtagcttcttccttcaagtcatgaatacttggaatatataaaatgtcattcttctgcaaaggaatatctgcagccgtcccgttcagcaaacctttcacatctacttgtataacctcatgcgacaagtcttcaagttcacgatcgattatagcacggtttaagaatgcatctccgcgaagtccttccgctttcttaatcagctgcttcactgtattcatcataccgtccaactggtacaaaccttcacgatatacagcaccgcggatttccacacgattctcaaaacgctgtaaaacggaatcaaccgttatcttatcaccgtcatctacgcggaatacggaataatccatctcatccacattataaatttgatgctcacgtccacttttacggattatacgtaatgctttcttataagcatcacccgtaaaaccacctgaatacttcaataatgtacctacggtttcagtgggtttcatttcataaaacatcggacgttttaccttacctaatatctgtaccagtgactggtaaggatccacaagaattacatcaccatcctgcagacggatgtcatctttcatttttcctttcataagtaaatcgtaaacatccaaatccgctattgtatttccattgcgaatcactttaatactgcgcaaactaccaatcggattcacaccacctgcacgatataaagcatgaaatacggaagcaaatgatgagagggtataagttccgggcaccacaacttcacccataacgtttacttgaatagaacgtatttctcctaatgtcaatttaacttgggtagacggaacatttccggttactccagaatatattctggcaaattcttgtttcaaataattattggcttcctttactgttttgccactcagataaaccggtcctaaattattcacaagaatacttccttccggagagattgtttgtcgaatcgttgtttcagaagctccccacacatcaataatcacctcgtcaccaggtcccagacgataattctcgggagtagcaacattcacattgggttcgaaagtcaaattatcgttagtaaaaatattatgaccataaatttgcgaagtcggatcctctgtttccttctcttgagacaaggaacgattatccatcatttgtaaagaatcccctgcaacatccgtttgtctggcagaataagtttccgaggttgtacgcagccctttgactacgccactcatttcaccacgttgacgagaacgcttctcatcttgggtattgctctgcggacttccagatttagagttttcatactttttctgaattctttcaacttgttcctttgtcactccccgccgcattaattcagtagtaatctgcttttgatttttgcccatctgctgagcgctttttacatactgaacaacctgatcatctgacatctgctgagcaaaagctacccctgacaaagtaaataccaaaaagaatagtgttattaatctacgcataagatattctgattaatcttttgagttcttgtaataaatataaatcgggcacaaaggtaatatattatttttataatatacatttattccacctctaagtttcagaaaaagcattaaaaagctgtcactttcacgtcttttcatcgggtagaagaaagcggaaaaattggcactatttttttcattagtccaatcaaaatagcctttttttcagtataactatgttgcaccaaggccagcacttcttcccgcacatgttcataatcatcaacagatgccttttcacgctttatcttttcactgattacagaatccaaaagtccatccccaggccctcccacaatgtacacttctcccccatcccccatgactcccacttccagggtgagcatacaagcttcagacaaggtaatcaaacaatgagtattcgtcggatacacctcacccaaacgtactatgaacatatcagtttcccctttgtcgcgtttcaacctgcaatcagatgactgcacatatatttccgccacacgcttactatattccatagcattttccggatgacgtgcattagcagcagatatcataaccatacgggacactctatactttaccgccaggtctgcaatattcactgtccccgatatattcgtttgaattgcctccgacacaaaatcatccatcagttgtacatgcttataagcagcagaatgaaaaacaagttgaggacgtgtttcttcaaatatagcctccatacgcgtacggttagcaacatctgcaaccaatacacggacctccagattcttccaatgatcagacaattccaactgtacatcatacaatggggattctgcctgatctaccagaatcaactgataaggattcagtgtagccaactggcgaacgatttcccttcctacagctcccgccgctcccgtaaccattactctacgcccctcgatatgggccgtaattttacgcatgtcaacttgcaccggttctctacggagccaatcttctatttgaatgtcctttatcagtccatcgtccatacaatcgcttaagggaggaacggtcattacatgaatatcatgagagaacagtttatccagcattccggaattttccaaatccgacaccttgcttggagagataatgattgtatccactttctttttctttagacggtcaaacagctgctcatcattgggatataccctgcatcccatcgtatgtttacctatcatatcaggttcgtccgaaataaagccacgcaggcgataatgattattacgactaactctcaaggattttgcaacattgactccagtcccatggaatccataaataaaaacattcacgcaatgacgtgcatcaaaagcaatagcttcataaagcatcttcacagcaatgcgcatacaagccatcagagagaaggtgaacatatatgccataaacagaatgctgttcggcaaagtttctccaagccccgaaacagaccaacagcaattccctaaaaacaggacaacatagcttatcgtaagactccaaaacacacgataaatatctacaaaagaggaaaaacggataacacccacataagtacggagaatatgaaagaaacagatattacacaagacagcccaaatggtcagccatacatataaagaaatttcataagatacggacgaaagcctatattgcaaaaaacacgcagaaagcatggaaatcacaacgataattacatctaccaacagcaccgtccatttggacgctatgcgtgaagaaagatatttataatagattcttaaattcataatcagtatcagacttatttgctataggacctacgacaaagatgcttcttttcgttttattatccaatttttatggcaataaagttcaagacattcaaatagaaaattatcccactaaaatatttctaaaaaaaacagagattctttttgccttttcaaataaagatgtacctttgcaccccgtaaacaaaagcttattgccgctatagctcagttggtagagcaacgcattcgtaacgcgtaggtcgccagttcaagtctggctagcggctcgatattcaagcactgattatctggaataatcagtgctttttcttttcaagaatcgttagaataaaaaacgctcttctacgaatatatttgcataaaacacaatgcccttccaaacagtttaatccatagccgcataattatcccaaagcaagtaaagctagtttaaaacagcaccatctgattacaatgataacttgaaacatataggtacattattaaaagcataatacaccttatattatacatagtaatccccaatatttgcggcaacttttcaataacccaatttttcaatcttaaataaaggattgaggtgattgaagaacacaagccaaaatcaaaaggctaccataggtttctataacatactataaacaaatgaaaagaatcaaattatttacagcggctttgctgctggcggctatatccgcaggaaacgatgtgtgggcgctttccgattcaggaaagaaagacacgcgtccgatagaatcacccaaattcttcagtggaaacgcccacccgctgcttccacctccttcaattcagactctttgcagactgtctctacaaagatagacacagacaaagacggcattcacgacctttatttcgtgtttaaaggcaaggagctgaaggtagatgaatggatgtttgagagattttgagttagccttactgtgctttatttccacatttactaagaattattcgtccgacatctgttgcattatcgtccgacagctgtcggacgataatgcaacagatgtcggacgaataattcttagtaaatgtggaaataaagcacagtaaggctaactcaaaatctctcaaacatccattcatctaccttcagctccttgcctttaaacacgaaataaaggtcgtgaatgccgtctttgtctgtgtctatctttgtagagacagtctgcaaagagtctgaattgaaggaggtggaagcagcgggtgggcgtttccactgaagaatttgggtgattctatcggacgcgtgtctttctttcctgaatcggaaagcgcccacacatcgtttcctgcggatatagccgccagcagcaaagccgctgtaaataatttgattcttttcatttgtttatagtatgttatagaaacctatggtagccttttgattttggcttgtgttcttcaatcacctcaatcctttatttaagattgaaaaattgggttattgaaaagttgccgcaaatattggggattactatgtataatataaggtgtattatgcttttaataatgtacctatatgtttcaagttatcattgtaatcagatggtgctgttttaaactagctttacttgctttgggataattatgcggctatggattaaactgtttggaagggcattgtgttttatgcaaatatattcgtagaagagcgttttttattctaacgattcttgaaaagaaaaagcactgattattccagataatcagtgcttgaatatcgagccgctagccagacttgaactggcgacctacgcgttacgaatgcgttgctctaccaactgagctatagcggcaataagcttttgtttacggggtgcaaaggtacatctttatttgaaaaggcaaaaagaatctctgttttttttagaaatattttagtgggataattttctatttgaatgtcttgaactttattgccataaaaattggataataaaacgaaaagaagcatctttgtcgtaggtcctatagcaaataagtctgatactgattatgaatttaagaatctattataaatatctttcttcacgcatagcgtccaaatggacggtgctgttggtagatgtaattatcgttgtgatttccatgctttctgcgtgttttttgcaatataggctttcgtccgtatcttatgaaatttctttatatgtatggctgaccatttgggctgtcttgtgtaatatctgtttctttcatattctccgtacttatgtgggtgttatccgtttttcctcttttgtagatatttatcgtgtgttttggagtcttacgataagctatgttgtcctgtttttagggaattgctgttggtctgtttcggggcttggagaaactttgccgaacagcattctgtttatggcatatatgttcaccttctctctgatggcttgtatgcgcattgctgtgaagatgctttatgaagctattgcttttgatgcacgtcattgcgtgaatgtttttatttatggattccatgggactggagtcaatgttgcaaaatccttgagagttagtcgtaataatcattatcgcctgcgtggctttatttcggacgaacctgatatgataggtaaacatacgatgggatgcagggtatatcccaatgatgagcagctgtttgaccgtctaaagaaaaagaaagtggatacaatcattatctctccaagcaaggtgtcggatttggaaaattccggaatgctggataaactgttctctcatgatattcatgtaatgaccgttcctcccttaagcgattgtatggacgatggactgataaaggacattcaaatagaagattggctccgtagagaaccggtgcaagttgacatgcgtaaaattacggcccatatcgaggggcgtagagtaatggttacgggagcggcgggagctgtaggaagggaaatcgttcgccagttggctacactgaatccttatcagttgattctggtagatcaggcagaatccccattgtatgatgtacagttggaattgtctgatcattggaagaatctggaggtccgtgtattggttgcagatgttgctaaccgtacgcgtatggaggctatatttgaagaaacacgtcctcaacttgtttttcattctgctgcttataagcatgtacaactgatggatgattttgtgtcggaggcaattcaaacgaatatatcggggacagtgaatattgcagacctggcggtaaagtatagagtgtcccgtatggttatgatatctgctgctaatgcacgtcatccggaaaatgctatggaatatagtaagcgtgtggcggaaatatatgtgcagtcatctgattgcaggttgaaacgcgacaaaggggaaactgatatgttcatagtacgtttgggtgaggtgtatccgacgaatactcattgtttgattaccttgtctgaagcttgtatgctcaccctggaagtgggagtcatgggggatgggggagaagtgtacattgtgggagggcctggggatggacttttggattctgtaatcagtgaaaagataaagcgtgaaaaggcatctgttgatgattatgaacatgtgcgggaagaagtgctggccttggtgcaacatagttatactgaaaaaaaggctattttgattggactaatgaaaaaaatagtgccaatttttccgctttcttctacccgatgaaaagacgtgaaagtgacagctttttaatgctttttctgaaacttagaggtggaataaatgtatattataaaaataatatattacctttgtgcccgatttatatttattacaagaactcaaaagattaatcagaatatcttatgcgtagattaataacactattctttttggtatttactttgtcaggggtagcttttgctcagcagatgtcagatgatcaggttgttcagtatgtaaaaagcgctcagcagatgggcaaaaatcaaaagcagattactactgaattaatgcggcggggagtgacaaaggaacaagttgaaagaattcagaaaaagtatgaaaactctaaatctggaagtccgcagagcaatacccaagatgagaagcgttctcgtcaacgtggtgaaatgagtggcgtagtcaaagggctgcgtacaacctcggaaacttattctgccagacaaacggatgttgcaggggattctttacaaatgatggataatcgttccttgtctcaagagaaggaaacagaggatccgacttcgcaaatttatggtcataatatttttactaacgataatttgactttcgaacccaatgtgaatgttgctactcccgagaattatcgtctgggacctggtgacgaggtgattattgatgtgtggggagcttctgaaacaacgattcgacaaacaatctctccggaaggaagtattcttgtgaataatttaggaccggtttatctgagtggcaaaacagtaaaggaagccaataattatttgaaacaagaatttgccagaatatattctggagtaaccggaaatgttccgtctacccaagttaaattgacattaggagaaatacgttctattcaagtaaacgttatgggtgaagttgtggtgcccggaacttataccctctcatcatttgcttccgtatttcatgctttatatcgtgcaggtggtgtgaatccgattggtagtttgcgcagtattaaagtgattcgcaatggaaatacaatagcggatttggatgtttacgatttacttatgaaaggaaaaatgaaagatgacatccgtctgcaggatggtgatgtaattcttgtggatccttaccagtcactggtacagatattaggtaaggtaaaacgtccgatgttttatgaaatgaaacccactgaaaccgtaggtacattattgaagtattcaggtggttttacgggtgatgcttataagaaagcattacgtataatccgtaaaagtggacgtgagcatcaaatttataatgtggatgagatggattattccgtattccgcgtagatgacggtgataagataacggttgattccgttttacagcgttttgagaatcgtgtggaaatccgcggtgctgtatatcgtgaaggtttgtaccagttggacggtatgatgaatacagtgaagcagctgattaagaaagcggaaggacttcgcggagatgcattcttaaaccgtgctataatcgatcgtgaacttgaagacttgtcgcatgaggttatacaagtagatgtgaaaggtttgctgaacgggacggctgcagatattcctttgcagaagaatgacattttatatattccaagtattcatgacttgaaggaagaagctacacttaccattcatggtgaagttgccaatccgggtacatatctttattctgataaaatgacagtagaggatttggtgttgcaggctggtggcttgttggaggcggcggctacaacaaaggttgaagttgcacggcgcatgaaagatccgaagagtacatctttcagtactacagtaggccagaatttctcttttgatttgaaagatggcttattggtgggagaaggaagccaggatttccatcttgagccttttgatgaaatttatgttcgtaagagtccgtcctattttaaacaacagaatgttatggtgggcggagaagtcctttttagcggtaattatgcactatcgaaaaagaatgaacgtttgagtgacttgatagctaaggctggtggagtaactcccgatgcttatataaaaggagcgcgtcttatacgtaggatgaccgaagaagaattccgccgtaaggaagatgctctgcgtatggcgcaagcgggaggcggagattccatatctgtaaaaagattggatttgtccgatacctattctgtaggtataaatctgggagaggccttgaaaaatcctggttcagatgctgatatggtgcttcgcgagggagatgtattatttgttccggagtacgtaagtacagtgaaaatcaacggtgctgtaatgtatccgaatacagttttatataaaaagggtgaaagcttgaaatattacatcaaccaggctggtggctttggtaatgacgccaagaaacgcaaggtctatgtaatatacatgaatggtacagtttctcgtttaagagcaggaaacaagaaagccattgaaccaggttgtgaaataattgttccaagtaaagaacagaaaaggaagatgactactactgaaattctgggaatgggaagtacgacagcttctattgcagcgatgattgcgactatggttaatctctttaagtaatttgaattatgagcgaagaaagaatacaaaacataacttctccacaaccagaggaacaagaaatagatttgatagaactggcccagaaagtatgggctagtcgcaaattggtttttaaggcgtgtggtatcgctgcccttgttggactggttgttgcatttagtattcctaaggagtactctacaagtgtgacgttggctccggagagtggtggcaaatctggtggtggaagtatgggagcccttgcagccatggcgggtatcaatttgggtacttcttctggtgaagatgctttgtcacccgaactttatcctgatattgtaagttctactccttttctgattgaactgttcgatgttaaagtcaaggatcagaaagcaaaagtagacacgactttatatgcttatttgaaagaagaacagcgttctccttggtggagtgcaattttctccgctccttttaaggtgttaggatggacattgtctttgtttaaggatgaaccggaagagggggatgcaaagctggatccttttcgtcttactagagatgagtctgccattgcagatgctttaagtaaacgtatctctgtttccgtagacaaaaagacaggtgtgacaaccttgtctgttactatgcaggatcctttgatatctgcttcgctgacggataccgtgatgcattgcctgcagaactacatcacagattatcgaactaataaagctcgtcatgatttggcatttaccgaaaaactttatggagaagcaaaggccagttatgagtctgcccagaagaaatacgcaaattttgtagatgcaaaccagaatataatattgctgagttatcgcgcagagcaagagcgtttacagaatgaaatgaatttagcctatcaagtatatacacaagtgtctcaacaattgcagatggcaagagctaaggtgcaggagattacaccggtatatacggttgtccagccggctacggtacctttgaagcctgcaaagcccaataaattgatgattttgatcggcttcatgttcttagctggtgtcggcagtgtgggatggatattatttgtaaaagatttattaaagggatggaaaaagcaaacaatatga

SEQ ID NO: 188 - DNA, 6025 bp, unidentified
  source 1..6025: mol_type = unassigned DNA
caaataggtgttagcaaacagtttaaccgcctctgcctcagtgaatcccataaacagagtgtcgatattctccttgatagcgccttcctgcaggagctctgcaaaagtatgtgctgcattcaccagacggacattatccacatctgtaccgacaatgatacgagaaggataaaggttatcgtacagtgccttgctctctctcaaaaattccggactaaagatgatattgtcgcagtggaactttttacgaatagaggctgtatagccaactgggatcgtggacttaatcaccataatagcttctgggttgtactcgataaccagctttataacagcttcaactgcacttgtatcgaaaaagttcttcttgctatcgtaatttgtaggagcagcgattactacaaaatcagcatcagagtatgcttccctcgcgtccagagtcgcggtcaaatccagtcctttttctgtcaggtatttttcaatgtattcgtcctgaatcggagacttcttgttattaatcagttccactttctctggaacaatgtccacagcagtcaccttgtggtgctgcgataacaacgtagcaatggaaaggccaacatatcccgttccagcaacagcaatttttaaattcttaaaatctctcatttctctgtccctctaattcttttacttataaaactcagcgtaccactcagcgaattttctcagaccagtccgcagacttgtacttggcttgtatccgaagtcacgctccagcgcactggtatctgcataggtcacaggtacatcaccaggttgcattggaactagctccttgtgggcctcgaagttgtaatcctctggtagcacctttgcacgaaccagttcctcactcagaatctgcacgaaatccagcaaattttccgggttttggttaccaatgttataaaccgcatacggtggaatcggcagaccatcctcgccgttctttttgtccggagccttcctcatcacacgaacaacgccctcaacaatatcatccacataagtaaagtcgcgcttgcagttaccgtagttgaaaatcttgatggtctcaccattcactagcttgtttgtaaaaccaaagtaagccatatcaggacgaccaacaggaccatacacagtgaagaagcgcaaaccagtggaaggaatgttgtagagtttcgagtaggcatgtgccatcagttcattagatttcttggtggctgcatatagggaaactggattgtcaaccttatcatccgtactgtacggaaccttcttgttggaaccatatactgaggaagaagaagcatataccaaatgctctagattctcacaatgtcgacaggcttcaaggatattgaaaaagccgaccaagttagattccacataagcatccgggttggtgatggagtaacgcacacctgcctgtgctgcaaggttaacgaccactgatggcttgtacatctcaaacatctcagtgatcagtgtcttatcagcgatgttgcctttaacaaaagtaaatgtgggatacttggccagctcgttcagccggaactctttcaatgccacatcatagtaggcattcatgttgtcaatgcctatgactgtagcagaaggatcctcctgatagatccttttcacaaggttggagccgataaaaccagctgcacctgtgactaaaatcgtttttttatctaaagtaactatgctcatacgtattcctccgctataattattttcccaaattatctatctacgcatccgctgtttgcagatagtgcattctttttcctctaatcttcatggcacaacgagccgtaacgacgtagccacactcgctgacgcgcctgtgacctatcgtcggtgtcattccagtatgtgcctcttacttcgacccttccctaccaagcactaccttgatagtcttcagcactatcttcatatcaagtccaaagctccagttctctatatactccgtatccagtctcacaacctcctcgaagtccgtgatgtcacttcggccgctcacctgccacattccggtgatacccggtttcgtagccagtctgctcttgtggtgcatctcatactgctccacctcagagataagtggtggtcttgttccaaccaatgagagatccccttttagcacattgaagaactgtgggaactcgtctatagagaagtctctgatatactggccgattcccttcttcttggtgccgtccggcagtatcttgttgcctatgactctcggatcaaagtccatcttgaacatcttcgaatcgctcatggtgttctgcgccatgagttccttcttgcgctcctcagcgtccatgtacatgcttcggaacttgtacatcttgaatatcttgccattcagtcccactctctcctgcttgaagaagatcggtcccggggacttgatgtatatgataggtcctatgaatatggtgaggatgagcgtgaatacgctgcccaccagaccacctattatatctgccgttctcttgagcaacatctgctttggtgttgcgtagttcatcatggtcgtgaccacggtctcaccatttatcttctggatgagctgcttgtcgccgtgggtcctcacgatggatgatatgcacatgtgaactgtgatgccaccctcgataaatgcgtctatcagcgtgttcgcatatccgtatgctccacgcacatccacgtatatctcgtccacccatgcggttctcacataatcaactgcactgttgtaatccgccaccaccggcacttcctggatctcctgaccgatgagattggcatctatcaccatgactcctactatatcaaacccggagtagttcttctccttgaggcctgccaccacttcatctgctacatgtctggtggtcatgaccaggagcttcttgcccttgccatgctctgcatatttctcaagatgcttcttccacaggctcctcaccgcaaatgtggcatacacatatatggcccacatgagcaggatggtagttctggaatatatagatgtatccttgaggacaaacacatacagaaggagcagtgcaacgatcacgaaaccgttcttgaagctggatatgaattccttgaagtatcctcttctgatgacgccctcatatgtattcagaaatatcatggctactatatccgccagctccgtgatgatagccaacgcgagatagtctctgttcgcatacggatttaccatgccgtgtctgatctggaatgccacaagaaatgacaattgaagtactataagatccagcagcatgaagtcaaagtgcttcagccagccttttgcgcctttctgatacataattttctctcctcatcctctgtcgtcagggtcatatttgtgcccgcatgacccggtctgttgattcatacatgaaatgactcagcccgtgtgattgtcggctgaaccttttcatctgtaaaccatgatacgcattaaatggtctgttatttatcacccacaccggcggcgcggaacgtcctgtggcatggacattcgttttgcgccaccggctagggcttggaactatttaacatagcaggatgattatttaaccttgtaaataattgacttgctgtatgccttgtagttctttgttgcagcaaccttaacagtgattcttacctttgtgcccttcttgacacccttaccaacagtaatcttgccattcttaaccttgaccttcttattggctgacttgtaagtaacctttgcctttgccttaacaccagatacagtgatcttcttcttagaagcatttaccttaaccttaacagacttctgagcagccttgttaattgtgtagtaaattgtctttgtacccttgtagttgttgataccctttacggtaatcttatacttgccagcgttcttagccttagttacaccagtaatcttgtaatcagtacctctcttgagaactgtgttaccatacttaactgtaaccttggttgtctgattcttagcattgtatgtctttgcagcagcagtagccttgtagctctgctgtgcgttaactgtgtacttaactgttgtatcgcctgaatagttacctattcccttgatcttaactgtgtatgtaccagcctttgttgccttaaggcttcctgaaacgactttgaaatccttgttcagggtaagtgtcttaccgttaacaacaattgttgttgtctggctctttgcattgtatgtaagagactttgctgtagcagacttaacgtctaccttagctggtgatgatgtagctgcaaatgcaactgttggcaccatcattgcgatacatacaactatagccaaaagcttctttaaattcttcacaataaattcctccttcccaaaaagttctattgtattgaatatatgataaaacgccctgcacgccactatacatggcgttatatccaaagtgaattatttattttgacggggcgctgtcgctggaggctgcagcctctttgccgtaagtgccataaccatagccgtactggctatagtatttgccatacttgccgtaatatttcttgtatgctctccccgttgtctgggctctgttgagtatgactccaagcagcgtacaacctacctggtcaagctgctggaatgactgtttaatgagacttctggatgtctcacctgctctgactaccagagctgcgccatcgcacagtgatgcgatctgagcggcatccgccacactgccaagcggtggcgagtctatgatgacatacctgtatgtctctgccagcttgtccagaagctccgcaaatctggcgtcctccagaagagctgatgggttctccagaagattcatacaaggtacgatgtatgcattttctacctgtgtttcatagatgacatcctccatctcggactgtcccgaaaggaaatatccaagatcaggaagcttgtcagcatcctttatatgatgtctctcctttatgactgacttacgaagatccacatccaccagcactgcagggaatcctgcctcggcgagcatcttccacaggttgatcgccacgctgctcttgccctcatttggcatgctgctggttatgagtatctttcttgtgttcttgccacagaactttatgttgatcctgagacggttcatcgcctcctccactgcatatgggagttcctgaaactctatgttaagcttcttcatgctctgaccctctctttcctgttgtgtttctttccaaattcatcctctgtgtcgtctgtcctgaactgatcactctcaggtattgtcgtgagcggtactattccgaaatacttctccatgtcgtctgctgagtggatcgtgtcatccatcaggtatcccacaatgacgatcaggcagtagatgagtgctccaagcaatgcacctatggcggtgtacttaaggtagcttggtccgaccttctggtctgctacccttgcaacctgggctatgttaggtgcgcttgtgctcatggtatccgggagatactctatcgacacgtttgccagtgtatttgcaatgtcacatgcctgctgcttgtcagtgcttgtgaccgtgatcttcaggactcgtgtgtctgaaggattctcaagggttatcatcttggcaagcccctctgagtccatgtcaaggccgagcttttcgatgacctggtcgagaaccggatagctgagtatcaggtcttcgtaatccttagtcagggatgaaccgatgttcagatcctggagatttactatggaatcatctgatgctgataccacatacagcttggctgtcgactggtatgtcggcttgatcaggaagtatgcaaatgcgttgaacagcaccgcaccgatcaggaagcacagtatgatgtatgggagcttctcaagaagcgccattcccatgtccagtagatcgatttcggtttcatcatcctctgtattcttgtatgtgttcactgcggctatatgtgtggtctcatcctgcacagcagccattttcttgttggaattcat

SEQ ID NO: 189 - DNA, 18205 bp, unidentified
  source 1..18205: mol_type = unassigned DNA
tcagattttggcgagtgcctgttccagatcggctatcaggtcattgatatgttccgttccgatggataaacgtacagtgccggggtaaatctcctgttctgcaagttcctgcgcattaagttgcgagtgtgtggtacttgccggatggatgaccagtgatttcacgtcagctacattggccagcaacgagaaaatctccagactgtcgatgaagcggtgtgcttcttcctgtcctccttttacttcaaacgtaaagatggagcctgcaccattcgggaaatagcgttgatagagtgcatgatccggatgatcggagagtgacggatgattgactttcttcaccttctgatgattattcaggaagttcaccacttttagcgcattttctacatgacgttctacacgcaaagaaagcgtttccagcccttgcagcaggatgaaggcattgaacggactgatcgttgctcccgtatcccgtagcaaagtggcacgaatgcgggtgacgtaagcagccggaccggcagcgtctacaaagcgtactccgtggtaactcggatcgggctctgtcaactgtgggaatttgcccgaagctacccagtcgaattttccggaatcaacgattactcctcccaaggaactgccatgaccgccaatgaatttggtggcggagtgtaccacaatgtctgctccgtgttcgatggggcggattaagtagggagtaccgaacgtattgtctataatcaaaggtattttgtggcggtgagcaatttcggacaccgcttctatgtcgataatattggaattcgggtttccgagtgtttcgataaatacggctttggtgttctcctgaatcgctttttcaaagttggaaaggtcgctcggatcgacgaaagtggtggtaacgccataattgggcaaagtatgtgccagtaagttatagcttcctccgtaaatcgttttggcagcaacgatgtggtcgcctgcacgagtaatgttttcgaaagcgtatgtaatggcggcggcaccggaggcaactgccagacctgctacgcctccttcgaggacggctacacgttcttcaaaaactccttgggtggagttggtcaggcggccgtagatattgcccggatcttgcaagccgaaacgtgcggctgcatgagctgaattgtggaatacataagaagtggtctgataaataggtactgcgcgtgcgtctgttgccggatctgcttgttcctgtcctacatgaacctgtaatgtctcaaagtgtaaattctttctttccataatcgtatgctttttaagtttaatattctctctttattttcttgcaaagttatgggatgtagatatatcgaacaatatatagtgaaaatatagaaaataatgctatttttgtatcgttatacagaataaggcaactgctttattcttaaaaatcacctgttagaagaatatttttcttatggatacttttgagaaattagataaagtggatttgcagatactccgtactttgcaagagaatgcgcggttgacgaccaaagagttggctgcgcgggtcagtctttcatcgactcctgttttcgagcgccttaaacgtttggagagtgggggatatataaagaagtatatcgctgtgctggatgccgaaaaactgaatcagggttttgtggtcttttgtagtgtcaagttaaggcggctgaacagggacattgcggctgagtttacccgaatcatacaggacattcccgaagtgaccgaatgctataatatatcgggcagttacgattacttgctgaagatccatgctcctaatatgaaatattatcaggagttcattctgaatgtgttgggaaccatcgatagcctgggctcgctggaaagtacgtttgtgatggcggaagtgaagcaccgatatggaatacatatttagtgggaggattgatgtatttcctattttggctactctttgttttcggctcaggtttccggtggattgcctataatgtctctgtataagctgccgtcatggtccttgtattttgcgtattggtagaggcggaccagtatatcactgtaatcaagaatggctgtatttgatttctgtgataaattggtgcccaggataccactgcctatgataccggggttgtataatacggcgtcttgtctgatagagttcattatcagttctgcacaaatatagtctttaatccttgcctcttctagtcgggtcgtgatgtatgagttcagatggcttttgtcatgttgagtcataaagccgtaccatagtaaacatttcatccctaattgggtagcttctattaatatatccagataggttagtcccgatgttcctttcttatctatctcataaggatcgatatgaatgaaagaatctttggggagtgatggcagtaacctcatgaccccttcgagagaatcagtattatataggtggacggatgtctgtagttccgcttgcttcgcatagcgttctacattatccaaagcactcttttctatatcgaagtatagaaatttttgggcctgtcttcctaatacttccattgctaaagccggggaacctaaatagtatcctctttgcatttctgcactttctatcttatagtaaatggaatcctttaaaacttgattgtcttcctctgctgctttttctaagaaatagtaaatgccatattgttgttccgaagtctgctgcatcggatagaaagcgcaggctgaatttgtttctacatagatttgtggatgctcgttccgaagaacttcgcaaagtatcagatgtttcagtacatcaggctgtttgccgtaatgagtataagttgccatgatactaaaggtttatagtgatgatataaatggtatacagcaaatatacgggataattcttagattcttgcatctgatttccaaaattatcctgtacatttgttatgtgatatgaaccttattctttgaacgcaatgaaatggcaacattgtaaatagcttcgctctatatggatgatggacaatggtgaaatctgttgttcaagtcttttgtggctaaacaggtcacccgatattttattattttatttcagaaactatataaagaagcaataacaatgaatacaaatatttatccgcgcaccaatgaccttcagaccgtctatctgaatgcagttatcaataatcctcatataaaggttggtgactacaccatatacaatgattttgtgaatgatcctgttcagtttgaaaagaacaatgttttatatcattatcctgtcaatggagaccggctgatcatagggaaattctgttcgatagcctgtggagctaagtttcttttcaatagtgcgaatcatacgttaaattctttatcgaattatccgtttcctatattttttgaggagtggcagttggataagggaaatatcacttcggcatgggataataaaggggatatagtgattggaaacgatgtatggattggttatgaggctgttgtcatggcgggcgtacatatcggcgatggagcgattattgcatcgagggcggtagtcaccaaagatgtacctccttatacgatagtaggcgggacgcctgcgaataaaatccggctgcgttttgacgaagatacgattgcgcaattgcaggaattgaaatggtgggactggagtactgataagatagctcattatttgcctcatatcatgaatggggatatggaggaacttatgaaataaaaagtatcatagcgacatagaatggaagctccaataggatctatgaaacatagattttattggagcttcctttttataatctttcttttaaatacttattgatacatctccggtcccaatttatccctcgcttgacaattttggccggaatgcctgcaatgattacattcggctcattaaattcttttgttacaatacttccccaaccaacgatactgttgtccgctatcttcacattcttgccaatcttgctatctttccctatccatacatgcttgccgatttctatgctcttggcaaaattgatcggttcaccctttaaatctgttattgtatgtgcatcggtacaccatatatcaattccccagcttaactgactgtcatctccaatgctaacatacgagtcatcttcctgcaaatacaatgtaaccccattgattacaacgcggtttccgatatctatccggcaattgttggctgttcttgaaacaccggcacccagtcccggcagctgcccgatgatcagcttcaatcccgtcatgcctaatatggtagaatatcgtaagatgatcgttcctatatttacgatattattatccccttttacgatcaaaagaaatccgttgctgagcagcaattcctccgcactctcttcagtgtcgaaatacattgagatatgattgttatttcctgtgattgtaatgttagcctgattaataatcttattgaatttatcatttggagaagaaacgcaatcaattctgttgtgtgggaatattaatgtaaattcattgttctgtccgataatctgttccatatcattaatacttgtgggttatatccgtatctttttgatacgacttttatttcattcctcaaatgtacgaaaaagaataaactaaaactcattcgatagtcctttttcttagcttgtgttctcgtggcgatttctaaaggctttctatactatatttattaacttcgttgcctgatatttattcgtgccactatagtggtacgcaagaggaactatagttccctttgtgttctattatagtagtccgcaagggaaactatagtggtacgaactaattataggactaaaaatataaatatcagggaaggaaccggttagttattcgggcttttttcataatgcttttaaccggttatcggattctgataatgagcgttataaaacaagtttttcggtttaaattctgttttttcattcgaatgataatacatgatcaacttgtttccgatagtgtgtattatgcaggatgatgatataaaggtaattattagaattgatttcttatttattatatatagctttgtaactttaaaaaacagagaaggtatatttgaaataaaagttttacaacaaataatagtgtatacaaaataaatatcgggagaatcactatgtacagaataatcatcttattaatttcattgatactatcagtacaatgtttttcacaaacggagtttactacttgtctgtttgacatatccagaaacagagtgataccgatagcgatttatcagccgcagaaagtaaattcaaaaacgaaggttatcatattcagccacggctatgatgggaataaaaacagtaagtcgaaccaaacctattcctacctgacacgttttctttcacaaaaaggtttttatgtgattagtatacaacatgaattgtccgatgatcctcttttagcgatggaaggcgatttcatgcagacccgtatgccgaattgggaacgaggaaccgacaatatactttttaccattcaggaatttaaaaaattgaaaccacaattgaattggagcgaactcatcttgatggggcattctaatggaggggatatgacaatgctgtttgccactaagtacccgcagttgatcagtaaggctatatctatggatcatcgcagaatgatcatgcccagaacgttgaagccacgtctgtatacattaagaggatgtgactatgaggcagatgcgggagttctgcctaccggacaggagcaggaacaattcagaatgaaagtagtgaaactggatggagttacacatagcaatatgggtgagaatggaacggcggaacagcatgacctcatcaatcagcatatctgcaaatttctgacggaaagataactaaagcatcatttctattttatctggcagttttaaaccgaaagcctgtttttcttgtaactttgcagccgattttagaaaaagaagtttggaatgaacaataaatacgaagaacggctgggaacagaacgtatgttaccgcttgttttcaaaatggcacttccggcagtggctgcacaattcgtcaatctgctttatagcattgtcgaccgtatatacatcgggcatattccgggaattggcaccgatgcgctggcgggtgtaggggtgactacctctctcattatactgatttcttctttttcggcaattgtcggcggcggtggtgctccgctggctgccattgcactcggacagggcgaccgtgtacgagccggaaagatattgggaaacgggtttgttctgctgatattgtttactttgctgacttctgttatcgcatatacttttatggaacctattctcctctttacaggagcttcggaaaacaccttggaatatgcggttgactatctttccatttatctcttgggaacgatatttgtcgaaatatccacagggttgaatagctttatcaatgcccagggacgtcctgccattgccatgttttcagttctgatcggagccttattgaacatcattcttgatcctatttttattttctggtttgacatgggcgtgaaaggtgccgctttggctacggtactttcccaagcgtgcagtgcggtgtgggtggtaagtttccttttttcccgacgtgcctctctgcctttggagaaacgatatatgggactggaccggaaaattatcctttccatattagctttaggagtatcccctttcattatggcaagtacggagagtttggttgggtttgtcctcaatagcagtctgaaggagttcggagatatctacatcagcgcattgacgattctgcaaagttcgatgcagtttgccagtgtaccgttgaccggatttgcgcaaggattcgtgccgattataagttataacttcgggcatggtgacaagcagcgtgtgaaagattgcttccgtattgtactggtaaccatgttttccttcaacttgatattgatgcttttcatgattcttttcccttcgacggttgcgtctgctttcaccagtgatgaaagactgatagaaaccgtacgttggacaatgcccgttttcttgggtggtatgaccatcttcggcttgcaacgtgcctgtcagaatatgttcgttgcattggggcaggcccgaatctctatcttcattgctctgttgcgtaaagctatcctgttgattccgctggcgttaattttgccgaaatttatgggagtaacaggagtgtatgctgctgaggctatatctgacgcgactgcggccatctgctgtacgctgttgttcttttggcagttccctaaaattttgggaaagattaaagagaatactttgcgtgtggagtaatcgtttctttataattagttttttacttcacagatatgcccagcattacggttgtattctgactgttattccagaccgaatgaggtatttctccttttaccagaaaagcttcattttcattaataatcttttcttccttgtcaagcagaactttggcttgcccgctgatcactataaataaatgattgtgtgggtgagtatgcagcttgacaggttcgccgccgttcggttctaaataggctattgcgccgtctattatttcaccacagttgccaaaaagttttttggctaagaacttcaagtgttccggtggggtgataaatccatctgattcattcatgactatacaaatatatattgttatttatcgtgtatgacacaactacaaaagtagttatttgaattgattttcttttaagtatgatgtcttaattcctgatttgtctccatctgagataatcttttgaaccatcagttgtatttctttggtcgagttttttagatatccgtcgaacatagcttgcattgcctcatctctaaatatcttttttacgatcggaacgctgataaacagcggtaagtagtatagcttgtttactttttctttctttgggttaatattcatttgggagcagacgtaaaagccctctctgatggactttattgttgttttgatgattttcgtattactgataaaagatttcattgttccgccggctttgatgatgcctgctgagatgcctgttatgaatgcataatgtgggataagccaattcataatctgattggaaataaatggcttcatacccgcatccgacattgcatctgctattttttgtattcggggtgtcgtttcgcctgttgtctctcccaacattgttttcgaatatttagatccggaaatgacagcgttaatgcctttttcattccgccctcctcctgccataaaaggaaaaccaaagaaatattgtccggacataaggcattgacttattttttttaagtcatcctgccatatattttggaaaaagagaatatgtgcctttcctgatgattttttaagaacaggcagtatttcttcaagatgaaaactatgggtagtaacaataatatattcaaaatcattatccaccgaaagagtatctgtcactttcgggcgaaaaatgatgttttctgttattttcttgtcattcctgaagtctgtacaatagatatttattccattttcttcaaaaccttgtttttgattgtttctgacaaggatacttatgtcgtgtcctgctttcgccagttgccagccgtatgtgctaccaattactcctgctccataaattagaatcttcatgatgaaatgtatatttattatttgtaagaaagatcgatgaaagctgaacgaaatagtccgtgatagtctgagtaggtcggttcacaaacatcgataaggtcggcgggtgaaaatccggagaagttttttacttcttttatcagatgtgatttgtcataatagccacattcgtatgctaattgttctagtgtcatatccgtatgtgtctgtagcagataatgtaatttctgaaaacgcataatccgcaggaaatctttcggattggttccgatatgttccgcgaataaacgtttgaattgtttataactcaaacaggaaatttcggctaagcggtcaatgttgctttcccctctatgaatagagtttattactgcatttattcgtttgtcttcgtaattgtcggattgtgatatacaaagaagaaggaagtgctcgataagacggacgcattgtaaatcgtctgttgcatcgttcagctgttgttcgagttcaagtaattcaggattgttcagtatatcaagcgggagataactgttatttgtttcatgaagcggagttttaaagaatgccttaatgcctgttggctgaaaaacaatgcagatgaaatcaatatatcctgaaaaggcaagattcgtatagtcagttgcgataccgtaaagatatgactggggaagataatctccattggatgatgaataaatacgatttccccgatgaaaacataatgctgtacaacctagcggaacaagacgctgggagcaaagtgtaacattttccattgcaaggaaccagtactgctttacatacggagtaagtgatgcagagggctgtatgactttaaacttattcatttccggcaaagttagagatattgttgtatatataaggtgtaaaaaaaggacgttgttgaagcttgaatggaataaaaatgtgtaaccgattacgtatttcttgagaaatagttgcatgtattactgaaatccgatatatttgcgtaatcaattacgtatttaataatgcaagtaataaagacatggacttttttaatcagacggggaaattagctatcggaagcagactacgtatgctgaccgataaaatcacggtagatgcggctgcaatctacaaaatgttcggtgtggacttgaaacccaagtggtttcctgtcttctttgttttatcacgtggagaggcaaagacaattacgtctattgctaaagagataggacactcgcatccttcggtgagcaatatcataaaagaaatggtaactaagggattggtgaaagagacgaaagataaatccgacgggagaaggaatatggtaatgttgtctgccaaaggaaaaagaatgtccgactcttttgcggagcaatgtatagatgttacgtccgctatcgagcaaataacgcagcaaacccggaacgatctttggaaggcgattgaagaatgggagaagcttctgtcggataagtctttgctggagcgggtgaaggatgcgaagcaggagcgtgaagctaaggatatccaaatagtatcttatgaaccatgctatcaatctgctttccggacacttaacgaggagtggattactgcttattttcgaatggaagaggctgactacaaggctttggatcatccgcaagaatacattttggataagggcggagacattttggtagccctttacaagggtgaaccggtcggagtatgtgctttgtgtaagatggatcatccggtctacgattatgagttggccaaactcgccgtcagtcccaaagtacagggcaaaggtatcggagtgttgctttgtgaagctgtcgtgaataaggcaaaagagttgggcggcaaaagaatctttatagagagcaatacacgtttgaaacctgctatccatatctatcacaagctgggattcagggaacttcccgaataccacacgacttacgaaagaggagatatacaaatggaattaacgatagaagagtgaaaatgaaaaaggccgatagtgaatttatcaaggggcgtattgccccttgcggactgcattgcggaaagtgctttgctttttctgacggagacatctcttatcatagcaacgaactcaaaaagtcactgggcaattttgatgtgtacgcacagcgttttgtggacttgcttgacgaacccgtctttgcaaagtatccggactttaaggagtttttgaatcacctgtccgtagcgacttgtcagggatgtagaaaggagaagtgcaagttgtttaaaacctgcaatgtacgtgcatgcagcgaggagaaacaagtcgattattgtttccagtgcagccgcttcccctgtgaaaacactggtttcgacgagcatttatataaaagatttgtaactatcaacaaacggatgcaggagatcggagtggaaaagtattacgaggaaatcaaagatattcctcgttactaggtcgtcggttcctctctttatctcatttcctgtgcgtaaatgttgatggctcgcagtgcctttgaaatctcagtcggggtgatgtcctgacattctattcttaatactttctcccagtcctccatatctacattccatttgtagatttggggacatagggtgaaaagagccgcgatatgttttatatcccgcgcattccttattgaggttcggaaaatgagtatttgcccttccatagttgctatcaattacttttgtttaccttgcaaaggtaggcttaaaaaggcttcggtatagaattattcgacgaatgccgtgattactcatgacgaattaagtaatttgggagactaacaatagggcatttgtatagttgtccttctccatttaaaatctttatccggatatggcgataccccatacatcgtcttttagtgcttgaccccttcaaataaatcgcggttgtctcgtgaactctgtgaattgcgcttgaagtcattgaatgtataactgatagtcaacgtaattacagggaatttcggttgaatccgtgtgatcgattgtaaattggctgtctcaatgtcacttctgtaacgggcagaattgaatatatcccgaaaggagagggtagattgcagatgaggactgaacaactgctgacgaatagccagattgacaaaccaaaaagaatccgacctcccttgtgtagtaaccgaaggacccacgaaattcccgtccagctgaatacgggtattcttatgaacccgaaaaaggttattgactgtaaagtcataattggtactcgtttccttttttcctcccgaatttatattattcattaccttataatagtaaatatttccgttgacgtccagattccaccatttagtgactttcaactgggtacttagctccacgcctaacgaatagtcattgcctacgttagccatggagtctaatgtaactcctgcctcgtacggaacgcgcaagcgctcaatcttgtctttacgttttctgtagaacaggctggattgcaaagtgtgctctcccatcgtctttttgtaattcagctcgaaagaatgtatgtattcgggccggatatccggattgccgatttcagctgtgtaataatcgcgataagtaatgtaaggctccataaaaaagagttccggacggttggtacggtacgaataggcgaatgtcagcttctgttcgtgcggcagcgtgtatcccaaatgtacggatgggaacacctcaaaacgattcaccgtgcggtccgaaccttcaatagagcttcgcagcacctggtgtgtatgttcacctctcacccctatctgcacgtcaaatgctttataactgtcacttcccatgacataaacggaatgaataccccgctgaaaatagaaagtgttatagatatcctccctccaataaaattcctttttctccggattccagaattgcatcgtgtaatcgccgtcttccagatacgaatgatattgatacccgctttccagcagaccggtcttgctatacggatagctgtaggacagattgccttggactgtccagcgtttttcgtcttcccacgcacggtgtccctgctgacgttgttcgttcttgtcgaaaaggtcactctggaaatattcaaggggattgtcttcataacccagcataaagctgccggttagggtatgcccgttgtcgttaaacttatgggagaatcctgcttttccgatattgaccgtcgagtgcaggtcatatttgtcgcggctagaatagttggatggggcggatgctgcggcggaattggaatgtgtctctgtataatcgaggtccccttcgcgggtaaacttgtcatataccacctgcaactctgcattgacggaggttttgggagtaaaagcgtaatcaatgcctccccgtagtccatagtgataattcttcccgattcgcggaccatcggacagggaggtggtggttttgtccccaacaacagtcgtcttcctttgttcgaaatcgctcttacggatgggattgttccagtgcccggcaaggtgccactgtaacttcttgtgttgctgggacaacaggaaatccagaccattggagagagccgtgctgccatacgcattgactataccgttgatacccgcttgtttgtttttcttggtgatgatgttaatcattcctacttctccgtccgtatcatagcgtgccgaaggcgtagtaatgatttctatgttctctatctgggtggaaggaatctgttgcagggcctgtgaaccggaataaaagctgggcttcccgtcgatatataccttaaatccactgcttccgcgaaaggtaacttcaccatccacatcgacccggacggagggagtattttccagaatatcgaccgccgttccgccgctgctcatgagattgttcgaagcgtctataatctttttgtccagcttgtagatgacttgccttttggctgcctgcaccactacttcggctatacctacttccaaaggttgcagttcgataatacctaagtccgtcactgattcggaagaggtgatactaatggcgccttgtgtgtagatgtcatagccgatcagtctcaccattaacgagtattctcctttggcaatacccgataagtggaagtcgccgttctctttagtatgggtaaatgaagcgggaccggtttcgcctttcttcgttagtacgacatcggcaaactctatcgggttgcctgtacctttttcctgcacttttcctttgatctgtacgggaaccgccatgaggcagttgaaactaaacataaaaagaatgagaataattgtagttttcatgatcgtgttgatagtttgttttatgctgcaaagttaatgaagtatttccgacattagaataaattggttggctatatagcgcttgtgtcacggaaagatacatatttgtcacgataagacatggacggccggaaatctgtacctgttaatatatagaaaagtgtgtctgtttccgtctttcttttttgatttactttgcagtgttgttttaatctcctaatatacttaaaagttatgcagttgaattttgccaaaagaatgtcctatatcaaggcttcggaaataagagaaatactaaaagttactgaacaggaagatgtcatttcgtttgcaggcggtttgcccgctccagagctttttccaatagaggaaattaatgaaatcaatcagatcgtattgaaggaagcaggtactaaagcgcttcaatatacgactacggaaggttatgcccctttacgtgaatggattgccaaccggatgaatgaacgtttgggaacagcttttgataaagatcatattctgataacccacggttctcaacaagggctggacttatccggaaaagtgtttttggacaagggagatattgtactttgcgaaagtccgacatatctggctgctatcagcgcattcaaagcatacggatgtgactttatcgaaatccctacggatgaggacggtatggtgatggatattttggaagacgtcttaagtaatactcctcatataaagctgatatacgtgatacctacttttcagaatcctacggggaaaacgtggagtctggaaagacgcaggaagttggctgaattatctgccaaatatggtgtggcggttattgaagataatccgtatggcgagttaaggttcgaaggggaatctttaccttctataaagtcttttgatgaggctggcaatgttttgtgtacaggtagtttctctaaaatattctgtcccggtttccggatcggctggattgcgggagataaggatattattcgcaagtatgtattagtcaagcagggcacggacctgcaatgcaacaccatcgctcagatgaccattgccgaatatctgaaacgttttgatattgatcgacatattgcgaagatagtcgaagtatatagaaagcgcaggaatgttgcgattgaaagtatcgaacgttattttcccgatactgtaaagtttactcgtcccgaagggggattattcacatggatagaactccctgaggggatttcggcacgtgatgttttagttagaagtctggagaaaaagattgctttcgttccgggaggttccttttatcccaagggaaataaggaaaatacacttagaatcaactactccaatatgcccgaagaccggattgagaaaggacttaagactcttggggaagtggtaaaggaatatatcagccgatcagaatgattctttgatgatattccccagagtttgcaagcgctcttcgataaaagggctccattgctgaccgaaactcaaacgcatacagtttctgtattggtcgtgcagagtaaacattcgtccgggagcaatgctgattttatgttgcatcgctttataatacagttctgtggtatctgttctttgattcagttccacccaaagcatgaatcccccttgcggagtgatgattttcgtatcttcggggaaatagtcggtaatggattgtgccagatgaagactgttggtatgtagttcatggcgtaacttgcgtaaatgattctcatacctgccgttttccataaagttggcaatggcttcctggttgagggtaggagtggatattaaatgaatatgtttctgacggataatggcatccttaaacttaccgggggcaatccatcctacccggtaaccgggagccaatgtttttgatacggaaccgcaccacagtacaagacctttttcatcgaaagccttgcatggcttgggacgtgaatgcccgaagaatacatcaccgtataaatcatcttcaatcagagggatatcatgttctgccagcatctgtactatttcctttttatgttcatcaggcatacagcttccgagcgggttgctgaaattactgataagcagacataggctaatctgcggcaatacttttcttaaagcgtcgggttcaatgcctgttaccggatttgtcggtagttccagtacgcggagccccatgctgttggctaactgcaatattccgaaataaacgggactttcgacagctatgatgtctcctctctgagctatgacggacaatgccagagagatggaattggtaactcccgtagtcgttacaatgtcattttcagttaagtttccgttccagctatatgcgaagcgggctatgtattttctcagtcggatgtttccttgcgggtcttcataccttgtgccatttccgggaagagaatacattgctttgaccagttccttattgagctttgcgataggtaataaaacatcttccggtattcccagcgaaaaacgagtgatggatgaatcttcgatggaatgatatacctccatgattaagtctgcttcttcctttcctaaagattgggcagacggttgtgtcgttgccggagcggacaggtttaacggcttataattgactataaatcccgatttggggcgggaaatgataaatccttccttctccagttcgtaatatacctgaatggccgtgtttaaactcacgccatattcattgctgatagtacgcaaagaaggtaatttctcgcctgctttccatatacctatttttatttgccaggcgatggtgcctgctatcttctgatataggatttctcttttcattcttattctgtatccggcaaagatacaaaaaggatgtctgtatctgttgtgtttgatctattttgtggaatgtaaaagaatgacttgtgtgaagtgtgtattatcttagcagtcttgggtaaatggataagaatatgaatactgctataatcgataccgtcagaaaaagactgactgaaagtatagatggcaaagtgctggcggcttccgctcatttctttatatcggaatttgggaaattcaatatattaccaagacataataatataatctcattattgaacggagttaacctacgagaatattcccatctgttaaacttgggtcactcatggacaaatataaggcagtggtgagattactagtcatgtcaaatctgttaataatctgaatttagtttaaaaaactgtagtttggtgttgttgaatgctgttttttatgcgttgatattgttattcgtgataatgttattatctttgtggtataaacattgctatgtgagattgccaagaagattggtagtaatacgtaaagtgctgataatagaaaaaataataaataaacagattgaagttatgatacatactgttcctaatcccaagatgacaactcgcgaagttgataagtttcgtgaagattttcgaaagtgtgtgtctggaaaattaacacttaaagaaagaagagctatcaaaattcggactcaaagaatgagtgtagttgctaaaaggattatagctaataatggtggtaaaaacccaatacttggatattaatatttccataaataaattattaagagaggatcaagatacgattctctctttttcttgcggttgtgaagagttagataaattctttcatgaagaaatgtctctttgtatcaagcatcattatattacggcctactgtgttagagatattcaaaataatgaaattgtagcaatattcactttatctaacgattccgttgtaatagataatatagaagataaagaggatttcgttcaggaatcgaaagtcaagattaatgatgagtatattcctacattcgaaaaacaaacttccttcccggctataaacattggacatttaggagtacgtacagatttgcaatgtaaaggaataggagaacagattcttgattttgttttatataccttttcaaactttgatatatcaggttgccaattcattactgtagattcattaaataattcacggactaataagttttatgctagaaatggttttgtaaatcaaaccaatagtgataattgtaattcaactagacgtatgtatttacctatacaactatttgaattaatgggagatatcgaatga

SEQ ID NO: 190 - DNA, 17693 bp, unidentified
  source 1..17693: mol_type = unassigned DNA
  misc_difference 3271: note = a, c, g, or t
  misc_difference 3272: note = a, c, g, or t
  misc_difference 3273: note = a, c, g, or t
  misc_difference 3274: note = a, c, g, or t
  misc_difference 3275: note = a, c, g, or t
  misc_difference 3276: note = a, c, g, or t
  misc_difference 3277: note = a, c, g, or t
  misc_difference 3278: note = a, c, g, or t
  misc_difference 3279: note = a, c, g, or t
  misc_difference 3280: note = a, c, g, or t
  misc_difference 3281: note = a, c, g, or t
  misc_difference 3282: note = a, c, g, or t
  misc_difference 3283: note = a, c, g, or t
  misc_difference 3284: note = a, c, g, or t
  misc_difference 3285: note = a, c, g, or t
  misc_difference 3286: note = a, c, g, or t
  misc_difference 3287: note = a, c, g, or t
  misc_difference 3288: note = a, c, g, or t
  misc_difference 3289: note = a, c, g, or t
  misc_difference 3290: note = a, c, g, or t
  misc_difference 3291: note = a, c, g, or t
  misc_difference 3292: note = a, c, g, or t
  misc_difference 3293: note = a, c, g, or t
  misc_difference 3294: note = a, c, g, or t
  misc_difference 3295: note = a, c, g, or t
  misc_difference 3296: note = a, c, g, or t
  misc_difference 3297: note = a, c, g, or t
  misc_difference 3298: note = a, c, g, or t
  misc_difference 3299: note = a, c, g, or t
  misc_difference 3300: note = a, c, g, or t
  misc_difference 3301: note = a, c, g, or t
  misc_difference 3302: note = a, c, g, or t
  misc_difference 3303: note = a, c, g, or t
  misc_difference 3304: note = a, c, g, or t
  misc_difference 3305: note = a, c, g, or t
  misc_difference 3306: note = a, c, g, or t
  misc_difference 3307: note = a, c, g, or t
  misc_difference 3308: note = a, c, g, or t
  misc_difference 3309: note = a, c, g, or t
  misc_difference 3310: note = a, c, g, or t
  misc_difference 3311: note = a, c, g, or t
  misc_difference 3312: note = a, c, g, or t
  misc_difference 3313: note = a, c, g, or t
  misc_difference 3314: note = a, c, g, or t
  misc_difference 3315: note = a, c, g, or t
  misc_difference 3316: note = a, c, g, or t
  misc_difference 3317: note = a, c, g, or t
  misc_difference 3318: note = a, c, g, or t
  misc_difference 3319: note = a, c, g, or t
  misc_difference 3320: note = a, c, g, or t
  misc_difference 3321: note = a, c, g, or t
  misc_difference 3322: note = a, c, g, or t
  misc_difference 3323: note = a, c, g, or t
  misc_difference 3324: note = a, c, g, or t
  misc_difference 3325: note = a, c, g, or t
  misc_difference 3326: note = a, c, g, or t
  misc_difference 3327: note = a, c, g, or t
  misc_difference 3328: note = a, c, g, or t
  misc_difference 3329: note = a, c, g, or t
  misc_difference 3330: note = a, c, g, or t
  misc_difference 3331: note = a, c, g, or t
  misc_difference 3332: note = a, c, g, or t
  misc_difference 3333: note = a, c, g, or t
  misc_difference 3334: note = a, c, g, or t
  misc_difference 3335: note = a, c, g, or t
  misc_difference 3336: note = a, c, g, or t
  misc_difference 3337: note = a, c, g, or t
  misc_difference 3338: note = a, c, g, or t
  misc_difference 3339: note = a, c, g, or t
  misc_difference 3340: note = a, c, g, or t
  misc_difference 3341: note = a, c, g, or t
  misc_difference 3342: note = a, c, g, or t
  misc_difference 3343: note = a, c, g, or t
  misc_difference 3344: note = a, c, g, or t
  misc_difference 3345: note = a, c, g, or t
  misc_difference 3346: note = a, c, g, or t
  misc_difference 3347: note = a, c, g, or t
  misc_difference 3348: note = a, c, g, or t
  misc_difference 3349: note = a, c, g, or t
  misc_difference 3350: note = a, c, g, or t
  misc_difference 3351: note = a, c, g, or t
  misc_difference 3352: note = a, c, g, or t
  misc_difference 3353: note = a, c, g, or t
  misc_difference 3354: note = a, c, g, or t
  misc_difference 3355: note = a, c, g, or t
  misc_difference 3356: note = a, c, g, or t
  misc_difference 3357: note = a, c, g, or t
  misc_difference 3358: note = a, c, g, or t
  misc_difference 3359: note = a, c, g, or t
  misc_difference 3360: note = a, c, g, or t
  misc_difference 3361: note = a, c, g, or t
  misc_difference 3362: note = a, c, g, or t
  misc_difference 3363: note = a, c, g, or t
  misc_difference 3364: note = a, c, g, or t
  misc_difference 3365: note = a, c, g, or t
  misc_difference 3366: note = a, c, g, or t
  misc_difference 3367: note = a, c, g, or t
  misc_difference 3368: note = a, c, g, or t
  misc_difference 3369: note = a, c, g, or t
  misc_difference 3370: note = a, c, g, or t
atgtacacaaataatgcatatctcaaccactcaacgatggatagaaaagataaatccaagccgcttattgtaactatgtgtggaacatataagttatacacgcatcctaaactacctacctggagacctcgtggcagactcgattttcagttgatttatattgctgccggaaaagcgcatttccactttggccgcaatagtgaagatgaaactattgttcatgccggacatatgattttatatcgtccaaaggagcctcaaaaatatgaatattatgcagaagatcaaactgaagtctactgggttcattttacaggcagtgatgtaacaaatatattacgctcttatggattgaccgatgacaaaagggtattttactgtggttctggtccctcctatcaaaatctttttcgtacaatgataaatgaattgcagatgtgtaaggatagttatcaggaaatgcttgaaatgtatttaagacagatatttataaaactgcaacgacactttaataacagcataaggatagataattcccgtgctgctgaaactattgacatggctattgcctattttaatgaacattatagcgaatcaatcagtattgaagaatacgccaaaaaaattcatgtaagcacaagctggtttatacgcaacttcaaactttatgtcggctctacacccatgcatttcattttgcaaaaacgcatttgtaatgcagaagccctgctcttgaatacggaatataacataaatgaaattgcacaaattgttggttatgataatgctttatatttcagccgcatattcaaaaagataaaaggcatatctccctcagaatatcgtaaaaatatataaaaaactgcaatgggaagagaatttacaccctctcacccattgcaatttttgtccaattatttttttattttggcaagtaatatactctttcatgttttataatgacagcgtaaacaaaaaggagatgaacatctatgagaaacaaattccacaactttattgaaaacttacttagcttttatgcagactttttcacgcacagattttaccctatgtaatgtacagttgccccacaaacatatcttacagaacattatggtaacgcatgtatgaaaaagcacaaatgaaagcagcttttctgaccggttaaaattagggtggaaattccttattttaacttgtactaaatcttgacattggattattttttaatacttaaactcttcatacaatactttatccaaattatgttccgataaaaaggaaaatattatattgcaaaacaacttcaccttattctcctccaccacatagcttaaagaattaaaagcgcccttttctccctcaacctcatactttatctttctttcctgaatttcatcttcaaatccgtacatccccattggaataacaacattataccctttataattaacataaactctacatttattttcttcatattgaactttcaatgaacataagtcgttttcccaaatatcaaatttttctttcttttggattctccacatttcattttctccatttggtatacaccactgtatcatcagataactttattttccatcaatgctttttctattcgctgcacctttttcgcatcatccaaagttttccacgcatgatgtgtcacattgggcatctccacacaaatagttttttccggctcagccattaagtcttcaaaatcatccgcggcgcaatagatgcattttttatggttcattgcaaagtcaatctcactttcctgtatcctgtcacaagtcatgccaaatatatgattaattatattttgtaatttttcttccgaaaattctttttgatgcaaatttaaaatggttttcactttgtcaataaaatcattataaacatcatcttctaacaaattaatatacgcataactcataccgttatgaaatatcactaatctctcaccatataaaaaatctgataaataataaaattcattaattttcccacaattcgtgcatctagcagtttctcttcttacttttattttcatattcatcctataaaatatctttttgctttatcaccaatttgctcgatatttttcatttaaaacagaatccatattattatcaaccaaaaagaaatatatttcatctaaaaacttttctttatcctcttttttaataacaaaatgtttatcaaattggtcgttgccttccatacgaacatcttctattgatgccaactttaaatcttctccaaactcccataccaacataggtattgtcaaattaaatcccttatagttgatatatatttcatcattctccatcaattcaaaaacttttatttttaaatcaatgtctctgtttacatatattatataattctcttctgttaatttatcccacaacatataaaacgccttttatatcctctaatcccgattacatactattgcttttatagtgaaccaaatcatatggataatacggtacatctttcaaattgctgtcatctaaatttaatatttttgcaatagctcctgcttcaaaactccagtaaccgtaatacaatttttcttttgctttatgaatatcgtaccatcccatatttttatgtcccacataccaatatttttccaagtattcttttaatttttcaactgctttttctttatttgcaacaatatccgtcaacttatcataagggaagccataagaatagtctcctttcagttgtcctatgtttccattcattttgtaattaacaaaaaattccaacaaagcatctttccgattatattgaattcttttatattatctccaatgatgcgcttttaagaatttatccggaattcttaacttcagttctctttctaattctttaaaaaagacagcaaaatcagcttcttcccaccattgttgtgagttacttaatgccactgttctttctccatataaaatgcagcatccaaatcttcctctttcatagttcaaccttattggaaaataatcatatgctgtaaattccacgctgaatgctcggttattcacatcatcatatacgtccgaaatgcaaaaatctttaaccttatcccccattttttcttttgccattttagtaaaattaattgccattgtttgtgtctcattaaattccataccaataccctccgtattattatctaccagctacttcttttgtgcttattatttatgctctcttatcattgaattaatgccattaaaaaaagcannnnnnnnnnnnnnnnnnnnnnnnnnnnnnnnnnnnnnnnnnnnnnnnnnnnnnnnnnnnnnnnnnnnnnnnnnnnnnnnnnnnnnnnnnnnnnnnnnnntgtcatctaaatttaatatttttgcaatagctcctgcttcaaaactccagtaaccataatatatattctggtcacttttatgagcctcataacactcgtattctttattataccagtcttctttcaaatatttctccaataactctgatttatctctttctttaactaactctttcattatttgaaatctgtctggaaataaaagtggtaaattaggttgtttttcccccatcagaaaaagcaacaaccagtcctttaccgctttttctttcagttttctttttgttaatgtaatcagtttttgctctatttcaaataggactgcaagtgatatcatctttaaattctcattatatgcaaccggtgaaaagaaggacattatccactcttcatatatttccataaaatcacttcttaaacaagctatgttatctcccttagaataccttgctattataattccaagtttaatacgaaaaattccctgttttactggtactaatctttctggtctaacttctccgtcatttactttttttgttaattttaaaattctagctgtatcttctgctatgaattcatcaaaatatttttcacttttaatactatctctcattctcttggtctcctttaatctattgctgtcacatctaacacaccatttttatcaatatggattagttgttttccatatccctcaactaaaatatcatcatacatttccttccctactgcttttaaaagtctattacttccatatatccaatcatcgctcatttgtggtccatctaatgtatttcctaatcttgagcttccatactttgcttctccaattacataaggcggatgaccatttggattgtaatatacaccatcaattccctgatgatttggtgcatttaaatcagtcactctatcaagacttatcctctcatatccttgactttcaaaatatgcatccattttcatttctccataattacctttttgaatattattgcttaattgaatttctccattctctaccccttttattatatcatctacagagaaattactactttcaaccattccctgcttcatcaaatcagtaaacgatttctgtttaaatttcacatccagtttatccatcccatgtgaagtaagtccgctggccagcattcctgccatcattcccacagtctggttccccgataaatctgttgtcaacttcgagacaccctcgcccgccaatgttgaaagtccttctttggcaattatcgttgaaccgcttcgaaaagtaagttttcctactgtcgaagctttcccaattggaataaaggctgatgctgcgaaagaaaatacaccctccgtaaaataatacgcctcttcatttccctgaaagactacttcttttagctgattcacagccgtactgtcaagatcactaatacttccataataaacatcctgtgccccttcggctgtatctgtaattccaaaaacggttgttccgcttccaatcattgtacctgcggctaccactgccggagttgctgctccaagcgatgctgcaatacatgctacaccaactacaaccagtacaattccgccgattgcttttataacaccttgcacttcccgttcttctgccgcatcttttagctgctgttctacatcccatattgcatcataagtttcctgattaactgtatgctgctgataaaaatattcactcagatatgccagtgtatacacatcgatgtcagcataaaaactattgcttgtataagtagtgattgctgttttactggttcctatttttccaaggcagttttttatactgtcaaccatgagatctactgtattttcaataattgttaccatagtactttcctgtgtctgaattgtctcaataaaattcaaaagttcctgatccagttgttcatgcagttctattataccatttgttcccggtgtattcacgtctgaaatatccgagatattggataccgcctgctgtacactctgagcataagattccgcatccgctgaattcgtagccagttttgtgcgaaactcccggattgcttcctcatccagtctaaagttcgtcgaaccatctatctcattataacatgccttatgataagcaatatcatctagcatattttgcgttgccacctttaaacaggatatcatagtaatatgtacatcatataaataattttttgctgctgttgccgtctctcctataaactggtcactctgaataaactgatttatacttctttcacacgtttccaacttacttatcaagccttccagctttgacttatactcccataacagattatttatatctgtatatttgattacaaacccttccattcttctcccccatccttctatggatattccagtaaatctaacaatgtattactttcctttaactgattactctgctctctgtcccgttctatccaggaatttgatatttcagatatattacatatatctgaaatcaatatctgttcataagcacttactatatttgcaagactctcataactgcttaaaaacttctctaatgcttctgattttccactaatatctgttgttgttgcctccagtgaaagaccacatgcatccatatatatttttccgatatctgattccgtggctatctcatctaaaatagttatcatctgttccactcctgttttaaacattcctgctaattaaaaaagtttcgaatttttgtacataaatcatcccatgcatttaccagtttcgaaagtgctccatatttctcattctgtttttcctttaaagcattaatctcccagttgatttcatcttctacactgtcaataccggaaatatatccatcatagtctgttttcaatccgccactctcacagatttcataaaaatactgtgccttatttcccgtccataatgattcatagaaagtcggcatattactatgaatattttttatatcctccaacgcttcctttgcatcatccagggtattataagcagaccgaagtctctcaagctcagcttctatatcattaatttcgcttttgtatgattcctgttttttctcatttgcacttttctgtgattttaaattttgatatttggaattgtcatattttttagccatattaattcctcatgctctgcttcagtcttcgaacatctgcccgctctacatcaagactctccattgctttttgaatattatcaaccattattctctcatcatcatccgtataccccttaaatactaccttgttaatatcagatgcctgaaaatacattaaccggtcccccatcattccttccggataagtacatgctccataatcaaaaagtttgtaatctccatttatctttagctgtagtcctcttgctacgattacatacttttttacacctccatgcacaataacaacacttcctaacggcagatagtccactctctcttccattttgccacctcatatgcatacttattctatttttattgcctcatatcatttgggattatcaccggagaattccggaatctatgaattgtactatctaatcatttcatctcatttttcatagctcactactcccgctgattcttcagcaactacctatcagattaaccattttacatttctttgtcaattgtcatttttattcaaattatgtttccgtttttgtatatattatataaacgctgactgtgcctgcagtgcctgttactggcagcttcttacagatgcccggcaacaaaaatttcagccccatgtgttccaatcgaaacacatgaggctgttttgggttgctcttaaatattcttcacggttgcaatatctaccagagtaagctctgactgagcattctccaagctggttgccagtgcgttggctgtatccattgctgtgatacagtatacgccggtctcaattgcattacgacgaatcaggaatccgtcacggttcttatcaccatttccctgggtaggagtgtcgatgacaaggtcaatcttatgtcctaagattaagtccataacgtttggtgactcctgggtaatcttattgacacgcagtgcatctacgccatgctcctgtaaatattttgcagtacttctagttgcataaatcttgtaacctaaggctgcaaaacgttttgctacgccgactgcttccggcttgtctgcatcttttacagtcataatcatctgcttatatttcggaagctgaactcctgctcctaagaaagctttgtataaagcttcatcaaaggtcttggcaattcccaaacattctccggtggacttcatttccggtccaaggctgatttctgctccacgcagtttctcgaaggagaataccggcatcttgattgcgatataatctgcggttggtgcaagtcccggtgtgtaacccattcccttgatggtatttccaatgataaccttggtcgccaggtctacgattggaataccggtaactttactgatatatggtaccgttcttgaagaacgtggatttacttcgatgacatatacctgctcgtccattacgataaactggatattaatcagtcctactacatgtaatgcctgagctaaacgcttggtatattctaccagcatttctcttacttcatcactgatggtcggtgccggatatacggaaatactgtctccggaatgtactccggtacgctcgatatgctccatgataccaggaattaaaatatctgtaccatcgcatacggcatctacttcgatttccttacccatcaggtatttatcaaccagaatcgggtgatcctgtgcaatacggttgatgattccgataaattcttcaatctcttcatcattgtatgcaatcttcataccctgtccacctaatacataggaaggacgaaccagtaccgggtaacccagacggtgtgcaacttctttggcttcctctgcagtaaatacagttccacctgctgctcttgggattccggtcttctctaagatttcatcgaagagctctctgtcctcggcagcatctacatcttctgccttggttccaagaatcttgacacccatcttcattaagctctctgtcagcttgattgcggtctgtccaccgaactgaactacagctccgtccggtttttctaattttacaattgcctcaacatcttccggtgtcagcggctcgaaatacagtttatctgcaatatcaaagtctgttgatacggtctccgggttgttatttacgataacggtctcccagccttccttggcaaatgcccaggtgctgtgtacagaacagtagtcgaactcgataccctgtccgatacggattggaccggaacctaataccagaactttcttctttggtgttgtctctgctgcttcattctcgctgccaaatacagaatagtaatatggagtggatgcttcaaactctgcggcacaggtatcaaccatcttaaaggctgctacgataccattttcgtaacgcatgtcatgaatttctttttcactctttccggtaaggtctgcaatgactttatccgggaattccatacgttttgcttcttttaaaagctctacggtaagtggctttgtctttaaatcctgctccatctcaactaagatagccagtttgtcaatgaaccatttatcaatctttgtaatctcatgaatttcatcataagatacgccacggcgcagcgcttctgcaataacccagattctgcggtcatctactacatgtaactgatcctgtaattcctcatcagaaaacttgctgaagtcataggataaaagactgtctacatgctgctctaaggaacggattgctttcatcagggcaccttcaaagttattgcagatactcataacttctccggttgctttcatctgtgttgttaacgtacgttttgcagtgatgaatttatcaaatggaagtcttgggatttttactacgcagtagtctaacatcggctcaaaacttgcatatgtcttgccggtaattgcattcttgatttcatctaaggtataacccagcgcaatctttgcagcaacttttgcaatcggatatccggttgctttggatgctaatgcagaagaacgggatacacgaggattaacctcgataacacaatattcgaaggtttccggatgcagtgcgtactgtacgttacatccaccggtaatatttaattcggaaatgatattaagtgcagaagtacgtaacatctggtactctttatcacctaatgtctgggaaggtgctactacgatagagtctccggtatgtacaccaaccgggtcaatgttttccatattacatacagtaatacagtttccattggcatcacgcattacttcgtactcgatttccttccagcctgcgatacaacgttctaccagtacttctccgacacggctcagacgaagtccgttggataagatgtcgataagctctgtctcattatgtgcgattccgccgccgcttcctcctaaggtataagcaggacgaagtacaaccggatatccgatggtattggtaaatttgataccatcttctacattgtgtactacctgggatggtgcacatggctcaccgattttttccatggtatctttaaatgcctgacgatcctcagccttaaaaattgtctcagcagttgtaccaatcagattgacaccatgtttctctaagaatccggattctgctaactccataccaaggttaagacctgcctgtccacctaaggtaggaaggacgctgtccggtttttcttttatgataatctgctctaatacttttgcagttaatggctcgatataaacttcatctgcaatatccttatccgtcataatggtagcaggattggagtttaccagaacaacttcgattccttcttcttttaaagaacgacatgcctgtgttcctgcatagtcaaactctgcagcctgtccaatgacaatcggacctgaaccaattactaatacttttttaatatctttattcttaggcattatttcgttcctcccatcatctcaataaaacggtcaaaaaggtaagcagaatcctgtggtcccggacatgcttccggatggaactgtacggtaaaaatgttctttccgacatactctaatccttcgttggttccatcgtttacatttacaaatgccggttttgcaattttctcatccagtgtattggtatctactgcataaccatggttctggctggaaatgtatacacggttggtctttaaatccttaaccggatgatttcctccacgatgaccatatttcaaatgatatgtgtccgcaccggttgcaagtgccatcagctgatgtcccaagcagattgcaaaaatcggtgtgtcggattcatataatttgcgaatctctgcaataatctccttgcactccttcgggtctccaggtccattacttaacatgattccgtccggattcgtgcttaaaatttcttccgctgtggtgtgtgccggataaacggtaacttcacagcctcttttatttaatgactgggcgatgtttctcttagcaccaaggtctaacagtgctacttttttgccctttccaggcaatacgcttttctcttcacaggttactttatctaccacatttcctgtggtgtaagcctttaattttggaataatctcatccagattgtaattctcatctgttgtaatcattccattcattgttcccttttcacgtaagagcttggttaatgctctggtatcaattcctgcaattcccggtatatcgtattttttcagaaaatcctgaatggttccttcacagcggaaattgcttggcattctggataattctcttacgatatatccatctacccatggacgtcctgactccatatccggtgtaattccataatttccaatcaaaggatatgtcattactaccgcctgtcctgcataagatggatctgtcagtacctctaaataccctgtcatcgacgtattaaatacgatttcactgatgacttcccgtgttgaaccgatgctggttccggtaaatacattgccatcttccaatataagaaaagctttcatttgttcaccctgtcctttctattcttccgatacctgcgcaaaaaaaaagagtcagtcatctctttttccttccttttgcataaaaaatgcaccaagcctgcacagtctacctaaattgtaaaaattctaccatatcgggaaggttttttcaacctttttcgcaaaacaaatagtcactaagtttgatgcatatttatccattttttatgcattttttctttttcttttatttgagtttacataaatatattttctgagaatactatttcaataactttttcaggagtggcagacgtttcccataaggtggatagcggaatggaatgtccagccagttgcccttttccatgatactcttttcccggctgaaggtctcatagctatgctttccgtggtacactcccatgccgctgtttcctactccgccaaagggaagcttttcattggacaaatgaataatggtatcattgatacagccgccaccaaagctcaccttggaaatcaccgttttctttaccctgctgtttcttgtaaaaagatacagtgccagcggcttctctttcttctgcaatatccggattacttctgccaaatctgaatatgcaaataccggaagaaccggtccaaaaatttcttcctgcattaccttacttcttcctgtaagtccggcaagaagcgtcggctctattttcagcgtatccgcatccattctgccaccggttatgatttcaccatcctgctctaaaagcattttcttaagacgattgaaatgtttttcattgataatctttggatattccggattcaaaagcggctcatcacgatacattttccggatgtagtgcttcattttgcgaagcaatggttcttttacttcctcctgtaccagcacataatccggcgccacgcagatctgtccggcatttagaaatttgccccagacaattcttcttgccgcccgcttaatgtccgcagttttatccacaatgcagggactcttgccgcccagttccagtgtaaccggtgtcagatgttttgctgccgcttccatgactacgcttcccaccgcaggacttccggtgaaaaagatgtaatcaaaacgttcttttaaaacagcttcatttactgctcttcctccaagaagcactgccacatatttctcatcaaagatttcccgtaacagcttagccagcactttcgccgaatgcacagcatattccgaaggctttacaacagcacagttacctgctgctatggcaccaatcagtggaatcaatgtcaactgtaccggataattccacggtgacataataagcacgctgccataaggctctctgtaaattgtgctgacagacggaaaatgcacgattggcgtgcctacccgcttcggtttgtcccactgtttcaaatgagctatcgtatcagctaattcccttcgcacaattccaacctctgtctcatagccttcaaagggtgctttcgccaaatccttctgcaacgccagtaacagttccttttcatgcctgattactgcttcttccagccgctttagcatggcaatgcgaaagacgagcttctttgtctctcctgtataaaaatatttatgctgtgcttctaagatttcctttatttctgacatttgtttctccctgccggttgatcctgtttcttctataaataatatcttctatattatataacattccggggctgtcgtatacactttctgacaacccagaaaggaagccgcatctctgcagcttcctttctggtttgttaatgaatatcttttttctataggagtacgattatttcacattaaatgctttcattccaggatataccgcgctgtcacctaattcctcttcaatgcggagtaactgattgcggtatattctgtaccagcctttggaagcttatagtatccttttccattttcactcttccacccggaagaatatttcttccggtgaatatggatattgccgtctccatattccaaaggagtcactatgattcacgtttagttagttgctactaacttcgtttattgtatactaatcaaataaaaagtgcaaggggcttggcgattcgtttttctcattaaatttttactgtggcgggttacatcttgagcatggtgtcaaacccatgttcttcgcctctgacaaagtcacctcatggtcactctttttcaaatacgagcagcctgccgaatgatattttgaaccggtgtctgtaatatgtaccataacggaactgctgtcactatttgaactgccggatgcatctgcagctatacctgcatcactgctgcctgatgacgtagtgctgtctgctgtggaattatttgctgtactatcactacttccggtcggttctcctgctttccagctttctgacggggagcagttccaggtgatatcatttccatccgatgttgctacaatcgtaccctgctcatcggtacggaacacagatttgcctgctgcccgcaaacggttcagcacctctgcatgaggatgtccgtatttattgccttcaccggcactgattaccacataagtcggtgataccttatccaaaaaagcctgacttgtggctgtcttgcttccatgatgcgctgccgcatagacatctgccgaaatatcaattccattatttaaaatgtcctcttccgctttttcttctgcatctccggtgaagaggaagcggttgttgccattctgcaccagcacacccaccgaccagtcgttcatatcatttccatagtctgcatttggcgccacaatggtaaaggttgctcctccaagggtataggtctctcctaccaccggataagtggtctgatagcccttggacttcattgcctgcaccacatcatcataggttctggtgtcatttgccacatccggcatgataattgtatcgcagtcaaatttataaattactacatccagtccgccaatatggtctgcatccgggtgcgttcctatgacataatccagtttctctacgccctggctcataagataggactgtaccgttgttcctttgtcattattgccggcatctatcagcatgtaatgaccatcacaagctatcaaggcagcatcgccctgccctacatctatgaaatgcacctgcatctgtccggcggaactgccatctgtcttataggtattactgatgactcccccggtaacaaaatcctccgtatcaccaccaggctctgtattgctttctgtctctgtttcagtctgtgtttccgtggcaacggaactttccctgtcaggcttttctttcttattatccgaatgattgccgattgctccggctatcatcagtacgaaaataataactgcaatccataatttcttgtttccggatttcgatttcattttcctaactcctccgtttttcttaaaatttcttttctattataatacatttggcaagaaaaaacagacgtaagggggacgtctgtttggatcctaaatttttaaattctgcgagtagtaaacaagtatactcgggcaacttatactccgcaaagtatatatttatatgtatttccgattttttttaataattcccttattggtaagtgactgtaatatagaacaaatatcatcttcttttatggtacacatatcacaagcgtctctatatttgcatgtctaacattatttgtcggagaacttttgcattttcactttctgccaacagcattgccatattaagaaaagccttaaaatcaaatattgctatttgaggtgttctattgctaatgttcccgacatttatgtcgggaacatcctgagctattacacaatccatgaattctttaagttttttccctttaaaatctcatatccatttgcagtaatttcatcagaattgtcgctaacatatctctcaattgttctcacatctacgttaaaatatgtagccaccattgattttgtaaatcttaatcgtccatcaaatataataccctgaatacctgtctgattttgaatttcattaacagctaaatcattattcaaaatattttgtctatcaatttgagaagttgttaaatcttttgacattctcacacttcctttgctttatatttacaaattacaagaaaatcttttgggcattccggctgtccgcctttctcagattttggcttattatagttctctctttctataatgccatgcttctgctttatctgtgcaatatacttctttatctcctcataagtagcctgtctacgctacgctccgcttcggtccgtgctgagcaaatgttccctgaacctttagcgcctctcagctaccgttaaatccatctcgtccatgtcaagtctcacattcacatgctacttcacctcatggagtttcgacaacatgcacaccgtctcaatatttccggaccatgggaacatgtccacacagcacatccgctccacctgatatcctctggcggttaaaacctctaagtctcttgcaagactggttggcttacaggaaatataaatcatgcggtctacgccatagcggataatcttctccaatgcctttggatggatgccatcgcgcggagggtccaatacgataaaatccggtttttcagtaatatcgtccaatacttttaagacatcgccggctaaaaattcgcagttttcaagaccatttaatgccgcattttcctttgcggcttccactgcctcttctactatttccacacccactaccttttttgcggcaggtgccagcatctgtgcaatggttccggttccgctgtataaatcaaataccaccttgtctgccttctcggtcagcgtatctccgatatagtcccttgcagtctggtaaagcacctctgctccaagagagttggtctggaagaaagaaaatggtgtgattctaaaacgaagtcctaagagttcttcgtagaaataatcttttccatataaaatctctgttccttcatcctttactacatctgctacactgtcatttttcgtatgaagaattcctgcaatgctgccgtctaaatcaagtttacatagtgcatctttcattccagccaacaattctttttctgaagatattgcctctgtcagaccatccagtatatgctctgcgcctgccgttacaaggtcaatcaggatctctttggtctttaccgctttacgcaccagtaaatgacgcagatatccggtatgccgcattctgtgataataggaaatctttttttctgcaaaatactgctgcacacagcttaatatcttccggtaatcttcatctacaattttacagtccgttaccgaaacaatatcataaaagctgccacgcttatgcatgccaagagcaagggggccatccttatattcatccccaaaagtaaattccatcttattacggaatccgaattcattcggacttgcttttacgccctcaaagctgtaagtttccgggtctactaccgcatccatcagtttcttcacctgctgtccttttaatgcaagctgatcttcataggataaattctgataagtacagcctccacagattccaaaatgcgggcatggtgcttccggcagctcatttggtgctttcttcaaaacttccagtaagcggccttcgccttttccctttcttaccttatttacagaaaaggaaatctcctgtcccggtaatacgttttttacgattacctgctttccttcttctacttttacgactcccttattcgggaaatccacatatgcaacagttccctgtaatacctgaccttttttcatacttacctcacacgaacaattcttttccagaaacacatgtcatccgcagcgtttccggcacactcagtaaaagggctgcatgatatcacacagccctttacatcttcacctgttaaattatgcaaatgataatgattatttctcttcctcgtcatcctcgtcaaagaaatcatcttcaaaatcatcatcgaaatcgtcttcaaaatcctccagataatctggtgcaaagaaacgatataatccataagcagctgcagcaactactacaacaataccaatgattgcaaaaattaaaccagcttttgattttttcttttcttccattatttcctctttctcctttttatgcaataattctgttactttgttcacatttgcggttaataaattctttaattcttccattttttccat

SEQ ID NO: 191 - DNA, 17716 bp, unidentified
  source 1..17716: mol_type = unassigned DNA
tcacaccgcaccaaaaacagtcgcgctatacggcgcaaggggggcattgccggtaaaaacgcggctttggccccgccacaggctggaggaggtgccgtcgctcagcagcttccaccgcccggcgggcaggggaacggtgcgggtggtgtcggtggggttataaaagacgcacagggcgctccacgccgcgccgtctccccagacggcgggcagtgtccagcccaccagcggctgctccagcgcaaagaactgcaaagcctccggggcgtgacggtcggtgctgcccagccggggaaaggctgcccgcagcgccagaagcccccggtagtagtccacaagggcgtggtactgctcggcgcggttccagtccagacggttcaggccgggggaggagcggtagctgttgcctacgccctttttggtgcgggcgaactcctcgcctgcctgcatgaagggcagaccgaagctggtcaggtagatgcccgccgccagccggttctgcgccagcgccacagtgtcccgggcggtgaactccggcttttcgtaccggacgcagagcagcttgtcccacagggtaaagttgtcgtgggcggaaacatagctcacgatctggctgggcgcgtggggcggcagacggtcgctgcggcaccatgccgccaccgccgcgccgatatcccagaagctgccgggcttgccctccacatagcccggttcccgggcatcgaagcagccgcccttgatggcgtcccgggtgtcatcgcagaagatgcccacccgctcgttgagcatggcaaggttcgctttgttggcttcgtaccggtgcagctggctggcaccgccctgccacggctcaccgtacagcaggatgtcccgcccgccgggcagggcatccagtgcggcgcgcaccgcgttgatgctctcggcatcgtacaggcccatcaggtcgaaccggaagccgtcgatgtggtactccttcgcccagtagaggatggagtcgatgaggtaccgccgcgccatggggcgctcgctggcaaactcgttgccgcagccgctgccgttggaaaagctgccgtccgcattctgccggaaaaagtaatagggcacggtattgttcaggggattttcggtgcggtaggtgtggttatacaccacgtccatcaccaccccgatgcccgctgcgtggagggcggcgatcatctcccggcactcccggatgcgcacctcgccccgggtggggtcggtggagtagctgccctccggcacgttgaaattggtggggtcgtagccccagttatattgccgcagcaggggctttgcctcgtccacgctgccaaaatcgaaaatgggcatcagctggacgtattttacccccagccgcttgaggtagttcaggcaggtggggtggatgccatcgccgtgcagggtagtgccctgctgggtaaaggccatatatttgccccgccacgccgggcgtaccccgctggcagcatcctgcgagaagtctcgcacgctcacctcccacacggcgcgctgtgccggggggatagcggggcgcacatcccgctcccacccggagggcgcggtgcgggcaagatctacgatcatgctgcggacgccgtttacccccaccgcccgggcgtaggggtcgccggtctcgcgggtgatgccgtttacggtaacggcaaaggtgtagtagcggccgtgctgctccccgggcagccagatgctccacaccccatgcgccccgcgcacaaggggctctgtgcccagcacggcgccgccgtctcccttgtggtataaggtcacggtaactgcttcggcggtgggtgcccacagccgcagacaggtgccgccgggggcgtagtccggcccaagagggccagtatagtagttttcgcggtggaagggtacgttttcaaacagtgttttccactgggcgggcgtttttgcggccatggtcagcttcattccttcttgtaagattcattatattcagtgtatcggacaacgcgctttttttcaagagggaatcccttgcaaaatgccgcgcagttcactatactggaagaaaaacaccgatggagggcagcaccatggcatataccgatgattgggaaagcttgatgaacggcgtgttcggcgcaggcggcaaactgaagttcggcggcgcacagccgcagccggaaaagccgcagcccgaaaaaccggcgggcagcagtctgccggatctgaatgcggcgctgctggaacagcaaaagcagctggacgaaatgctcaagcagcagaacgcccggctgaaagcgcaggatgccggggtgcagacggcgctggaggacagccgccagatgctgcgggacatggaagcggacggcctgctggcaaagggcacggcagacacaaagccggagcagctgggcagctttgagggccttgccgccgaggtaaaaaagaccgtcctcgggcaggatgcctttgtggacagcgtggtgcgggccatgcgccgcccctttgtgctgggcaccgagggcgcagccgcccgcaacgtgatcctgctgtggggcgcaccgggcacggggcggcactttgcgctggccgagaccgcccgcatcatggcggcgcgggggcttttgcagagcgaccggatggcggtgatggatcttgcgctttaccccgaccccggcgcggaaaagttgtttttgcaggacttgtacgctgcgctgcacgccccgggcgagatcgtggtgttcgagcactacgagagctgccaccccggctttctgcgcatcctctccgacctcgcggtcaagggcagtgcgcctttgtccagccggtatctggtcaacaaggagggcattctggtggaagccggcacggcgcttgcccccggtgcagtgagccgcatcgacccctgcggcaagtacctgatcttcttctcccgcaagggacgggaggcgctggcagataaattcggcgcgtcctttgtggcggcggtaggggatgtgtgccagaccgcccccttcaccccggaagcactcgccgcgctggcggcgcagcagctgaacacgctggcgcagcgggtgcacagccgtctggggctgaccctcaccgccggggcggaggtgagggactatgtggcggcgcagtgctccaaggaaaagggcgcagaggggctggcagactgctgtgagcgcattttccgcgccctgagcgagtattgtttgcagaccgatgcaaagctgtccggcacggtggcgctgaccgccgcgcccgaggggctgcaatttgcgctgaacggtgccgccccggcagacctgttcagcctgctgccggcggcctacaccggcgcggtggagcagatccgcgccgaactggatgcgctggtagggcttgccccggtcaaggagtatgtgttcggtctggcagacaatttacaggtgcagcagcgccgcgcggcggcgggcttcaagaccgcaagcctgtccatgcacatgatctttaccggcaaccccggcaccggcaagaccaccattgcccggctggtggcaaagtacctcaaggccatcggcgcgcttaagggcgggcagctggtggaggtgacccgcgccgaccttgtggggcgctacaccgggcacaccgccccgctgaccaacagcgtcatcgagagcgcactggggggcgtgctgttcattgacgaagcatacagtctgtaccgcggcgagcaggacagttttgggctggaagccatcgacacccttgtaaagggcatggaggatcaccgggacgagctggtggtcatccttgcgggctacaccaaggagatggaggtgttcctcaccgccaacagcggccttgccagccgcttccccaacaagatcgagttcccggactatacggcggacgagctgctggacatcaccgccgtgctggcaaagggcaagggctaccgccttgccgagagctgcaccttcccgctgctggggtactacaagcgccgtcaggcgctggacagccgcaccgccggcaatggccgcctggcccgcaacacgctggaaaaggccatcttcaaccagagccgccgccttgtggctgagcctgccgcagagcttgacctcatccagcccagcgatctggaatttgaagaataaagaaaacatcatgccggacagcctgcgggctgtccggcatgatgtttttacggtcagaacctttcgttctgcaacccgtccaatacttcgtacagatcgcggcactcggcggtgtacagacggcgcatctcgtcatcggcgggggccatgtccggcaccatcacggtgataaaacgcccgttgaaaccggcgcgcacgccgttgtagctgtcctccagcacaagggtgcggccgggctgggtacccagcgcttccgctgcccgcttgaagatctccgggttgggcttagaggccgagaactgctcgccggagacgatcaccttaaaatagtgggtcagaccccagccgtccaaatggtgccgaatggacgtcatccggctggaggaagccaccgccatggggatgtgctgcgcgtccagccatgtcagaatttcgtccagcccgggctttttgggcggcggtgcctgaaacgccttttctgcctgtgcgtgcagcgcctcaatgatggcgtccgtgtcgcagttttccccgtagaagcggcgcagcaccgcccgcatggtgtcccctgccgtgccgcgggcggcaacgtccaacccctccttataagaaagcccgagggtagccagtgccggctcccacagggtcgcccagacccgctcggtgtcaaacatcaggccgtccatatcaaaaataacgccgtcgatcatggcagtatctccttccgtagaaaagcggggctgtgccccgcaaagtgctctgtgcccctattgtatcatagatttggcagtttgcacaccactatgctcataatttggtgcaacttaccgggtggaaagatgaaacattttgtgattccttgcaaaaccggctgggaatattataatagaaaccaacatttgtgtcataaagcgccggaaatcgtgcgcacgcgcataaaaggaaagagggaaactcactatgttggatatcaagatcacccgcacggctgcgcccaaggcaaagcccaccgatgagacgaagctcggcttcggcaaaaagttctccgaccatatgttcgtcatggattacaccgagggcgagggctggcacgatgcccgcatcgtcccctacggcccctttgaactggaccccgctaccgtggtgttccactacgcacaggagatctttgagggcatgaaagcctaccgcaccgctgacgacaccgtgcagctgttccgcccggactgcaacgccaagcgttttcaggattctgccgaccgtctgtgcatccccaagatcccggtagaggactacattcaggctgtcaaggctctggtggatgtggaccgcgactgggtgccccacaccgatggcgcttccctgtacatccgccccttcatctttgccaatgatgtgggtctgggcgtgcacgcttccaagcactatatcttctgcatcatctgcgctccctccggcgcttactacgccgagggcatcaaccccgtgcgcatctacgtggaggacgagtatatccgcgccgccccgggtctgaccggctttaccaagtgcggcggcaactacgccgcttccatcaaggccggcgagctggccgaggagcagggctacgcacaggtgctgtggctggacggcgtggagaagaagtacgttgaagaagtgggcagcatgaacatcatgttcaagatcgacggcaaggtgtacaccgccgccactgtgggcaccgtgctgcccggcgttacccgccgcagctgcatcgagctgctgaaggactggggctacgaggtcgttgagggcaagatcgccattgccgacatcatggctgctgcccgtgaaggcaagctggaagaggtgttcggcaccggtactgccgctgtcgtctcccccgtcaaggagctggtctggaagggcgagcacgcctttatcggtgacggcaagatcggccctgtcacccagaagctgtacgacaccatgaccggtatgcagtggggcaagctgcccgataccaagggctggatcgtgcctgtggaaaagaaatattgagccgcctgtcaccctacggctttttaagggactgttgcacaccgtctggggcaacagtcccttttgcatcaccgcagatgccgttcaccgtcacggctcctcccgtgaaaaggcaattctggaaaatccgcagattttccagaattgcgaaattataaataatatttccgctgatgatgcgcagagcgaagcggagcgcattctaaatcgtcctgccgcgcctttgcgcataaagattgcaattcccgccgcatggtgctacactacctataaagggcgtgggcttgccgcctgtgccctttgcaggaagatttgagaggaaagaagcaccatgatcaaaaaatggagcatgagttacccggcggtcaacggcaccgagcagcgccgggtgtatgtctacctgcccaccatgtacgaagcacagccggagcgccggttccccgtgctgtatatgttcgatgggcagaacgtgtttttcaacgaggatgccacctacggcaaaagctggggcgtggcagattatctggactataccgacaccccgctgatcgtggcggccatcgagtgcaatgccggggcaaacaacgagcgtctggtggagtattccccctaccgtttcgatgaccccacctacggtcactttgacggcaaggggcaggccaccatgagctggttcatccaccggttcaagcctttgatcgaccagaatttccgcaccctgccggacagggcaaatacctttatcggcggcagcagcatgggcggactgatgagcttgtatgccctgctgcagtataacgatacctacagccgcgccgcagcactgtcgccttccatctgggtggcaccggataagctttccggccttgtggggcgtgcaaagctttcccccggcacggtgctgtacatggactacggctcccgggagatgggcaaccacgatggcatccggcgggaattttccaacttgagcggcaagctgatgacccggggcatccacctgaccagccgcatcgtgcccggcggcacccacagcgaagccagctgggaaaaacagctgcccttcgtgttccacaccctgctgtatgaggtagaggagtaagagaagggtgtattgccagctgtaaagggggcacaaaagccttcaccccttggggggaaggtggcgcgtagcgccggatgaggggtaatttcccgctagctgctgcttgcccgcgccctcatcagtcacctgcggtgacagcttcccccgaccgggggaagcctttgtctgccgacaccatagcacgacaacatcaaaggaggaaacaccatggagatgcagtatttcaaggagtacagcccggaactgggacgggatatggagtgcaaactttacggccacgccggccgcccgatgctgtatattccctgtcaggacggccgttttttcgattttgaaaacttccacatgaccgacacccttgccccgtggatcgagtccgggcagatcatggtgctttccatcgacaccatggatcaggaaacatggtcggacgcacagggcaacccctactggcgcatccgccgctatgagcagtggctgcgctacatcacccgcgaagccgccccgatgcttcagcatctggcgcagcagcgcaacggctggagcgacctgcccggcatcatcgccttcgggtgcagtctgggcgctacccacgcggtaaacctgtatctgcgccgcccggatatcttctgcggctgtctggcgctcagcggcatctacactgctcactacggctttggcgactacatggacgagctggtgtacctgaactcccccgtagactacatgaagaacttcccggaggatcacccctatatgcagctgttccgcagccagaaggctgtcatctgctgcggtcagggcgactgggaacagccggacaccacatggctgctcaagcgcatctttgaggcaaagcatatccccatctgggtggacctgtggggtcacgatgtcaaccacgactggaactggtggtataagcaggtggcgtactatatgccctacattctgggccagcagtgacccatcccgtgaaaatggcacaacggcgcgtccatggacgcgccgttgtttcccaatattaaagtctgtcccgccccgcaggggcttttgcaatagaggtaacggaaagaggaatcaacaaatactatgcagaactttatttttatctcccccaacttccccacgaactactggcagttctgccgggagctgaagaacaacggcctgaacgtgctgggcatcggcgaccagccctacgaggagctgaagcccgaactgaaggcaagcctgaacgaatactacaaggtgaacagtctggaaaactacgacgaggtgtaccgcgccgtggcctttttcaccttcaagtatggccgcatcgactggctggagtccaacaatgaatactggctggaacgggatgccgccctgcgcaccgatttccacattaccagcggcttccagacctctgatatgccccgcatcaagtacaagagcaagatgaaggaatactatcagaaggccggtatcgccaccgcccgctaccacatggtggatgaccttgcaggctgcaaggcctttgtggaacaggtgggctacccggtggtggtcaagccggacaacggcgtgggcgcttcggatacgcaccgcctttccagcgacaaggagctggaagaatttctggcctacaaggagaaggagcacccggatgtggcctacatcatggaggagttcgtccgcgccgaggtgaacagctacgatgccatcatcgacgcccatggcaaccccatctttgaggcaggcaatgtgagcccggtgtccatcatggacatcgtgaacaacgatgacaactccatctactacatcatcaaggatctgccggaggacacccgcgccgcaggccgtgccgccgtcaagagctttggggtgaagagccgctttgtccacttcgagttcttccgcatgaccgaggatcaggccagcatgggcaaaaaaggccagatcgtggcgctggaagtcaatatgcgcccctgcggcggctttaccccggacatgatcgactttgcccgttccaccaacgtgtacaagatctgggcggacatgatcgccttcggcggcaccgatatgccggtgggtgagcactactactgtgcctttgccggccgccgggacggcaagagttttgtttacagccacgagcagctgatgcagaagtatcaggacaatatgcgcatggtagaccgcatccccgaggcactgtccggtgccatgggcaaccagatgtatgtggctaccttctccacccgtgacgagatggaaaagttctattccgacgtgctggccgtcaccgatgccaccaacgccaaggtgcagtccgagctgacgaaggtgctggctcttggtgaaccggagatggcagtagctgaaaagtaattgggagtgcgcggcgcaaatgccgtttgtcattacgacccctcctgtgaaaatacaatgccggagcgtccgcagacgctccggcattgttctattaaaaatagtttttccgctgatgatgcgcagagcacagcggagcgcattccaatcgtatgcgttatacctttgcagcgccacgctccagaataccgttgaagcgggagaagaaggtgatggtggtaatggtagccgccagaatatcgctgaccggctctgccagaaagacgccaaacaccgggtccggcagcaggtgcggcaggatgaagatgagcgggatcagcaaaatgatcttgcgcaggcaggccagcagcaggctgaccttggcctgacccagcgccataaagctctgctgacaggcgatctggaagcccatggcaaagatacctgccatgtagatgcgcatggaccatgtggtgtagtcgatcagcgccgcatccgaggtgaagatgcctgccacagcgcccggtgcaagcatcataagcagccagaacaggcaggtgtagcagctgcacagcagcagctggaagtggaacgcctccttgacgcggagctttttgcccgcgccgaaattgaagctcatcaccggctgaccgccctgacagatgccctgaatgggcagggtgcacagctgggaagcgctggtgataacggtcatggcacccacagccacgtcgccgccgtaccgcgccagactggagctgaagctgatggacagcaggctttcggtggacatcatcacaaaggtggagatgcccagcgccatcaccggcaggatgaccttcttttccgggcgcatacagtccttgcgcaggcgcaggatggtctttttgccggtgaggaagtgcaggatccacaccgcgcccaccgcctgactgagcacggtggcaatggcagcgccccgcacgcccagacccagaccaaagatcaggatggggtcgagaataatgttgatgaccgcaccgatgactgtggtaagcatactggtcttggcaaagccctgcgtggtgatgaaggggttcatgcccagcaccagcagcacgaacaccgagcccagaatgtagatgcggctgtacgccagcgcatagggcagggtggcgtcactggcgccaaagagccgcagcagggtgggcgctccggcgtagaacaccacggtcagcaccaccgaaaagagcagcagcatggtaaagctgttggagatgatcttttccgcctgctccttgtcgccctgtcccagcgcaatggcggtgcggggtgcgccgcccgcgcccaccagcatggcgaatgcgttcagcagcataaggatgggggtgaacagtcccacgccggtcagcgctgccgcgccgatgccggcgatatgtccgatgtaaatgcggtccacgatgttatacagcaggttgaccacctgtgcaacgaccgccgggatcatgagctgcagcatcagcttttttacgctgccagagcccatatcctgttttgcctgtgccatggatgtgattctcctttttatcgcaattttcaagaatagcgcctatcaaaacggcatatttgcgatatgcagtttgcggatgttgccaaggcattaaaaacgcaaactgctatacttcaaatttgaactatctcttctctattatactcaaaacccgcaaaaataccagtccctttttgcaaaattttccgtgctgcgcaaaaagctgaaaaccccgggactgctgcaccgcagccccggggtttggaatgcgaaaaagtgttgacgccaacaggcttttttgctatactatataaagtttatcatggagatgtatcgaagcggtcgtaacgagaacgactcgaaatccaagtggatgcttcgccgaatgtctccatatcacacgagggaacgtcaattttgatgtcctgacaggcttcaaagcctgtctgaacgatgcgttttctaacaatattctaacagcaactgttccaagtttcaaggccgatttgcgatatacaaatcgtaaatttgccatgaaaatatacttggagatgtatcgaagcggtcgtaacgagaacgactcgaaatcgttttgtccttaatcgggcacgtgggttcgaatcccaccatctccgccagaagtcgcagattcaaacgaatctgcgactttttcttttgcatcaagcagagaaagaccgcttctgcctcatcacagtatgctttatgcatgaacgataaatccataattatttggggagtttggattctcccaaaaggttcgcaatgaccccagcagacccctgtttgcttttgtaatcgagatgtgcgtagatgtcagcggtggtagaaaaggtactgtgccccagccactcctgaacctgcttcatggatacgccgttcatcaccatcaggctggcacagctgtggcgcagatcgtggaagcggatgcggggcaagctatacttccgaagcagccagtcgaagtgctccgtcacgaagttcggacggatcagcttgccttcctgatcggtgcaggcgaaatccagatactcggtgctgtaactcttcttgaacagcttacggtaaagctgttgtttttccttctgcttcagaagttcttcttccacagccgggatcagcggcagagtacggcagctggtcttgttcttcatcacatcgctgaccacaggaacgtacttgccgttcaccaactgttccgtcaccttgtgattgatggtgatggacttgcgctcaaagtcgatagacgaccacttcagcccaagcacctcgctgcggcgcaggccatagtaggccgtaatgaggatgcacaggtgcagggggtcatcctgcgatacttccagcagctgctggacttcatccttggagtagaagttgggccggaagctgttcttcttcgggcggtcaactttcagcatcgggttggtttccagatagtccttgcggacggcatccttgaatgccttgccgaagatggcgtggtagtgaatgactgtgttggtggtgtagccctccagcaagatcttctcctgaaactcatccagcacctgcggcgtgacctcacacagcttcaagcccagcggctcaaaatactgcgtgatgcgcccggtgatcatccgattgtagctgataaaggttgcaggctggatggatgccttgtggacttgcacccactcgttgagatagtccagaaacaacatctccgacttgctgacgggttggagatgctgcggcaagggcttggcggttttagcatctactttttcgtaggctccgccccgccctgtgggcagctccccggtctcatcatagtggagcaatacttcccggagcatggattctgccttgcgcttgttgccccggacggtcaaacctgtggagatccacttgatcttccgcttgccgttggcatcataaagattgatcacgaaatagaaacgtccatttttctcttggacagaccctgtagttttcatcataaacctcctttgggtcaacaggcgtgctgtccgttgctgcacccacagcataccacatccagcggcggatttccagccgggaaggtgctctgtccggtgagcaggaactcgatcacactcagcttcgggatacgataggtgcggccgattttaagcgcaaacaggcggcgggaacggatcagttccccgaccgtgtggcggttcaaaccaagcatctccgcagcctgctgaaggctgatggcatcggggtaaccgggaaacatctgggaataggcatcgttaaacttcataggcactccttctgcataagtagtttaaggtcaaaaagtgtgtcatcctttgcagcaaggctgcgttcaggtgacaatgtaaagagagctggcagtagttccaactctcgcatcgcggatagacttgcagcccatctgcgtcaatatgatataggtctcccatattcgccctcggcaccctaggagtggggaatcgtccggcagcggattcacaccgcaccattggcatttcagccaccccgtcttcgttatgaccgggctgcgagttacagaagtaccttttgtgaagtaccggacaattgaactattctgttttcaaggagccgatttttatagaaaatcctcggaatttagggcttccgaaaaatcatccccctaattggtaggcatcgagaaaggccaaaaatcaccctgaaaaagaaatttgttaaaaagtttttgaaaaaatatgtaggatgcccgttctactaaatttgaaaaagagcctctcacttactagctcacgggaaagcccaaaagacacccataatttcgaaagttaacaaaaaagtcacaaatagatatatggattctattgccttataagccaaaaatcagattcattcaacaatcgtgcgcaaatgctgcctaactgtgttgagatttttgaattatccaccgagctttcagtaagatgagagaagtgtattaagcactgcctcctcaaaacatttttaatgcgtttttcgtcccgctgccaatttttcactgtgtaagactaccactggtaatcctttttctgtataatagggtacgaggaaatagaactaggtggagacgctttgctacttatttgttaaagtcttccacaaaatattttcggcaaatttttcgctatcagtagcatcaagtgagtcagagtgtacagacacggttgctttcaaccatcgctgtacagggaggtaaaaatgctggagcagaaaagggaactggttcaacagcacatcaaaacccatacggagcgttcagaagaagatgtagcggcggttaatacgctcaacagttttttgtacgcggaaggaaaaatcaatacagacttttcatccaacgataagtggccgaaccatgacggtacgcttgaatttgtgccggaccccgatctggatcgccgcccgaagcaatgcttctatgtgcagataaaaggaacaaaaaactataccccaaaggacggcgctataaaatatctgcttccgaatctggcctttcccgcatttatctgcaacgaggcaacacgtgaccccggccttctttttgtggtattaaatccgaaggaacgaggaaaaagacgggtgttctggcgctatatgtccgttcagttccttaattccatcgatttttcaaagagcagctgtacgataacattttcccctgagagtgaaattctggacaccgatgaaagcgtcaatgcgttttgccgagctttggaccacattgcggatcatcatgcatatatcaacacgctgcggacggatgattataccgtcgagaatgtcatccgactgataaaagactgcgatgaacagattgaagagtatctcataaatttttccctccagaagcagacgcgggacaaactgtccatgcggcttcttacacgcatgaatgatttgagcgcggcggcattgctgctgaacagcctgaaacagacagcgggcgcaacaagcatccgtctggcgtgggaacaagcacttctggaccggaacacaaaatatctgagcgatttttatcagggaatgcaattggtgaatctgcatatcccagaagaaggccagtcagaacggctaatgctcaaatactatgattttctgtggagcattcgggagtttttgcaaagagattacgacctttccgttctgaaggaattggaaaaatttccgctgcgaatcaacacgctagatcaagaatattatgccatggccgccgctacggttcagcagagcgatgatgccaagagttcgtggagcaatgtgcggtactatgtgcaaaagcaggaaccgttttatgtggaaggaaagcgttactatgaggtgacgctgcaattgaccggtatctatgcaaccaaatacaatcgtgttacagtttataccagagagcgcatcacaacgtattattccgtacagattaagtacatcaatacttttctcaccctgtgggatgtgacatcgcccatcaaggtagtcacccaatggaaagtatccatcgatccgcgctgcctgaaccgactagcggcgattctgaaaatgccggcaaagctgagttcaaactatggtgaataccgcgaactaatggattttctgacgaaaactggtcttagcctgctggatctgattgacctgaaggagattaatttttctgaactgctggacaaggtttatgaaaaaactaatacccatatattccgggaaatcattaccagactacacgatgactatcggcgggaaaccgcgaagctgggcgggaatgtgattcgctatctcctgctgcatctgcgggaggaaacattggaggcagtctaccctgtttaccataacaatacctgggcagcctgtccggaacttctgctctccaaaaagtgcgcaccgtttgacaagagcccatttatatctaatttggtgggcagtaaaacaaacgcactaggccttaccagcgtactgacccgtgccgtcggaagggaacgctgccacaaagcgtggccttatctgtacctgaaacagcagattgtacgcaccggggagctgtatttcccggcgggaactgaggcctttccgcagagagtggcggaatataatgaaagtctagatgaatgggagcaaaatcagggatacgagattcgaaaaaacaaggacggactgtattatatcgacgcctatgaaaaatcaacgctcagtattcttaaaagacttttatccgtatcgcagtgcaagaacaatggtcaggaagcgttcaatgcacactttctgcgcgagaatgaagcctcttttaccgatccgctcaaggtaaaagcagtgaagaatgcctttgtgcagtcgcggctgttgctaatctatggtgcggcaggaaccggaaaaaccaccctgatgaattacctttcggatctgatgagcacaaagaataaactatttctggccaaaacgcatacagcgctgcaaaacctgaaacgaaggatcaacaatccgggcgcaggagcggtgttcagcagcattgaccgctttgcgcggcagagagagcagccggactatgacatcatttttgtggatgaatgcagcaccatcgataaccgtacaatggagctgtttcttcaaaaaataaagccagatacgtttctggtgctggcaggagatatttatcagatcgaagcaatcgagtttggaaactggtttttttatgcaaaggacatcatccagaccgatggtgcaatggttgaacttctggatacttggcgcacaaaagacgcaaccctcaaggatctctggagcgaggtgcggaaccggagaacattcattaccgaaaaacttgtgattaacggcccgttctcggaggaccttggcgagaatgttttcacacagctggcggaggacgaagtagtcctctgcttgaactatgatggaaaatttggtctgaataatatgaacaattatttccagagtgccaatcccaacaaccctgcctatatctggcaggaatggcgctataaggttggcgatccggtgctgttcaatgagacccgacggttcccctctctgtacaacaacctgaaaggccgcatcgctgcaatccagaaagaggctgaccggattctctttacaatggacgtagagcgctttctgaccgaaaacgactgccggaatgaagaaattgagtttgttcaaagcactccaacaggcacacggatacgtttttctgtttatgcctacgaggatagcaaaacggaggacaacgaagaactgcgcaaaaagacggtggtaccgtttcagcttgcctatgccatttctatccacaaggcgcaaggtttggaatatgatgctgtaaagataattattcctagcagcaatgcagaaaaaataacgcacgggattttttatacagcaatcacccgtgcaaagaagattttgaaattatattggagttcagaaacgatgcaagcggtcatagcaggcttttcagaacagcgcgcaacgccaagaagtcttgaatatatcaagcaggaactgggagtctag

SEQ ID NO: 192 - DNA, 6848 bp, unidentified
  source 1..6848: mol_type = unassigned DNA
ttatttaccctcgtatgctgcctgaatctcttttttgaactcttcctcgcccactctctgaagagtaagtctgaaacgctcaccaccgtttgcatgcttctcgaagaaactaattgctgcatctgtcactctgaaaagagtttccttgtcgcggataatcggaacaagctgctctcctttatagatgtggtttccaaaaagtcctccaaacgatacgatatatcccggagttcccttccatgcatctgtcggacagctctttacgcagcgcgcacagttgttacatttgtctctgtcgatgacaatcctgccatcctccatcgaaagtgcaccctcgcggcatgccttcacacatacaccacactggatacaatcgtcatggctgcactctactgtcatgccgcccttgattccgacatcgttttcctcagcctttaagcagttgttctgacagcctgtgacaccaaacttgaacttgtgaggaagctctcttccgaagtatctttcatcaagttccttagccagagtgtatgtatcgatacatccgctaggacagatttctgagccctgacacgctgtgacagtacgtactcttggtccgcagacacctgttcctacaccgccctttgccagttcctcttttaccacattgatatcctcaaccttgataaaaggaatctcaataccctgacgcgatgtcatatgaacatatccatgtccatatttctcagcaacctctgctactgttttgatattttctgctgtaagatttcctcctacaaccgcaattctaagcgagaaacagcccttttgcttctgtctcatgaaaccgcccttttttagggccgcgtaatcaactttctccgccatttttaatctccttactgtgtaaatatgttaatgttttgttttatatgtaaatgcatatgcacgctctcatttgcatacacattgataacttattatgatggcttaatcagctatatttgaaaaagcctgtgcaaaatcctccttgaggtcatctatatcctcgatacccacactgactcttataagatcctcaaatactcctgcatcctccttctgcttatctgtgctgtgaagactgattgtggagcccggatgaatgacaagtgtctttgtatctccgatattgctgagtgtgtatggaatcgtcaggctgtctataaatttaaatgccttttccttgctgccaaccctgattgtaaggattgctccatagccgtttgtgagctgtttttttgctatttcatgccatttgctgctacaaagccccggataattaacctttatgtcaggataattgttttctatccacgacgcaagctcgagtgcattagaacattctctttccattctaagaccgagtgtctcaagtcctataatatttaagtatgcattcaccggagctaaacaggcacccatatttctgaaaagactgtttctcagctttgcgacaaatgccataggtccatacttcacataatctgcaaaccccggatatctgttcttgtcccatttgaacttacctgaatctgtcagaataccactgattgcattgctgcttccattgatatatttggaagatgaattgaccacgatatcagctccatgctttaaaacctgtatcaggtaagctgtcgatgtggtattgtcaactacaagcggtatatcatgtgcgtgtgctatctctgcaagcttctcaatatctgtgacatccagacagggattaccgatagtctctgcaaaaatcagtctggtatgctcattgatgctgtcctctatctgctgccagttgttgttctcgacatatctggttatgatgccgaaggcctcaagatcatgaaataaatctattgtgccaccgtagagactggcgcttgagatgagctcatctccactgcttagtatatttaagaaggtattcatcaatgccgccatgcctgatgcgcatgccaccgatgctattcctccctcgagctttgttattctgttctcaaaagctgtaatcgtaggattggcaactcttgtgtaacagtagcccggagctttgttttcaaatattttttccagatctgccgcgctctcctgctcgaaggcgcttgtctgatataccggtggcagtgtagagccatttgtctcttttgtcacgccggcatgaagtaagcttgtattaaatctcattgttttcttcttctcgttaattcttacatagtctattgtgttactaggaattgatgagattattatacaaacgtgttggttgaaagtcaatgctatcagttatacaaattatttgtgcgtggttatatattttatttataatcattaatgtcccttaaatactctgcggctgtcgttgcggcatttgctccgtcagatactgctgttaccacctgacgcagtgtcttggtacggacatctcccgccacatacagtcccggctggacacttctatcatggtcaccattttttgttgcagcatatgtgatgccgtcctcacctgccactacatatcctctctcatcgagctgcaccagattctttataagctctgactgcggtactgagccatatgccacgaatactccgtctacagccagtgtcctgccacttttaagctttatgcctgtcggctttttttctccatatatttctgtcactgtttcgtttaggacaagttctacattttctttctgctttaagagctcaactgtgctctgtgcaccgcggaagctgtctcttctgtgaaccagatagaccttctcacatatatcggacagatataatgcatcatccaaagcggtatctccgccgcccagcactgcggctgtctttcctttatagaatgctccgtcacagattgcgcagtaagatactccctttccggtatactcatcctctcccggcactcctgcctttctcggatatgctcctgcggtatagatgagcgctcttgcctctgctatcgtgtcatcatcgaatttcactctgtatatcactgattcttctttctcaccattttgcactgcttctatctgcactgcttctttttcgataaattctacatcaagagacactgcatgctccctgaatttttctcccaggtcgtatccgtttatgtttggaagccccagatagttgttcacatttccgctctcggctatctggcctgtcccctcgtattctttttctgctactgccacattcagattggctctctttgcatatattgctgcagacagtcctgccggaccactgcctattattattatatcaaacatggaattggttcctttcatcgtccattgaattttttcggtaacttattatatacattatccttaaaaaatacaataataccgcctgcttttataaaacacctttataaaaacaagcggtatcaattttatctatcgtatatacatcctggcctcataaggtctgagcactgacatatcagaggtatccttataatttgaaatcagcacctccatgccctcacactcctttgcaagcggcattggtatctccttgtcaaagaaattgcacacaacaatcatggttttttcttcattctttctgctgtatgcaaaaatattctcatcatcctcaagtaaaagtgtgaatttaccatcaacaaataccggataatcctttctcagctgaacaagcttcttgtagcagctaaagattgaatcagggtcatccacctgtgatttggcatttattttgtcgtaattgtcatttacctttatccaaggtgttcctgtggtgaagccggcatttgccgagtcatcccactgcataggtgtccttgcattgtcacggccctttgcgtaaatggacttcatgatttcatcctttgagtatcctttttcaaggcgctcatggtacatgtttatgatttcacagtccttataatcctcgatatcatactgtacatttgtcatgcccagctcctcgccctgatagatgtatggtgtaccctgcatgccgtgcagcaatatagcaagcatctttgcagattccactctgtactccctgtcattgccccatcttgacacgatacgcggcaggtcatgattgtcccagaacagactgttccagccacagttgtagagctcattctgccagtgagccattatctttttgagctttttaaacggaagcggtgcaaggtcccatttctcgccgccctccttctggtcaagccctatgtgctcaaactggaacaccatagaaaactcgctgccatccggattgctgtaaagctttgcgcgctctgtgtctgcgccccatgcctcacccacggtaatcaggtcgcccttctggaatgtctccctgctcagctccttaaaatattcctgaagccttggtccgtttatggtgattctcttgtccggctcttttgctatctggtcgattacatcaagtctgaagccgccgactcccttgtccatccaccagagaatcatatcgtagattgctcttctgacctttggattctcccagtttaaatccggctgctccggtaaaaactgatggaaataatactgtccgatttccggcacatattcccatgcgcttccaccgaaacaagccttcatatcacttggcggcacgccttcatctccgtctctccagatatagtagtcatggtatggattgtccttgctctttttagcctccttgaaccacctgtgctcgtttgaagaatgatttaagacaagatccatcataatccttatattgtgcttctttgcctcgtttatgagctcctccatatcatcgagactgccaaacgtcggatcaatatccctgtaatccgaaatgtcataaccgttgtccgcctgcggtgatttgaataccggcgaaagccatattgcattgattccaagcgtctcaagataatccagtcttttgatgataccctgtaaatcaccaaagccgtctccgttagaatcctgaaagctctttggataaatctggtaaactaccgcctttttccaccatttttcgttattgtttttgctcattatgccctccttgtctcttcattatctcttttagttatctcttatagctgtctctttttgtaaaaattcagcctagtttctttaatgctgtatcaaattatgctattttacaagcaccaccaaaacctcacagctttcaagcttaagctcggatgctcccactgaaacagtgctcttttcagcatcatttgtgttggacaaaagcacctttttcacactgccatccagcctgatttgtgcctctttactaccaaaatttgccacaaccagcacgcgcttattttcatcctctctgtaataagccatgatgccatctgtatcctcatatgccggaacacatctgccataggtgaacagctccctaaattcttctgactttctgagtgccacaagccttctgtaatagttcaaaacagatgaaggatccttttcctgcgccgcaacattgatagccttatagttttcattgaccttaagccatggctttgctgtggtaaaaccggcatttgcctcatcactccactgcataggtgtccttgcattatccctgctcatccttccacaggctgcaagtgcctgctccttggataagcctgctgcaagtgctgccttgtactgatcctttgtgctgatatcgtcatactcatctatactgttccattttgcattttgcataccgatttcctgtccctggtatataaacggaattcctcgaagcagtacgctgacagttcctaacatctttattccggcaggattttgagcatgctttggtaaaaatcttgaggcacctctcggctcatcatgattttctatgatattggccttaaagccgtacttttctgtctcaagctgtgaaccaagaatggtctttctccatgtatcaaaatctattttcggtgcatcataccagccatgctctccatcacttaagcactgtgcacaaaaatcaaatatcgttgaaaaatgcccattctcaccgataaactccggaagctcctcaggcttcatattgaatacctcgccaaccgtaaatgcatcatacttcttaaatgtattgttctttaattcctctaagagctctccgacaccttctgcactttcaaccatcttgtagcaggcagccagtccgtcctctgcatccggctcaaaatcagggaaatcgagatttttctttatattgattatcgcatctattctaaatcctgacaagcccttatcaagccaccagttaatcatctcataaagcttttgtcttagcttttcattctcccagtttaaatccggctgctccttcgcaaacatgtgcagataatacttgtccgtgcccggcaccttctcccagcagcttccgccaaaataagagcggtaattgctcggcggattgccgtttttaccttttctgaaataaaagtaatcagcatactctccatccggatccttaagtgccttttgaaaccattcgtgcttatccgagcagtgatttattaccagatccatgatgatgtgcatatcacgcttctttgcctcggcaaggagctcatcaaactcctccatagtaccgaactcttcagctatcgcatagtaatcagatatgtcatagccctgatccacaaatggcgatttatatatcggagacagccatatgatgtcaattccaagcgattttaaataatccagctttgaaatgatacctcttaaatctcctattccgtcaccgtttgtatccagaaagctctttggataaatctgatatgccaccttgtcatgccaccattttctctccat

SEQ ID NO: 193 - DNA, 7612 bp, unidentified
  source 1..7612: mol_type = unassigned DNA
ttactcggccccctgattccttatgagccacgcaaaccctttcgctgtccggattccggcatctttgaagtgatttcccggattccattccaaaatcgttcggattttctgcatctttaacagattatacccttcccggatacagtcccctacggttgccatcagcggatttctggttctttcttcacggtttcccaagctcagatacaccgactttgctctcatatcgtattctttcatatattgcagaaatcccggaaaccagacagacggagatactgctgcaacacctgcaaagatatccgtctgatatgccgcccaaagagagaataatcccgccagcgaatatccaccgatataatacgtttttctgcgatccgcacattgtcctaaaagaaattgcagcagctcccccgcaccgtctccgaagccctctctgccaaagactgccgacgcctcccagggcgaaagatcccgattccaattgtccactttcaccgcaatcaactgaaagtctgcctttccctgttttctgatctcgtttaattccgtttccatctcctccagatcatgatcgcctaccggctgaatcagaactgtggaagcggagagatttccgtagtgaactatctgcatcgcgtcctccatttcttctcttttgcacccttcctacaaatacaccgtcagaaagagcaaataaacttgcccatcagaaaataatccgtactgacatccaaatttatcaagatagctccaccttctcagtcggccagaattttctgagtgccgcataggaaaccaggaagtttgcaagccagcctgccggcacagcaagccaaacgaaatcaatgccaaaacgcggtgcacagatcaatgccacggacaggcgaatcgcaaggtttaccatgttggcaataaggaatggccgcatgatcccgagtccgcgaagaactccatcggtcgccattttgattcccataaagagaaagaagtaaccaagccatctcatataatccccggacacctgataggccagggctgttccgtcttttccaaggaatagcgaggaaatctgtgtgtgcagcgtttcaataacaaggaaagcaagcgccgcgaagcacacatccaataccaatgctgcatggtagccttttttgatgcgctgggttttgtttgcgccaaggttctgggaaacatacggcgaaaccgcattcccgatggacacgaaaatcagggaaaaaacattctccacccgcattgttgccgcatatcctgccagtgcctgcgtgccgaagggatttaccaccgcctgtacaatcatcataccgatagacacggtagactgctggagaaccgatggaacagcaatttgaagcatggaacacagctcccgcccgtcaaaccaggaaaaggtactctgataccgccgcatccgattaaaaaaaatcaaaaaggaaagcacagccggaatgccctgtgcgatcaaagttgcaagggcggcaccgaacacgccgagccccagacctgctaccatccaaagatccatcccaatattcaggatggaggaaaagatcagcagccccagcggaatttttgattcaccgatggcggtgaacatggtagagagaatattgtacatgaacaaaaacggaaagcccacaaaatagacccgcaggtacagcactgcttccttcaaaatatcggcaggagtctgtaagcctctcatcatcccatgggaaaaccaaaagccaaagacacccaagaggatactcagaaccaaaaagctgatcagagatgtagacacaatggttttcattttgccatactccctggcaccgaaatagcggctcacaagcacacctgcaccaacaccagcccccagtgccacgcaaatgaaaacattggtcagagctgcacaggcaccaaccgccgccagcgcagaagaacccacaaactgaccgacgataatggagtcagccatattgtatacctgctgaaaaaagctgccaagaatcatcggcattgcaaaaaccgtcagcgctttcagcggcgtatcggtaatcaaatactcctcttttgacatgatcctatatcctccacaacttcctgatttttatctgactggatactctgtgtcagaaactgaccgtcccgaaacaaagcgtagatcgtgtccggttttgaccaggacctgacccaaccgactcacaggatatattccatctgccgttcctttgttttcatgcccattttttcgtagaagtgctctgccgatgtgtttcctgtccagacgttcagggttacttcatagcagcccagttcctttgcctgttgcttcacatattcaaacagactttccccaatgtgctgccctcgtgcctgcttgtcaacgcacaggtcatcaataaacaatgatttaaaggacaccatgttggtggaaaagggctgttccctgagctgacagaaggcatagcccatgcacaaatcgtcctcatctacggcaacatagaccggtttatcctcctgcttcaataattccgtcaactcacaaagagtatatttggtggtgcctggtataaaaatatccgggcggatctctgcatggatctgcaatacctgtcccaacagttcaagaattcttgggatatcctttttctccgccttgcgaatcttcatttcaaacttatctcctttacaatttcgatttttcaggtaaaaaatctccagttttgaccggtgtctgacacctgatttctgcggtcctcgccaccgggattttcccatcattttgaagctattttaccatcttataaaatgaaatccaacaaatttctgttagatttgtctattttgtacaatattagtaataattatcattattatttctacaggtaatatgagtcttttctcttttaaaatctgcccgacaggtatatactgaagctatcagcagaggtgctgaatttcaacgaaacggaggatacacagatgtcaaaattatatactattaccttaaacggagtaacggaggaggtttataacaaagcgacggattacatcgagaaacacgcgcttcgcttaaactacagaccggaggtgtccaccatcgacgccgagtttccggacgatatcgatcctgcaaagagccccgagctgcaggaagcgtacatccgcaacgtacagcagagactgtaaggttcggattctgacgcgggacgctgcatgcgcctgcaatgtgtgaaaacataccataaatttcgaaaaagaaaacctctcccgccggtttttcccgactgcggagaggttttttctggtatccaatagaatgcgcgctctgccatctttatccaaccttaatgcgacgtccccgtcccttatccgatcttaaaatctctggccgtataaaatataattatcacagaaataaggagctgcctttatgccaaagaaaatcatccgtcgaaagcaccgtctttcgtcttttcaaactatcacattagggtttgccggggtcattttgctcggagcgctgctgctgatgcttccgatctccacaacagccggatgtgtaacgccattcaatgaaacgctgtttaccgcgacctctgccgtctgcgtcacaggacttgttgttcaagataccggaagctattggtccggcttcggacagacgatcattctggtactgatccagatcggaggacttggcgtcataaccgtagcagcatcgtttgcgctgttgtccgggcgaaaaatctccctgatgcagcgcagcaccatgcaagatgcaatttctgcgccaaaggtcggcggaatcgtccgtctgacacggttcatcttgcgaggaacgtttttgatcgaactgctgggcgcactggccatgctgccggtgttttgccatgactatggatggcgcggcatctggatggcagtgtttcattccatatccgcattctgcaacgccggatttgacattcttggaacagaaagtaatctctatccatcccttaccggctatgccggcagtccgacaatcaatatcacgatcatgctgctgatcgtagttggcggcattggttttttgacatgggacgatgtctgtgaaaacaagtggcggcttcatcgctaccggatgcagagtaaggtgatccttgtcacgacaggtcttttaattcttttgcccgccgcgtttttctttttcaccgacttttccgcgctttctaccggaaagcggctgctggcatctttttttcagtccgttacgccgaggaccgcgggctataacacagtaacgctatctgcaatgtccggtgcgtcgcagggcataatgatccttctgatgctcattggcggttctccgggttctacggcaggcggaataaaaacaacgacactggcggtcttgcttgccaatactgccgcaacctttcgtcagcgggagaatgctcagtttttcggacgtaggattgatttcagcgctgtcaagaccgccgcaaccattctgacaatgtaccttacactgttctttggcggcgctgtttttatcagcgtgtatgaagatttgacgctttccgcatgcctgtatgaaacggcttcggcagtcggaacagtgggattgacgctgggtatcacgcctcagctgcatatcccttcccaaatagtgctgatcatgctcatgtatctgggcagagtcggcggtcttacgctcatttatgcagcgttttccggtaaaaaaataaacggcgcaaagctgccgcaggaaaaaataatgattggataaggagtctttacacatgaaaaacattttattgattggcgcaggccgcttcggacggcatatcgctatgcagttatctcagctggagcatcagatcatggcagtcgatatagacgaagaacggatcaatgatatacttcccttcgtcaccaacgcgcaaattggagacagtacaaacgcggagtttcttcgctcccttggcatcggaaatttcgatgtctgcatcgtgaccattggcggcagctttcagaattcgctggaaacgacgtcgcttctgaaggagcttggcgcgaagtgtgtagtgtcgcgtgccgagcgggatgtacatgcaaagtttctgcttcgcaacggagccgaccatgtgatctacccggaaaagcaggtagcagaatgggcagcaattcgatatactgccgatcatattttcgactacatggagatcgacgggcagcacgccatttttgaagtagaagttccacaagggtggattggcaaaagcgttggtgaactgaatattcgcaggaagtatggcattaacattcttggcatcaaacattccggaaaaaccgacgtttcaattacgcctgatacggtgctgtcaggagaaataaccattttagcgctgggtgaatataaggcgctgcaaaagtgtttccggatatgaacggacggtgaaacaatgtgaaagatgtcattttgatcgttgggatggctctaacgttcctgttcggatggtttctgatgaagcagctggatcgctttctgtacgaaaatcagaaacgaatccgattggacacaatagaaaccgccgccttttggtgctataataccatcaagaggggtggtgaaactgtgcagaacaatgaaaacaatctatcaaaagagcatattctggtgtgcctgtcctcgtccccatccaatgaacgtattgtacgaatggcaggaaaaatggcgcaggcattttgcggaagccttaccgcgctctatgtgcagactcccggatactctggcatgaacgcagaagatatcgctcgactgcaggcgaatatacgtcttgcgcagcagcttggtgcagagatcatcacaacacatggagaagatgtaccaacgcagattgcagaatatgcgcggctctccgatgtgaccaaaatcgtaattgggcgcagcggtgtgcagcgacggcatttctggagcgaaccgacgctgacagaacagctcattacgcttgcgccggagatggacattcacatcattccggatgcggaggtctataaaagctatcccaggaaaccacttttcgccgttcgcccggcgcttccaaccgcccgggaactgcttctgactgtcgggattctgacagccgctacgatcatcggatggttgtttctgcggcttggctttgcggatgccaatatcatcatggtttatctgctgggtgtgcttctgacctccgcttttaccagcggatatacctgcggcgtgctgtccgcctttttgagtgtcatcttgttcaattattttctgacagaacccaggctgtctttggtcgcctatggaagcaaatatcccataacctttgccgtcatgttcatggctgcgcttttgaccggtacacttgcagccaagctcaaagcccacgcgcagctatccgcacgggacgcttatcgcacaaagctgctttttgatatgaacaggcagcttcaaaaggcggaaacgtctgaggaagtttaccggatgaccgcaacgcagatacaaaagctcatgcagcggaacatcctgatttatccggcacaggaaggcgcgctgtccaaagggatcctttacccggctgacgcaagctgcccctatagtgccccggacacagacccggaacaggatgtgatcgactgggtctggcaaaaccggaaacgtgccggagcaacgacacaaaactttcccaaagcaaaacgactgtatcttgccattcgtactgggcagcaaatttacggcgttgtcgggattccgatggaaaagcaaacgcagcctgacgcatttacattcagcgttctgttctcccttctcggtgagtgcgctctggcgctggacaacctgcgaaatgccagagaaaaggaagaagctgccgttcttgcaaagaacgaacagcttcgcgctaatcttctgcgttcaatttctcatgatctcaggacaccgctgacctctatttccggcaacgccgacacactgctgcatagctatgacatgctggatgagcaaacacggaaacagatttttacggacattcatgacgatgcacaatggctgaccgagctggttgagaatttgctctccattacgaaaatcgctgacggcagcgtcaagctgcgtctttccgatcaggttgtggacgatattgtgtctgaagcgctacggcatatcgaccgaagatcgacagaacatcacatcacggtggattgcggagacgtgccgctgctgatacgggtggatgcaggactcatcgtgcaggtgcttatcaatctggtgaacaatgcagtcaaatatactacggctggctctaacatctgcatcacggcaatccagcaaaaaaaagcggttgagatctgtgtcagcgataacggccctggtatcccggacgaactaaaggagcgtgtttttgaaatgttctttgccgggggaaatccgattggcgacagccgccgaagcctcgggcttgggctcacgctctgtcaagccatcattcatgcacatcatggcgaaataacgctgaaaaacaattcgccgcatggctgcatcttttcctttacattaccacttagtgaggtgaacttaaatgaataa

SEQ ID NO: 194 - DNA, 5492 bp, unidentified
  source 1..5492: mol_type = unassigned DNA
ttatatactggtgtcttcaaacttatacagctcccatcctccggctttccgacggaagtacaggatgttggagaaaccgttgccgatacctttcaacgcaagaatcttcgttgtcgagttatcatcgtttctctgtccgtagttgatattggagagacgttcggaaggaagttccggtttgaaggcaaaccattggtcccggtcgagcgttgtctccaaaatggagaagtagtcatccggatcgcaggtaacaaaaatcaacggttcgcgtatgcgccgactctggaaaaggctgtcgacggcaaaacggccgaagaactccacaaagtcctcattgtcgtcctgctcgataggacgcaaattgatggcttccagcatccacgctcctttgatgcgttcaaagtaatactttttcatcatccgtgtcttcacgaatatccactccacttgcacagaggtaagcgcagtatctcctactaaatccatatcttcttctttatcaaacaggagcgtatagtaatgctgcttggtaaataagtcgtcatgcttccaacggtgttcgtcgatgttcagcttcttgtctccattgtagtagggcaacggaaacttcacacgctgacgctgcaacacgtcgtcggaggcaaaattatagatgaaatcgtcgaaagactcgtcggcctgtataggctgcggctcttccggcaattcttcctggtggactgaatcggttttgtaccggatggaatccacctcttttgtaatagatgcgaaggggtcaatcttagctttcttgtttccacaggaactcagcataccgagcagtatgacccctgcaattagttttttcattattttaatttctctcgtaacttttcaagcatatccaccgtcatgctttccaaatcgtaggcgggcttccatccccactcttcgcgagcacaggtgtcgtccagactgtcgggccagctatcggctatgcgctgcttcaaggggtctatttcataaaccatctcaaactgcggcacgtgcttcttgattgcctggtatatcgtttccgggtcgaaactcatggaagcgatattgaaagcattgcggtgtatcagtctttccgactcagcttccatcagtgtgatcgccgcgttcagcgcatccggcatatacatcatatccatcaaagtgccttgcttaatggggcacacaaacttctctcctttcactgccgaatagtaaatatcgacagcatagtcggtcgtacctcctcccggaggggtcacattcgaaataatgcccggaaaacggacagcacgggtatcgacaccgtatttattaaaatagtaatcactcaataactctgtcgttactttagtgactccatacatggtacggggacgttgaatggtgtcctgcggtgttttcgtgtgaggcgtactagcgccaaacgaaccgatagaactcggagtaaacactgcgcacccttgttcacgtgccacttccagcacattccacaatccatcgatgcctattttccaggccagcttgggtttcgactcggcaactacggacaacagagcagccaaattataaatcgtatcgatgtgatactcttttactacagatgcgatcgcttctccgtccgttacatcagcaatagccgacggtccggactcctttaattcccctttaggttctgcacccggaatataacctgctactacatttgcatttccgtaacgtttacgtagctccatcgttagctccgaccctatctgtccggtagctccaataatcaaaatgtgttccattttttcttctgacttagaatatcaagcttaaatagtgcgcaaagtaagcacttttttttcagattttaatcaaaaagacattgttattccaagaaaaattgtgtcctttgcaatataacttaatcacataaacaccatgtacggtaaaatgcaagaattcctcagccagacactggctgaaatcaaggaggccggactttacaaagaagaacgcctgattgagagtgcgcagcaagctgccattacagtaaaaggtaaagaggtactgaacttctgtgccaacaattacttgggactgtccaatcacccccgattgatcaaggcttcccaagagatgatgaatcgccgcggatacggtatgtcgtccgtccgttttatctgcgggacacaggatattcataaagaactggaagcggctatttccgactatttccagacagaagacacgattctatatgctgcctgcttcgatgcgaacggcggggtattcgaaccgctcttcaccgaagaggatgcgattatctcggactcgctgaaccacgcttccatcatcgacggcgtgcgtctgtgtaaagcgaaacgctatcgttatgccaatgccgatatgaaggatctggaaagatgtctgcaagaagcgcaggcgcaacgtttccgtattgtcgtgacggacggtgtgttctctatggatggcaatgtagctccgatggatcagatttgcgatctggccgagaaatatgatgcgctggtgatggtagacgagtctcactcggcaggagtggtaggcgccaccggtcatggggtcagcgaattgtataagacacacggccgcgtggatatctacaccggaacgctgggcaaagctttcggtggtgcgctgggaggatttacgacaggccgcaaagagattatcgacctgttgcgtcaacgcagccgtccgtatctgttctctaattcattggctccgggcattatcggcgccagccttgaagtattcaaaatgctgaaagaaagcaatgcgctgcacgacaagctcgtagagaacgtgaattacttccgcgacaagatgaccgctgccggatttgatatcaaaccgacgcagagtgcgatatgcgctgtgatgctgtatgatgcgaagttgtctcagatttatgctgcacgtatgcaggaagagggtatttacgtgaccggtttctattatccggtggttccgaaggaacaggcgcgtatccgtgtgcaaatctctgcaggacacgagaaggctcatctcgacaaatgtatcgctgcctttatcaaagtgggtaaagaactcggcgtattgaaataaaactttttcatatcttccattgttattatcggggtgcattagaagtgccgacaagataacaatggaagatttttttatttatatatggaagaattgactctcacgactcctgcccttcttttctcggcagtctcactgattttattggcttacaccaatcgtttcttatcgtacgcacagcttgtgcggcagttacgcgaccgctatatggagaatcctacggatatcacggtagcacaaatagagaacttacggaaacgtttgaatctgacccgcaccatgcaaggactgggaattgcgagcctgtttctctgtgtggtcagtatgtttttcatttatatcggactgcaactgctgtccgcctatgtattcggagtggctctgctgttgcttatcgcttcattgggcgtgtctttccgcgaaatacagatttccacccgttcgctggagatttatctgggaacgatggagaaaggaaagaataaagacagaaaatgacctgtaaacaaaaaagagggtgtgtcgaaaccctcataaactaaaaggggagttttgacacatcccctttcataacttttatttgtagcttattaagtatgtgtaacttattaacgctgtcccaattgtgagtctacaaagaaaattccggtatcaccggctttcttgattttgtcaacaatgccttgcactgtagcttcttcttctacttgttcgcgaacgaatccccacaagaaatcctgtgttgctttgtccttctcagcagcagctacatctaccagtttgtctaccaattgagaaacatggcattcatgtttgtaaacgtgctcgaatacttccagcggactaccccaaccgttaggaacaatatctattttatcaactttagcggttcctccacgtttgataatataatctgccatagcataagcatgcgccatctcttcctgagactgcttcttcatccaatgggcaaaaccactgaaaccttctttctcgaaatagaaagacattgccaaatacaggttagcagaccacatctcagcagtaatctgttcgttaattgcattttgtaatttttctgaaatcataatcgtatcttttattaagttgttaatgtagtttctttttgaactcattacaaaaataacaagatttcagttcagattgttccatgtaccccgtatttttaaactacattcacactttgattgtagcggtttattttttatttacaccagctcgtcggaagtatatcctttcggaagctcacgacagttatagccggaagccattatttcaccgtatgcaccggcagaacgaagggctatcaggtctccacgcttgactttgttcagatcaatcgcctttccgaaaacatcggacgactcacatatcggacctactacatcgtacgcttccatcggttcttcggaggtcaggttttccatcttatggtatgcctgatacaaagccggacggatcaaatcggtcatacctgcatcgaggatggcaaatttcttcttggctccttgcttcacatacagcactttagatatcaacgtaccgcactgccccacgacggcacgccccaattcaaaatgaagtgtttgataaggacgcagtttcagttgtccggcataggtggcaaaataatctttgaagttcgggatagcctgacggttgggatggccgtaatctatccccagaccaccaccgacatttatatgttctaccagaatccgatgcgcttccaacttgtcctgcaattcattgacacgattgcacaaagcgacgaaatcgcccatatcgagaatctgcgaaccgatgtggaagtgaaggccgataaacttgatattcttcattcccaaagccacgtctatcactttatccatatcctgcatactgataccgaatttattttcggcaagaccggtagtgatattggcgtgagtatgcgcgcctacatccggattgatgcggaaagcgacattggctattttgttttgagcggctgccagctcgttgattacttcaagctcgggaatagattctacattaaaacagaagattccatattctaatccgagattgatttcccagtctgctttacccactcccgcaaaaacgactttattggccgggaatcctgcacggatagcggcacggatctctccaccgctcacacagtcggctcccattccgctttcacggatgatggcaagtaccttcggattggcattcgctttgacagcatagtgtactgaataattaggatatttggcaacctcatggttaatagccgacaatgtatcacgcagcactttggtatcgtaataatagaaaggtgtctgcaaagtgcggaattt

SEQ ID NO: 195 - DNA, 9119 bp, unidentified
  source 1..9119: mol_type = unassigned DNA
ttacttattgttcttcttctcgttctcaagcttcttcatagctcttaccttaagtgaaagaccgaagaggttgatgaatccgtcagcatcatgatgatcatacatatcacctgtcttgaatgatgcaattgactcattgtaaagtgaatatggagatgttgttcctgccttgatgatgttacccttgtaaagtctgaacttaacttcacctgttacatattcctgagtcttctcaacgaatgcctgaagtgcttcacgaagaggtgtctcccactttccttcgtaaacaacctgtgcaaacttgtttccaacatccatcttgaatgttgttgtatctctgtcgagaactaattcctcaagctgctgatgagcttcgtaaagaattgttccaccaggagtctcatatacaccacgagacttcataccaacaacacggttctcaacgatatcaatgataccgataccatgcttggcaccaagtctgttaagctctctgataatatcagaaaccttcatagccttgccattaactgactttggaacacctttttcaaatgtcatagtaacatattctggttcatccggagcttcctcaggagtgcatccaagaactaataaatgcttgtagttaggctcgttagctggatcttcaagttcaagaccttcatggctgatatgccagatgttacggtcacggctgtagctgcagtctgtgctgaatggaagatgaataccatgctgtctgcagtattcaatctcatcttcacgagactgaagcttccagttagaatctctccaaggagcgataatcttgatatctggagctaaagccttgattgtaagctcgaatctgatctggtcattacccttaccagtagcaccgtggcagatggcaacagcaccttccttacgggcaatctcaacaagtctcttagcgataagaggtcttgccattgaagtaccaagtaaatatttattttcataaacagcgtgtgcctgaacacatggaacgatgtagttgtcgcagaattcatcagtgatatcttctatatataacttagcagcaccacatgagagagctctctgctcaagtccgtccaactcctcttcctgaccacagtctgcacatacgcagacaacatcatagttgtatgtttcctttaaccaagggatgatggcagttgtgtcaagtccgccagaataagcaagaataactttttctttcattatatattcctccgtatattattaagtttacatagtaaaacacatatgctatgcacctgcagattataataaactactttatttaaaaatgcaacaacaaattatgcatattatacatcaatatgcaacaaaaatgtataaatataaattttctttaaaatatcctttacataagaaaaaaagttgctataatgtaggttatcaatttacattttgcgttattttatgcataaatgttgaatatatgcattttgcttcgcaaaacaaggaggagttatgattaaagtaggcattatcggtgcgacaggttacgcaggtaacgagcttgtcagattattattaggacataaggatgcagagattgtatggctcggttcgagaagttacatagatcagaattattcagatgtatatagaaacatgtttaagcttgtagatgcaaaatgtatggacgacaatatggagcagcttgctaacgaggttgatgttatatttacagcaacaccacagggcttatgtgcgtcacttgttaatgacgaaattctttcaaagactaagattattgatctgagtgctgatttcagacttaaggatgttaatgtatatgaacagtggtataagcttgagcataaagcaccacagtatattgatgaagctgtttatggtttatgtgagattaacagagacaaggtaagcaaagatacaagaattattgctaatccgggctgttatacaacaacatcaattcttacactttacccaatggttaaggaaggaataatcaatccggatacaattataattgatgccaagagtggaacttcaggtgcaggacgtggagctaaggttgccaaccttttctgcgaagttaatgagagcatgaaggcttatggtgtcgggactcacagacatacacctgagattgaggaacagttaggttatgcatgtggaagagatgatttaaagcttatcttcacaccacatttggttccaatgaacagaggaattcttgtaacagcatatgccaaccttgccaaagatgttacatacgaagatgtcaaggcagcatatgacaagtactatgataaggaatatttcgtaagagtacttcctaaagatgtatgccctgaaacacgctgggttgagggaagcaattttgttgatataggatttaagattgagccaagaaccaacagacttattatgatgggagcgttagataatcttgttaagggtgcagcaggtcaggcagtacagaatatgaaccttctcttcggacttccagagaatgagggattacagcttgcaccaatgtttccataataaatgtacaataggaggatgttatgaatataattaaaggcggtgttacagcagctaaaggattcaaggctgccggatgtgaagcacagattaaatataagaacggaaagaaagatatggcacttgtatacagtgagaagccatgtgttacagcaggaacatttacaactaacaaagtatttgcagctcctgtcaaatgggacagaaacattgtatataatgaagactttgcacaggctgtagttgtaaacagcggtgttgccaacgcatgtacaggtgttgaaggagataatgcatgtgcagaagaagcaaaggcagttgcaaaggttcttaatgtaccagagaatgcagtacttatcggttcaacaggtgttatcggaatgcagcttcctgttgacagaatatgtgcaggaattgaaaagcttgctccaatgcttgatgattcatttgaagcaggaacacaggcagcagaggcaattatgactacagatacaagaagcaagcaggttgctgtagaagtagaagttgcaggtactaaggtaacaatcggtggtatgtgcaagggcgcaggaatgattcatcctaacatggcaacaatgctctgctacataacaacagactgtgatatcgacaaggcacttcttcagaagatgacaagtgcaattgttgatgattcatttaacatgatatcagttgatggagatacatcaactaatgatacagctcttgttcttgctaatggaatggctggcaataagaagattacagaagagggtgctgattataatgctttctatgaaggcttaagctatgtatttacagagctttccaagatgattgcaggtgacggcgaaggctgcacatgtcttttcgaggttcaggtaaagggtgcaacaactaaggcagaagccaagacactcgctaagtcaattgttacatcaagtcttaccaaggcagcaatattcggacatgacgctaactggggaagaattctctgtgcaatgggatattctggtgctgactttgaccctgaaaaggttgatatattctttaagagtgaagcgggtgagcttcagattgttaaagatggaactgctacagattacagcgaggagaaagcaacggaaatactttcacagaatcctgtaattgctattgcggatgttaagcagggcgatgcaagcgctacagcatggggctgtgaccttacatttgattatgtcaagataaatgctgattacagaagctaatctgacacagcattttaaagcaaatagatatctgaataaatatgaaatggagattattatgagcgcaaaagatatgacagaggaacttatgaaggcacaggtgcttgttgaggcacttccttatatccagaaatttaacagaaagataattgtagttaagtatggtggaagtgccatggtagatgaagaacttaagagaaaagtaattcaggatgtagttcttcttaaacttgttggttttaagccaatcatcgttcacggcggtggtaaggaaatcagcaaatgggttgaaaagtcaggcatgacacctgaattcaagaatggtttaagagttacagacgagccaacaatggagattgccgagatggttcttaacaaggttaataagagtcttgtttcaatgattgagcagcttggtgtcaaggcatgtggtatcagtggtaaggatggcggcatgttaaaggttgagaagaagtattctaagggtgaggatataggatatgttggtgaagtgacagatgttgacacaacacttattgaatccttgcttaaggacgattttctcccagtaatatgccctatcggatatgatgatgattttcatgcatacaatattaatgcagatgacgcagcatgtgcaattgcaagagctgtcaatgctgagaagcttgcattcttaacagatatcgaaggtgtatataaggattttgacgataaggattcacttatatctgagctttctacttcagaggcgagaactcttttagagagcggaacaatcggcggcggtatgcttcctaagcttaataactgtatagatgctattgagcatggtgtatcaagagtacatattcttgatggaagaattccacactgccttcttcttgaaatatttactaacaagggtgttggtacagctattctttcagatgatgcagaaaaattctttgactcagataaataattgcgaaccgtaagctttgaggttataatattatattggctcatgtgaaaatgtgtgctcataagaataggaaagtgagagtaatcatgaatacacagcagattatagaaacagcagaagagaagctgattcatacatacaaccgttaccagatagtacttgataagggtgacggagtaagactttacgatacagatggtaaagaatatcttgattttggagcaggtatagcagtatttgcacttggttataacaataaggaatataacgatgcattaaaggcacagattgataagcttatacacacatctaattatttctataatgaaccggctgtagaggctgcaacagcacttacaaaggcttcaggaatggacagagtattctttactaacagtggtacagaggctattgaaggtgcagttaagcttgcaaagaaatattattatgtcaagaacggaaaggctgatgcagagattattgcaatgcagcattcattccatggaagaagtatgggagcacttgcagtaactggtaataagcattatcaggaagcatttggacctatgataccgggaattaagtttgcacagtataacgaccttgacagtgtaaaggaacttgttaatgacaaaacttgtgctataatatttgagacagtacagggtgaaggaggaatttatcctgctactaaagaatttattgaaggtgtaagaaagctatgtgatgagaagggaattcttcttatacttgatgagattcagtgcggaatgggaagaacaggaagtatgttcgcattccagcagtatggcgttaagcctgatatccttacagttgccaaggctcttggctgtggagttcctgtaggtgcatttgcagcgacagaggaagttgcgaaggcattagttccaggagaccatggaacaacatacggtggtaatccacttgcatgtgcagcagcaaccaaggtgttcgaactttttgagaagcagcatgtattagataatgtcaaggaagtatctgcttactttgaagaaaagcttgatgagcttgttgagacaatagatgttgttgtcgagagacgaggaatgggacttatgcagggacttgagttatcagttaatcctaaggatgtaattgcgagagcacttgataacggacttattctgttctcagcaggaactaatgttataagatttgttccaccacttgtaatcactaaggcagatgtagatgaatgcatagctaagcttaagaaatccttctagaatcaggagtttactttatgaaattaagaagatttatcagtatgatgctgattgttaccatgctgacagtctttgcaggctgtggtaataaagatgacaggacacaggctgcgaggactcttaatcttgatggacctataacagttaatgtatggtttaataacagtgattatgagccttatcttgaatttgttgccaagcagtttaagcaggctaatgaacttgttaccatcaatcctgtatatgtcgaagcagattcatatataaattatatatatgatgaatctgttcgcaatgataatgcatgtgatttgtattttctgacatctgaagagatagagaaagcatatcttatggggcttatgtccgaaaatgatatgtatcctcaggtgtacaatgaggatgtgtttggaaaggctgcaatgacagcctgttcatataatggcaaattatatggatatccggtatcatttaatacatcatttcttgtatataataagaagtatgctgaacctgtagaaacaattgatcagattagacagattagtgataattatcaggtgactgatgagaatcaggatgtatcaatggtatttcaatgggcaccaggttcaatgtttcttaattatccggcttgtgggaaatatattaatataggcggcaataattctgaggacagttcttcggtttctgtagatggagattctataaagaaagcacttaaaaaatatgctgagttaaacagtgcatttggaacagacagaaataatacaagtcttgagacatgtgtggatttgttttcaacaggaaatctgttatatacaattcttgatgcagacagtatatctaagattgatttatcagaaatagattatggcatatgtaaatatccttcaatggggaatgatgttgaatcaaaagcaatgtcagttactactatggctgttgttaatccatacactaagaatgtagatgcatcgaaggctgtagcaagagctatttcttatgattatgcagactatatggagagtactgctaaaaaaagctgtgcaagagctgatattaaggttaagagaaatgtagaaaactataaagcaattcatgatatttattcagactctgtggtcaaagctaaatatattggtgttggtgaagtgtatatgagatatgaaattatgcttcatcaggtatatgacggtacaaatgtcgatgaagcatataattcatttgcagcatgcatagacagaatggcaaaacagacggaagcttcttcagtcaattcaggaaacagttcttcaaaataatgtataatattcctgctattaacttataattattctatagaaaacttatggaggttataagctgatggcaggttttttaattgcaataatatcaggtgcacttatgagtttacagggggcgtttaatacaaatgttacaaaagcaagcagtgtatgggttacagcaatgtttgtgcagttgacagcactggcgacttgtgcgattatgtgggtaattgacggaagacctgatatcatgaagctgtttaaggttgataataaggttacacttcttggaggtgtgataggtgcatttataacatttacagttattaaaagcataagtggtcttggaattgctaaagcggaggttacgattgtagttgcacagataattgtttcgtatctgctgggacttttcgggctgtttggaagtgagaagactacattttcatggattaagctcgtgtcgcttcttattacggttgcaggagtatgtatgttttattttcttggtaatccgtcaacggattaatatattatgaataattatgataaatgtcagaaaaatctggcaggaaggaacagaatggaagatttattcagcgtatgcggaaagatacgattaagaaaaggtgaaggaagaaccttaaaagcaggcggtgcctgggtatatgataacgaaattgaatggatgtctgacggaataattgacggacatcttgttgaggtgctcgattttgatgattatttcatgggaatcggatttattaacagaaaatccaagattacagtaagaatgcttgcaagacacactgatgttgttgatgaggcatttattgaggagagagtaagggctgcggttgagtacagatttgacacagtagatacctctgcctgccgtcttatatttggagaggcagattttctgccggggcttgttatagataagtactcagatgtgcttgttgtggaatcacttgctttaggaattgacagatttaagtcacttattgttgaaaaagtgaagaaaatccttcatgaaaaaggcattgatatccgtggagtatatgaaagaagcgatgccaaagtccgtactcttgaagggatggagagagtaaagggctttattggtgatgaatttgacactaatgttgagatagttgagaatggtgtccactacatgatagatgttgtgaatggacagaaaaccgggttctttcttgatcagaagtacaacagacttgcaatgcagaagctgtgcaaggacaagagggtattagactgtttcacccatatgggtacatttgcattaaatgcaggaattgcaggtgctaaggaagttactggacttgatatatcagaatatgctgttgaacaggcgagagccaatgccaagcttaacggacttgaggatacagtacattttaaatgtgcaaatgtattggatgagcttccaaagcttaacgaagcaggtgagaaatatgacgttgtaatacttgacccgccggcatttaccaaatcgagggaagctacaaagaacgcaatcaagggctacagggaaatcaatatgaagggacttaagcttgtcaaagacggcggctatcttgcaagctgttcatgctcacacttcatgacacaggagcttcttaccaagactattaaggaagctgctaaggctgtacataaaagactccgtcaggtcgagttcaggacacagtcacctgaccacccaatactgtgggaggcgcaggagagctattatctgaaattctttatctttcaggttgttgatgaaaaatga

SEQ ID NO: 196 - DNA, 12277 bp, unidentified
  source 1..12277: mol_type = unassigned DNA
tcagcggaacaatgcctccccgttcaccggttccccgttgtgggtcagagcaaagtatacgttgcttccttcggtgctgtagtatttcgtgggcgctgccacactgccgatggtgtcgccgggattcacataggaattctctttcactgtgatctccgtcagctgtccataagtggcctcatagccgtcacccagatccagggtcagcgccttgccgatctcctcattttcgaagatcgaagtcacttttccctgcgcacaggcggtcactgccgtaccttcttccgcggaaaaaatggtggcgggattgtatttatactgatccagtgtagcaaaataagtgctcttgtccatagagtaatgcatcagaatatcactctgcaccggttgctgtaatccgtcgctttctgcaaagtgcagtgtcttctcaacgaccacatccccacctgctgtctgctttcccccggtctcttccttttgtcggtcggcatcggaattctgctgctctttctgtgcggcctccagcagggtctcctgatccgtcaaccccggaatctctacgttgccggagcctacctcctggggcatatagtccagatcatcctcggtgacaggagttcccgcgatctcatttcccgctgtattatttgccgtcagtccggggatgttctcgtcctccttcagaagatgttcgtcgttattctccgtgatctcctgtaatttgtcatccgcattgttgggaagcgcagtgaagtccaaggtataaccatcatccctggactccacattctgccccttcatatagacccctgtcatggtcaatgctgccagtacaaaggctgaagaggctaacattataatacgttctttgttaataccgctctttttatttcttctcatatcctatccgcatccttcctgttccctgagtcaactgcctgctatacaatcgtttcaaccactttccctggtttatcctatagtcttgcccgattcatgggttttattcagaatgtcttcgatatgaaatttgcatttatttggaactattcagagccatgtaaatagcgtcgaatgtttgcattcgtaagaacatttgatgctatttatagggcgaagtaactgaatagttatatttattctatgcctgtgcggcataggcagccatatccacgtgctgtaccgtacccacatttccgttttcgtataagaaaataccggtcttgcggaccacagcattggtcgcattggcattggtagtgccgtcctgagccttacggtctccctgcagggtaaaatccgtagaaacgttttgcagacagatagcaccgacacccttgtcagaaagtttgtacagtacgtcgttgccgttttcatccttgcaccagatttttaattttgaccagatggaatcgttctcatcgatccagccgttgccatcctcatcatactgcgccagatctgcaaagccatccccattccgggtgccgaacagctcactgccgtcgttgatagtgccgtcaccgttcttgtccagtgccagatagccgctgccattcagcacggagatctcttcttccttgccatcggcatccagatcaaaataaaaggtctgatccgacacttctgccacatcagtatccaggttgatcaccagcggatcatggagcgtgaattctgctacattgagttgctctttgtagtattcctcgcatctgcggctcatatttacatttacattaaaattgatctctctgccatccttggtccgtacgcttcccacggtggaaaaactggtatcctcctgttctatgttccaggtctcgctcacatagttcaatattttcacacgggacgtgaccagattgaacacgtctgacgcaggtgttgcggttccctgtgtgctgccggaattcgtctgggtattatttacgctattccctgtattccagctgtttccggtctgattaccgctgctccatccgttttcctgcatccagtcccgcaaagtgctgttcctggacgggaataataaatcaaaaatataacgcaccgtatattcccggatggtagacaatgtctgttcactggcactgcttcgcatatcccatctggcagaagataccagaaaacgactctgccagtctttggctgtcatcgtggtgttctctgcagtgttctcctgttcctccgtgttctgtgtggtatcctcaccattcggtgtcttctgtcccttagtggatacatctgtcagacctgcctgataatccgttatctcaaatcgtctgacgcttgtcttagaagcgtgatagcttctggcggaatccattcctatgcttgcggaatcaattctcaaatctgtaattttctcctttccccgacctcaccacgaaccaacagggcgcgcttcctgtaacgcttaacagttcaccgccgcatgtattcataaaagcgcctgctccgcagtcgacgccgctaagcggctcatcttttatttcatacatgcggcgctccgctcatgcaatatcatatgttctgctttgtgtgccagcacccacgcagaacatatgatattgcatggctgaactgttaaactaaaaaagatggtaaagaaacagaatacatataatatgcctctgtctggttaccatccgtggtgtcattatcaaactgtaaaaaataagtagcaggaagtgactggccttgtcacctctctactacttatatcgtccgctatggacattttatttagtgttaatttactgctgtttgggctgagtgggagcgccaggggttccgggtgcgggaggcaccggtctgccggctgctttcagctttgctgcgatcatgctggctaccatttctctggtcaccacgatgttgccaccgaagggattgatcacgaatcccagcgccgggctgatattgccctgtgcatctttgcgcagcagcattcccgcataatcgtcaaagttcatggcgaaagtctgctgattctcctcatctctccacctttttagctctgtccagtcagtgaacgccatgaagaacttccgaccgtcctcggtggacagcatcgggaactgtactttggcatctcttgcgatggtcacccggccgttttcatcgggcacaggcaccggatcgatcacgaccggagacaggaactttgctttctgcagttcatccaggaacatctgtctgtgttccggggtgtcctctgcttttaataattcaatggatcccaccatcatggggttggataccggtttgttaaattccatattttttctccttacttctcattgtaactattcagcctctcttcgcgaaacgcatctgcgatggttcgtcacatgtctctgaatagttacactcggttatagttgatcaggcatcccttcaggatgatctgacgttcttcgtcggtcagctctcccagcttcagggtgaattccttcatgccttctccggttgttaccacatatgccttaatttcctcggccttgtcttccacggctttcttaataccaggaatgaacaggtaatccagattcttgaaaggcaggtctccgggctggatcaggaaaggaagcatgccccagttgatcaggttggaacgataacgcttggtggcatactcattggcaatatttgcccagccgcctaataccttctggcaggaagcagcctgctcacgggcagaaccgtctccgggcttcactgcgaaaatagtggaaccgaatccggtgttctcacgacttgcatcgggatactgtttctttacttcacccataacatccttcagtaccggaactgcctgacagggatgtccgccgttcatacgctctttctctgccttctggatctccttggcacgtcctacatactgcggatccttacggcttaaagtgaactctgccagtcccagaggattggagcggtaggaagaggtctcaccggatggaatcagctcatcggtagtagttacgggatcgtggatctcggatactacctgcagtaccagattctcaggcagggcacccatagcgggccagtccttgatattggggccgaactggatctctacgctctcgtctgccacaccgtgggaatcgaagacacggttcttgtaaatattgctatcgaaatgatatttgtattttccgaaatctccatcgaagtccgttgcggaagtcagcacacccttgttggctgcggtggctgcgatggaacgggcatccatcagagctacggaagcgatctggccgttctgcagcttggagccttcacggttcgggaaatttctggtagagtgacggatactgaatgcgttattggcaggtgtgtcaccggcaccgaagcagggaccacagaacgcagtcttcatcactgcaccggtctctaagatggtagccgcacagccgttgcggatcagctccatgtatacgggcatggatgcgggatatacgcttaaagtaaactcatccgcaccgatgtatctgcccttcagaatgtcggcagccgcacagatattctcgaatccgccgccggcacagcctgcgatgataccctgatctacaatgaacttgccgttctttactttatttttcagagtgaagtctaccgcaccgtccagacttactttcgcacgcttttccgtctcatccagaatatccatcaggttcgcattcagctcttcgatggtgtaagtattgctgggatggaacggcatggcgatcataggacggatcttgtccagatccacctcgatcaatccatcatagtatgccacctggccgggattcagttccttatagtcttcggtacgtccgtggatctcatagaactcacggatctggtcatcggtcttccagatggaggacagacaggtggtctctgtggtcattacgtcaatgccgatacggaaatcagcactcagggaagccacgccgggacctacgaattccattactttattttttacatagccattcttgaatactgcgccaatgatagccagtgccacgtcctgaggacctacacccttcacgggagcaccctttaagtatacggctaccacgccgggcatgttgatatcataggtctggttcaacagctgttttaccagctcgggaccaccctcgcccatagccatggtacccagtgcaccgtaacgggtatgggaatcggaacccaggatcatcttgccaccgccggctaacatctctctggcaaactgatggataactgcctgatgagggggtacatagactccgccgtattttttcgcacaggtcagaccaaacatgtggtcatcctcgttgatggtgccgcctacggcacacagggagttatgacagttggtcagtacatagggcatggggaacttctgcagtccggatgctctcgcggtctggataatacctacaaaggtaatatcatggctggtaagcttgtcgaaacggatcttcagcttgtccatattgccggaggtattatgctcctgcagaataccatatgccatggtgtttttcgctgcttcttctttggagatcgtaatgccggtcttcgcctgtatctgactggctgcttccggggtatccgctacgatgtccgtaccgtttaccaggtaagcgccgccctgtgttaactgaatcatgctcgtcctcctgttattccacttcttatgcgtaatgtgcatctaaatgtgcacttctttcattatactggattgttttctcagatgcaatgatcttataagatgtttttgccactgtaccacgctaaattttatttttctccgggaaccattcctcttttgttccggtgttgctataatatcctcagaaattatgccattttccgaaaatctatacgaaaacgacagttgtcggccgaattccggcggcagcggaaaggaaccttatgaatgtagtaatagctatcgattccttcaaaggaagtatgacctccatgcaggcaggtttgagcgccgccacggggatcaaacgtgtttataaagatgcacatattaccgtccgtcctctggcagacggcggggagggcaccgtcgatgctctggtaaacggctgtgacggccgtatgacacaggtgcaggtcacaggcccttccgggcaccccgttgtctgtccttacggcatcgtcgacgagacccataccgcaatcattgaaatgtccggtgccgccgggattacccaggtcagcggagaggaaaagaatcctctgaacaccaccacttacggtgtaggcgaagtcatcaaagatgcaatccagaacggctgccggcattttattgtcggtatcggtggcagtgccaccaatgacggcggtgtcggaatgctgcaggcacttggctttggctttctggataaaaacggaaatcagatccgcttcggagccaaaggactggaggatctggaatccatcactacggatcatgtgcttcccgaactcaaggaatgtactttccgcatagcctgcgatgtctccaacccgctctgcggagagcagggatgttccgccatctacggaccgcaaaagggcgctacttccactatgatcctgcagatggacaaatggctggcttattatgccgctctggccagagaacagtttcctcatgccgatgccaaatatcccggtgccggtgctgccggcggtatgggatttgcttttcttaccttctgcaatgccacactggaatccggtattaagatcattctggaagaaacccatctggaaaaatatatccgggatgcagatgtcgtgatcaccggggaaggccgccttgacggtcagacggttatgggaaaagctcccatcggtgttgccaagattgccaaaaaatatgaaaaaccggtacttgctttttccggctgcgtggccaaagaggccgttgcctgcaacgcagagggcattgatgcctttttcccgattctgcggaacgtggtatccctggatgaggctatgcataccgacaatgccatgaccaatatggcggataccgcagagcaggtattccgggcgcttcagatttttcaccgttaagaatcacaaaaggacatgacccaccggccatgtccctttgtatgtttcaatattgttttattattcttcatatccattcggattgttcttctgccatctccaggagtcttcgcacatctctttgatgccgttctcagccttccagccaagttccttctctgccagagaagcatcggaatagcaggtggcgatatcgcctgcacggcggggtttgatcacgtaaggaatcttcactccggtagctgcttcgaagttcttcacgatgtccagaacactgtagcccacaccagttcccagattgtagatcttcagtcctgcattctcctcaatcttcttcagagcctttacgtggccctttgccagatcaacgacatggatgtagtcacgtacaccggttccgtcgggggtatcgtaatcatcaccgaagacacccagctctttcagcttgccgactgctacctgtgtgatataaggcatcaggttgttggggataccgttgggattctcgccaatggtaccgctcttgtgagctccgatagggttgaagtaacgaagcaggatcacattccattcgggatctgccttctggatatccgtcaggatctgctccagcatagatttcgtccagccgtaagggttggtgcactgtcccttggggcattcctctgtgatgggaacaaatgcgggattaccgtatacggtagcgctggaagagaagatgatgctcttcacaccatgttttctcatgacatctaccagagtcagggtaccggcaatattgttctcataatattcccagggcttctgtacggactcaccgactgccttcagtcctgcaaaatgaatgactgcgtcaatctgttccttgctgaagatctcttccagagcttcacggtccagaatgtctgccttatagaaaggaaccttcttgcctgtgatggcttctactctggggatcactttctcacttgcattgcagagattatccaatacgactacatcatagcctgcctgctgtaattccactacggtatgactgccgatgaatccggcaccacctgttaccaaaattctcatacactctctcctatccgccgtgcataggacaatactatttgttcactatggcggctgcacaatctctcatctgtcagagccggatgaaattttttcttcgtttcttacagtatcagattactgtaattctatcgattcctcaataaccttatgttgtgaaaagctgtcgaaatgtttacagcaccacaccattctcggtgagaagttctctggcactttccacagagtccacaccggtcttgttcttgatcggcgcgaattcctttcttctgactacttcgaagggcagacagctgtccatctgatgaatcatatccagcaccagactctcgaatttataaccattgggagtatccggcttcaccggttctccgttctcatccagatacgggatcttcttctctacgatgtgcagtggcattttctcttccatgatcttctccagatcctgcactttgaagaggtaattcaggataactccgtaattatatgcaggatcgcctttttcatccttcgcattcatcagttcatcagtcagctcgtagtactccacgatggaaggtctgccgtcctccaagcacataactcctactttttcatccggtgcattcttacggaccaccttggagcctacgacacagcctctctggatcgtagcaccaataaagcagggatcagcgatccgctgcagtacattgtctaccgcaaacacattcagccactcaatgccttcgttatgtacgatatccagcatgccgttatttttcatggaaatgaaccagccgccgttaccgttgggagaggtggacagcttgcccttctcctccagataaatcttgccttcataatcggttgccgcagccatctcctgtttgaagaagtggacataatccgcgttgtatccgaagaaatcatgctcttttaaaaatgcgatcgttgcgtcattgttcttatcgctggtcatcacaaacaggtggatccagctgtctgcctgatgcacgacttccatcaggttattgatcaggcattcaaagatgtacagttcacgggtcagacccacattgtacatgcccttgggattatcggaacccagtctggtacccatgcctccggcaagaagaacagctgctaccttgccctgtcggatcgcttcgataccggttgcggtaaattcctccctgtttgcttcgatttcgtctaactgcatggcagccaacggtgtgatcactcctttttttgccagatcttctttatgcttgcaagcttccagaatgctcatatccgtagtttcgatctgattcagaatcccctgcttctcttcctcgttgagctccccgtaatacttcagaacatgttcctgaccatactttgcaagcttctccttagcctgttccagtgtcatactcatattcctacctccgttttattttctccgactattccaccccgggtaacagtcaattttctctattatacttgatatttcctgtgattgcaaaccttactcccgggatcgttcccgcccgtaagtcctgccgttaagattctgtaaacgtgttgcaaagattttgtaaatatcccgacaaaatggtgttaagggtcgctcaaaactattcacccgggggtatctgtttactataatacggtatgtgaagtttttaaggacttcatcgaatgttgtacagaatgacagaaagttgaggaattcattatgaatattggaattttaatcattgcaatcgtaggcggtgttaccggacttttatccacagcatatctggcagtcagtttccctgctgtgctcctgtggaagctctatcgcagagtagttcacagaattcctctcacccaatagtaatcagtcagctaccaacactttccctctaaaaaggacccggaagcttttgcccgggtcccttgtcgtatgtatgtattctattttattcctgcaccgggttccaattttcgtccatcaaggtcgcagttactgtaattccctccggtgcattttctgcgcagatcacaagatagaacattccttcttccgaatccacggcatattctgacggatcctccggcaaaaagacagaaaatccctccgggtactgctgcatctccagaaatcccttttccagcagtgcagttttgtaggcttcttttactgcatcccggtccccacaggagtacacctttattgaagtaaaagttccatcttcgctgtctgtctccgtacaatctgaaatcacagcatcgggatagataatatcctgctgcaccgctttcagatattccgttgacatccggacactctgtaagatctcaaaagtatcttttccatcctcggaatgcgccatgagtaccagactcaaaagcaaaatgagcagataacttcccagtgctcccgccagtattttcgcaaaaggattctctggctgccccagatttgtataagaagtgatgatccagccaaaatttcggtagtccactgcggtattacagtattcgcagactccgccgcccaaaatgtccacactgcctccgcagttggggcatttgtattcccggagtgccctgctgtgctgcgttaccacatcctgtctgccttccagttccagccggatctcctcataacggttccagatcttctttcctgtatccagtgtcaatcgggtcctcacttccacgctgattctgtaagactctccccgtgtctccgcctccagaaaacgcacaccgcaaatgcaacagtccaccacattctgataccgtaccaccaccgtatccagatcacaggatgcgaaaaagcgtacctgctctgccgtatccgccagatggatcattcgcagctggtattccagattctgaagaaaattacccgtggagaattccgggattgcggcctttactttcgattcgtcttgaattctcggctttctgcgagtctccatcacgatcaacattacaataaatataatgagcatgtaaaacaacgaccggaaaaataccggagccagaccaattcccagcatcatggctgcggctgcctttaccgcattgtatccgttcctgcccaacgccaacagcaaaaacataatgccgcccgcacagatggccagtaccgcaagagaaatcgctgtaattcccaccacagcaccggctttcataaagttggaaatacttttctgtcttgcgtcctcctccagagaaaatccggatacctttgtttcaaaatcactgacgagaaactttgccccgcaggcatcgcagccatcgatatagctggtcagttttccctcatgtccacagttagggcagataaccatatctccctgcacatccgctttcaaaaagctcgccactgcaatctccggtgtctttaggaacgcaatcttttttcccttgcggtaataagtccgtctcatttttaccggctgggtacggcggcagctataatcataaccatccttccagggaccatcatagtccgccagtcgtgccggctcctgcatctccatatccaccgtcagttcccgctgctgcagtctttttctgctcaggcgcagactttgccagaaaggctgggttgtctgctccatcaggttctgttccgcttccccgttgccctgatagaatgcttttaattccccgtagaagtcttctgtccgtctctcgatctctttccgtgcatcattcagaaactctgttgccatttcgtttttctctcctcataagtgattctgccgcgcaaaggtcctgatatcttttgtatcttatgtcccaactgctttgtcccatatagctatgtatccattatataagttggtacccggtatttcaagacactttcccgtatagaatgatttgtctcatcgaatatctagtgctggtgcagatacttctctctggtagccagtccgccgcggatatgacgctcggatttattcacatccaataccttccgcgcctgctttgccaacgccggattcacctgggccagccgctccgtcacgtccttatgtaccgtgcttttgctgatgccgaaggccttggcagtctgccgcaccgtggcgttgtggtcgatgatatagcctgctatccctatagctcgttcttcaatatagtctttcaa

SEQ ID NO: 197 - DNA, 13080 bp, unidentified
  source 1..13080: mol_type = unassigned DNA
ttattccaccgtaacactcttcgccagattcctgggcttatctacatccagtccctttgcgacactgacataatatcccagcagttgcagcggtatcaccgcaaggctggccatgaaatgctcgtccaccttcggcacatagacagcgaagttcacctgatcttcgatttcgtaattgccataggtagtcatgcccataaggtatgcacctcggctcttgcactccagcatattgcttatggtcttctcgtataactcgttctgcgtcaggacaccgatcaccagcgttccctgttcgatcagactgatggttccgtgcttcagttccccggccgcatatgcttcggaatgaatgtagctgatttccttcagtttgaggcttccttccagacaaacggcatagtctataccacgtcctacgaagaatacatcagacgcattggcatactttgcggcaaaccattgcaggcgctccttgtcttccagaattttctgtatcttctccggaatcgtcagcagttcggcaatataataaccatactgctcttctgtgatcttaccacgaactttggcaaactgcactgccaggcaatacattgctgcaagctgcgcactataggccttcgtggttgccaccgaaatctccgggcctgccagtgtgtaaaatactttatccgcttctctggcaatactactgcctaccacattgacaatggccatagtggtaatgcccttttcttttgcaagtcttaatgcagccaaagtatccgctgtctcaccggactggctgaccacgatcatcagtgccttcgggttcagggacattttccggtatctgaattctgatgcaagttccacacgcaccgaaatatctgccatgtcttccagaacatactgtgccgccatgcctacatgccatgcagaaccacaggctacaatataaatctgttcaaagcccttgatctcatcttcggtaattcccactgcttcgaaatctagcctgccatctttgatcacagaattcagtgtatcctgaactgctttcggctgctcatggatctctttcatcatgaaatgttcaaaaccggccttttctgccgcttctgcatcccatttgatttccgtagtctgcttctcgatttcatccccgtccaggttataaaaatgagcttctcccggagtcagctttgcgaactcaaggttgcctatataatacacatttctggtatatttcagaattgccggaacatcggatgccacataggtctccccatccgcaataccgatgatcatcgggctgtccttacgggctacccagatctcaccgggatagtcacggaacatcagctccaacgcataggatccgcgaatgcgcaccatggttttcgcaatggcatcaatgggaccgagtttatacttcttgtagtaataatccaccagcttgatcgctacctctgtatcggtctggctgtaaaatgtataaccatgcttcagcagtttttctttcagttccgtgtaattttcaatgataccattatgtacgcctaccacttccgattctaccgcaccggaaccggatctgctgcagttgccggagacatggggatgggcattgatctgactgggttcgccatgggttgcccaacgggtatgtccaataccacaggttcctttcaacgcatttccattgtccgttttctcgaccagattcgaaagacggcccttcgcctttactacctgtgccagggcatcgccatcgcggactgcaagtcccgcagagtcataccctctatattccaattttgacagtccgtccagaaggatcggtgctgcctgtctatttcctgtaaatcctacaattccacacatatgctaatacttccttatcattctaccgtgattccaccaagtacgggaatctccagtcgtttcagtaactctaattctgcaacaatctcattatacaaggtcgatcctgccttttctaccagaaccgctccctgggctgcacttactttctccatagcttcggcatcatacagcacgttattcagtattgtaacgctaaggtcttccttttccagagcagccttaagtccttcacataccttgtccgctccggcccccagattgcatcccatcagacagatactgttctgtccgttcttggcagctgctatctttatcgctgcgaatgccagctccatggactgctctgcagtaaattcgcgcttgccgtaatgtcgtaaaccgttaacccatctatccaggaacagctttttcttggaatcttttaccaccacgccaatctgaggaataccatatagatcctgcaatccatcgtttacacgaattcgactgttaaaaatataccccatacacaggaccgcagcatatataaaggcgaacaggacagctcccagcaccacatatttcttgcttaccgcaggattttccggaaccagctgctcctcttccacaatgctctgttctgcgtctgtcgtatcttccaaaccgttttccttcatcagaagcgtataatactgtttttggtcttctgaaaatgctgcttttgtagcggcaatggttgtttccaggccataaatcgaatttctgtaagctgtctgttgattcatcacatccatgttcattatgttgccagacacttcagaaagcaacaccaattcatgacttcccaaccgggtgttcaaattttcctgttgctgttctatataagtctttaccgcttctgcaattttcccgcaagactctgcatcgactcctcggattattattttcagactatcgcttcctccaatagtcaagggctccccattggtaagcgtcaaaccggaatccacgctgacagagaccagttcccctacatatgcagcttccagtccggtctgttgttctatccagtcgtacaatccgacactgtaaagggtatttctatagattgttcccaggcgctgagatcccttttcatctttttcctgaatattgtaaaccagttcctcctgtgcaacgttcataggatctaactgcatatagatagaatcctgcacatattgcttcttcaacgcacattcttttgcatcatcaacagtcgtcaataccaccgccagctgactgtcatccagactttctcttaattgtgccaactgttcttccatagccatctcaccctcagatgcatcttctgcctcctgtggctgcatattctgtgcattctgataagatctcgtatagctgaatgcccccataagaatcgctcccaaaactactgctatcagcaatcctctccaatgtgacaaaatatctgctatcatatccagtaaatcaatttcccgttctttcattttttctttgccctcctgtattccatgattcgcttctgtcattccatactaataattcattttcctacaccggttcaaaaaatgtatccggatgtcccggatcaaatatttcattacaggtcataacggttatcagattttccgtttcggacagatttataatactatgggaccatcccggtatcatatacactgcctctatccggtctcctgacacttcaaattcgatcttctctccggtgttgatattccgctcctgtatcagtccgtgtccggatactacaatgaactgttcccacttactattgtgccaatgctggcctttggtaattcccggcctactgatattaatggatacctgtccacaattcaccgtgtgaatcagttctgtaaaggagcctctcgaatcctcattcatcttcaactgatatttgaatttttccgtcggtaaataagtaagatacagggaaaacaatttctttgcaaaagaaccctccggcatttccggcatgagtaacgacaccgactgttgcttaaattcctgtagcagatccacgatctcgcctaaagtaaccttatgtgttgccggtacacagcaataccgtccatcgtctttcagtacagtatcaacaccgtcaaactcgcaacgctgctccttaccttccatgaggtcaaacataccttctatcagatcgtctatgtacagtaattccagttctgttgccctgtcgtttactgtaaattcttcatcgttcgcaacagcccaacagaaggtactgaccgcagaattatacttcggtctgctatgtcccatcagattaggaaaacgatacacggcaactttggcaccggtctctctcgcatattgaaagaaaagctcttctcccgccttctttgaacgaccatattcggaatctccaaatcttccagccaatgttgcctgaatggaagacgacagcatgattgtcgctttattctcatactttttaagcgtatccagaagcttcgatgtaaatccaaagttcccccgcataaagtcttccgggttctccgggcggtttactccagccagatggaatacaaaatcagctgacttgcaataagcatccaattccgcttctgtcgactgtatatcatattcatagatttcatcgacatgaatgttcggtctggttctgttcttattttctttgatatttttcaggttattgacgagggcagttcctaccatccccttagcacctgtaactaatatattcatcagttatctccgtactctctcttttcgttactgctcttttctccataccatcttgttcacgacatttacatagccctgtatgatccgcactaccttcatagatacattctcatccgtataatccgggcacggctttcctaaaatacccttctgtttcatatcaattgccatacccgttgcctgcagaagttcctgtgtcgtaattccagctaatataaagttcccggattccagtgcctccggtcgctctgtagaagtccgaatgcatactgctgcaataggatgtccgatcgacagataaaagctgctttcctccggcaatgtaccggaatcagatacgatcgccaatgcattcatctgaagtttattgtaatcattaaatcctaacggttcatttacccttacacggggatctaatttaaatccactggactcaagcttcttcctggatcttggatgacaggaatagagaatcggcatatcatacttttctgccaatgcattaattgcctcaaacagagatgtaaaattcttatccgtatcaatattttcttctcggtgggctgataatagaatatatttattcggctgcagtcctaatctatccagcacatctgacgcttcaattttgtcaaggtttccatgcagcacttctgccatgggggaaccggtcacatatgttctctccttgggcattcccatctcatgcagatactttcgggccggctcagaatacggcagattcacgtccgagatcacatccacaattctacgatttgtctcttccggaagacactcatccttgcatctgtttcctgcttccatgtggaaaataggaatatgaagccttttcgctgaaatggctgacaggcagctattcgtatctccaagtaccaacaaagcatccggcttgatttctgccatcagttcataactccttgcaacgacgtttccacatgtctgtcccagattatctcctacgacattcatccagacatccggtccgcctagttcaaagtcagaccaaaaaatatcattcaaattcttatcgtagttttgcccggtatgcgctacgcaacaatcaaaatattctctacagcgcttaatggttgctgccagacgaatgatctccggtcttgttccaactataattaacagtttgattgatccattatccttccatttaaaatcaaacatcccttaatcctccgccaatctttcctgaatataggctagttttgcaatggttgcttttgtctcttctaaagttaataatttagtattattggaattaaattctgtaagtgtatttctctttgcatcgccgtctttaaaatacttgtcgtaattcaaaccacgattatccgcaggtactctatagaaccctccaagatcaattgccttggcacactcctcgttagtgagcaatgtctcatacattttctctccatggcgaatgccaatcactttaatatcttcctttttgccaccaaataattcacacactgcttctgcctgcgtctgaatggtacaggccggagccttcatgatcagcaaatctccgttctctcccttctcaaatgcaaaaagtacgagatctaccgcttcctccaggctcataatgaaacgcgtcatagacggttctgttacagtgatcggattgccggatttaatctgatcaatccacagaggaattaccgatccgcgcgaacacatcacattaccataacgggtacagcatatcttcgtctttccggaatttctggattttgccactgctaccttttcctcaatcgcttttgtaatacccatggcattaatgggatatgctgctttatccgtagaaaggcatattactgattctacacctgcttcaattgctgcggtcaggacattgtctgttccgacaacatttgtcttcactgcttccataggaaagaattcacaagacggcacttgtttcaaggcagctgcatgaaaaatataatccacccccggcattgcagcccgtacagagttcagatccctgacatctccaatataaaatttaatcttgtcagcaacctccggcatctttacctgatattcatgacgcatatcatcctgttttttttcatcacgagaaaatatacggatttctccaatgtctgtttgaaggaatcggttcagaactgcatttccaaaagaaccggttccaccggtgatcattaatgtttttcctttaaataaagacatattttttctcctctcataactacttttctgccaagttaaaccattctacatagtcaaaatcatcataatattttttgtaagaaattttacttttataggccatgcatggtccaacacacccatcattttcaaatcctctaatatatactgctgattttatattgggatgtggtttgttaacaaatattactttattcttatatggcaaattatcaaactctactatatcctgctcagtgcacccatctctatctgtaaatagaataaacagtttatcatagtccattcgcttcgcccgttcattccattttgcttttgcctcttcttctgtcttataatgttgaaagtaaatcttaatatccttcaataagccaacagggtactctattccttcttctgttgtaaacttcaaatcataccccatatattctctcagtgatgataataactttatgaaatccttaggtcttagccaaagattaacaaaaggacttttaaattgtaacctcaaatcatgaagtatcattgccccgttacacttgctggcaatcaggcaaatatccttattaacaagacgtttcctttgcttagataaaaacattatatttctatattcatttctcagttgcctaagtacatccatcttgtgcttcctttctttgatatcactctctttacaaatactacgagtatttaatccttttgaaatatatctctggtatataccttatcttttacatcttccagcgttgcatcatatcgatttgcaattatcacgttactttcttttttaaacttttccaaatcggttacgattctgcttccgaaaaatgttgtctctgcattcagcgttggttcataaataatgactgttgcacctttcgccttaacacgtttcataattccctgaatagagctttgccggaagttatccgaatttgtcttcatcgtcagtctatagacacctataactatatttttttccttttttgaatcatatacattttcgttttcataatcataatacccagccatctgtaatacacgatctgcaataaaatcctttctggtacgattactttccacaatagcttctatcagattctccggtacatcctgataattagcaagcaactgttttgtgtccttaggaagacagtacccaccatatccaaaagagggattattatagtaatcaccgattctcggatcaaggcatactcctttaataatctgttgcgtatccaacccctttagctccgcataagtgtccaattcattaaaataactgactctcagtgccagataggtattagcaaacagcttcactgcttccgcttctgtaaatcccataaacagtgtatcgatattttccttaattgcaccttcctttaacatatctgcaaaaatatgtgctgctctgtgtaaattgtcatcgttcatatctgtcccgacaatgattctggatgggtacaaattatcatataatgccttgctttcccttaagaactccgggctaaacaatatattgctgtattgaaactttttacgaatggcttctgtatatcctactgggatagtacttttaatcactatgactgcctgtggattgcattctattaccatttttattacttcttccaccgcagaagtgtcaaaaaaatttttcctgctatcataatttgttggggttgcaactataacataatctgcatctccatatgcgcttttgccatccagtgttgctgtgagtcgtaatttttcctccctcagatacttttccacataatcatcatggattgttgcttgtttgttgtttattttctgcactctttccggcacaatatctactgccataacttcatgatgccgcgctaatagtatagcaatagaaagcccaacataccctgttcctgctactgcaatttttaaatcactgtatgctctcatccgcaaccccattctctctctgtttatggaacaccatcttcttgctcagaatataattcaatacaattactatcacactcaatgcgcatttactaaaaaagaacgattgtttcatcacttctaccaacaaaattacaccaaaatagtctaccagaaatgtaatccatctggcaaaaacaaaacggacaatttctgttataaatttatgaaatgatccgaatggtgttttaaatacaaagattttattggtgaagtagcaaaacacctttaccaccaccaacgtaatagcattcgatattttatagtcaattccgctccataccgcaaactgagccagtccaatattcagaattgtactgagtacaccccaaaatatgtagctatataattcttttttgttcacttgcttatcccttctttgcaagtaccatcgtccatgggaatggagtttttaccgatacaattttcatatcattattaacaaccattctgcaaaatttctttttggtccaatgttggatatgccccggtgtatttccaagatccttccattactttcctcttgccatgttgcatattcgccaaataggttccttgggaacacttaaaagtataaatccattttcattacacagttcttttatatttttcaatgcttgttccggatcttctaggtgttccaacacttctgaacatatcacaagatcatatcttcccttgttcaaaatgtgtttttcagcttctcccggctttcgaacctccattgtatagatatttccagtataaaagttaataccatgaatcttttcactggcctctgctattaccttttccgatatatcaaacgcatcaatctcagcattctgatacatatcttttataaatgaggttatttcgccttctccgcatccggtttcacatatctgacaaaattcctttcctgctatatccaacaactcgctgatggcatccttgaaccctttcatcatccattttacgatcggattggtcgaatgatatttatcatagtagttaccctccggttgaactacctcagtgctttttgtactcatctctgccatatgcctcctggatacttaatcctatattctcttttccttcataatcaatttttctcacatgatactgaatatcttccaatatcattctgttcttagccagtatatctgccataaatcctattataaatgtgatgaatcccataagcaataaagtacttgacagaataagagactgcacatgcccacttgcgttaacggttatcagtaaatataaatatcttatcccaagtatcaatcctgctataaaaggaatcgcccctacaaaagtaaagaactttaaaggcttatacataatgtaggctctaactattgtaaccatagactttctgacatatcccatcatactatgaaaaagtctggatggtcgtaattccccatttgtgcgaataggaacatgttccatgggaattctttctcttccggcctgcactattgtttccagtgtatatgtatactcattcgtcacatttattctcattgcggcttcacgactatacgctctgaatccactgggtgcatctggtatatccgtatccgacgctgccctgaccacccaacttccaaaatgttgaagcttttttttcattggagaaaagtgttctgtctcatcaatagggcggtctcctataacaatgtccgctcggccttctataatgggtctaaccagtttttctatatcttgtccgctgtactgattatccgcatccgtatttacaatgatatctgccccatttctcagacaggcatccaatcctgccataaatcctttagccaatcctttattctttttaaaattcacaacatagtgaactccccacttttttgcgacctcagtggtatgatctgtactaccatcattaatgatcagatattctattgtatctattccttctatagctttaggcaaatcgttcaacgcaatttccaatgtttcctcttcattgtaacaaggaatttgaattattaacttcatacttttccctttctattatatttctgagatacatcttcatcacttgactataattctatatgagttaatgtcagatctgaaaatctgtacaatactgcctttgatgtatcccctatccaatctcgttctatgtgatatacacaggctccatcctcatattgataaggcattatcatttgattaactaataatactatgttcgacggttcctctttgcatttaattacaatttcattttcggttttagtaacttctatatttctatttgttctgtttagcaaaaaaacattatcgtcaaaccgaacatacaaaacattcgaaaaatcacttttaacaacattatcacttatcttgtcatatttttccttatcaatcatactatttttcagtgtgaaaaagttaaccctctctggatttatacttatcggtgactgagaaaaaccactctgtaaaaaccagaattcgccatccaaatttcctcggtatagaaagccaaaactctgtaatgaaccaagatagttttccatatctgtagaatacacacttacttgttcattgccgtactcattaataagctcctttgtggcttttatatagctatgattatctgcataaaattcacttgcatccagagaacagtatacattaactcctgcaaaaagcaaccaacatatcactgtaattttcttcccaaatacttgtgacactactatcaaaatacaggttacgattacaaatatataacccaacttcagaaatgcaagattctccagacctcgaagtgatgcaagccaatcctctgccggtttccaggcaaaatttccatacaatatagcatagcaaaatacagtacaggctacaagcataaaaatacggaaaaatctgtcgattgctttttcttcctttttatatttctcggtaattgcataaattataatttcaattagcacaatataggttacatatcttcccaaaagcttaagcattccatctgcattataatccacaagagatgagtgccttgctgctacgaaaatcaataataatgaaataatcctcaaaaatatgatattttctctaatacttttgggaatatccttccatcttattttcagattttctccaacaataatacccgcttgtaaaaaaggataggccgtgtaacaaataatccatttcatttgtggtaacattttataactggtattctctggcccggagccagaactaaatcccaatgacaattttacaatttccaaatctattttacagccagacttcacacagtaggtcaataccacaccaccaagtaccaatcctacagaaatcccccaacatattatacacagtaatgcttcctttataacctttttgtttttcaataatggtacactacaactaaaccaaaatgcaaaccataaaggaatcaatataattgccaaatattttgtttcaaataaagcaactgctaaagcacccgcaatcgcactacttgacaatttattttttaacgcaattgtatcactaatcattatattgcgtcggctaatatagtacaaaatggttattaataatagcggtgagaataggttctctgccataatccaatccgaatacaggaaataactcggtgaaaaagctatcaacgtaagtaccaatcctctgtcttctctattttcaacaacagaagccagcattttgaagattactgccaacaatattgttttcaataaaatattttcaaagagcatcacattgcgtctccaaaataaaaggacaatgacaatataaagggatagacaaacggataatgaaaactgcttacagcttctccttgaaatatatccatggctatttgtttatatgtatattcatcgctgacgctcacacaagttccctttgcatagacataaatcagttgcagaaaaaaatatataataatacagctttcatatggtattcgtttctgttttctcatttatattcctcttgttccctattctctttaatacgtaaagctacaatctcaagcacactacatattaatgcaaaaaatacaaccggaattgccgacatcataattctattacaggaatcaccatatccatttctcaaaggatgcttccttccaaggcataatatcagatttatgagcacatatcctgtagagaaaatgagccagaaattaattcttttatttaagacaatcattatata

SEQ ID NO: 198 - DNA, 30148 bp, unidentified
  source 1..30148: mol_type = unassigned DNA
tcagttaaaaagtccgctcatactgtcaagctgaacctgagtgttggcactcattacaccgttcataaaaagcacctcgtcaattccgttggttttgcagtaatcaacaagattctgtttgaaatatctgaaatcgataacatgaacttcttcgtagttattggtgagatacggaacaaaagcgttgccgtagctttcctttacaacggcaatcttcttgcctgccgccgcattttccgaagctgatttcagaaccgtgagggcattatcacccataataaacacaccgtaggtgtttgaaccgccctctgcggcttcatagtagggactgtcatagcttgcgtaagaaccgtctgcctgtgtgatatccattgttacattataagggaacttccaataacttaccgtatcgctgtcaagaccgtctgccgagttggtaaacgagcctgtaaagccgtcaattttctgttcctcgcaatcatcaagcgaaagaacgggcaaatcgtttgtatcggcaaatgctgtgtaagcatagtaagcgccgaggcctgtccaatggtggtcgctcttaaagtagatgtaatctgtattatgttccgcaagacggttgtagcagttaatcggagttaccttatcggaaagagccgcataagctgccttgatgttgtcagcctgtgaggttgacggagcgtcactgtctttgagtctttgcggaagtcccatttcggtatggttaggaacaatcatatcataaacctttacggaactgccgaacttgtctgcaaagccgttgattgtctgagcatagttctgcgctcttgcatcatcactgctgaacaattcgtagcctattttgttccacacataaatgccgtacgaaagagttccgtttgtattgtcgtcctttatgctcggtgtcataaagtatgtaggagaaagctcgtctgctttgttagctgtcgaagattttgcggtttcgtcgggagatgccgttgtacccactgttcccgtgggaacgcttgcaagggcatcttcctttgaacagcccttaaaaattgaagttataataaaaataataacaaacagaattatcaatgcgctcgcaacgataataattctgtttctggttcttcttttgtttcttctttttacaggtcttctgacgggacgctgtgatgacggtcttgcggcatagcttgcaggacggcgctgttgctgtctgcgacgatattcacgggaatcaatgctgtcatcgaaattatcaagatcaaaataatcgtaatcgttccttctgctcatagtgttactctcccaaactgaagatttttaaattcaatttgaattcaatgaattatataagtgtattaattactcgcagtgtactcctgtttgaatcaaagcaagccttgctctgaccgtaaggacattatcacttagattatacaacagaaactcatcaaaaacaatacaaaaagcacaaaaaatacaatttccgtgaattaacatttacaaatgcaaaataataaattacacattttttgaataaaatcgcagtaaaaacagtcaaatttcttgaacatatatgcaattcgtgatagaattacagggtatggaattttaaaaaatccttatcatcttaaaaggagatatttttatggaatacaggttttccgacagggtttcaagcctgaagccgagtgctatcagagaaattttcaaatatgccgccgatccgagcgttgtatcgctttcggcaggaaacccgtcgcccgatgcatttccctcaaaggagattgcggaaatctcggcaaaggtttttgcagaagatccgatttcggttttacagtacagcgtttcggagggttacactccgctgagaaagcaccttacggaatatatgaaaaaggagcataacacaggctgtgacaatgacgacattctcatcacaacaggcgcacagcagattatggatttatgctcaaaggctcttgtaaacgagggcgatgttgtaatctgcgaggcaccgtcattcatcggctcgctcaacacattcagaagctacaacgcaaagctcgtgggcgttccggttgagcctgacggtatgagcacagaaaaacttgaagaggctttaaaagccaatccgaacgcaaagctcatttacacaattccgaattttcaaaatccttcgggtgttacaatgagccttgaaaagcgtaagaaagtttatgagcttgccaaaaaatacggtgttctcatcattgaggacaacccgtacggcgacctgcgttacagcggtgaatatgttccgaacataaaaagctttgatacggacggaattgtaatctatgccggttcattctcaaaggtaatttcaccgggtatgcgtgttgcttacacaattgcaccaaagccgatttttcaaaagcttgttgtgtgcaagcagggcaacgatgtacatacaaacatctgggcacaatatgtatgcgatgagttcatcacaaagtatgacttcaacgctcaccttgcaaagcttcgtgaaatctacacaaagaaagcgaacttctgcatggagcttcttgacaaatactgcgcaccgaaaatcacatatcataaaattgacggcggtcttttcatttggtgtgacttgcccgaggatattgatatgccgaatttctgcaaagaactcgttctcaaaaaggtttgcgtagttccgggcaacgcatttttaactaacgaaaacgaaacctgtcacagtttcagaataaacttttcaacaccgactgacgaacagcttgaaagaggaatcaaaatcctcggcgagtatgcaaacagtctttaatcacggaggggaataatggaaaatcagacaaaaaaagaggttgtattcagcgcaatacagcccagcggaacaattacactcggaaactatctcggtgcggttcgcaactgggttacaatgcagaacgaatacaactgcatttacgctcttgcagatttgcacacaatcacggtaagacagactcctgccgttatgcgtaagaatataattgatgcttatgcttcaattatggcttgcggtattgatgttgaaaaaagccttttcttcattcagagtcatgttcacactcacgcagagcttgcatgggcgctcagctgttacacacagttcggcgagctttcaagaatgacgcagttcaaggacaaatctgcaaagcacgccgacaacatcaacgcaggtcttttcacatatcccgtactcatggctgccgacattctactctatcaggctgacaaagtgcctgtcggtgcagaccagaaacagcacattgaaattacaagaaacattgcagagcgttttaacggtatttacggcaatgtgttcaagattccggacggtttcattccaaagaacggtgcaagagttatgagtcttcaggacccgacaagaaagatgagcaagtccgatgaaaatgtcaacggctgtgtacatcttcttgatgcccccgaggttataatgaagaagttcaagagagccgttacggacagcgaggcaaaggttcgctatgcggagggcaaagacggtgtaaataaccttatggcaatttacagcgcagttacaggtctttcatatgagcagattgaaaaggattttgacggcaagggctacggcgacttcaagacagctgtaggcgaggcagttgttgaagaacttcgtccgattcgtgaacgctacgaaaagcttgtggcagacaaggcatatcttgaaagctgttacagaaaagcagatgaaattgcccttaaaatcagcagccgcacaatgggcaaggttatgaagaaaatcggttttatttaaacccgaacaggaattttctctatgacaaaagcagaaagcaaagtcattgactttataaaaaaacacattcttttatttttactcgttgcggtaacgattattgcaattttcctcagagtctgcggaatggattttcaaagcgatgatttcaacagctttttaaattcgtggtggagtataatcaagctaaatgattttacggggcttgcaactcaggtgggtaactacaacattccgtatcaagtcataatctaccttatgactcttttgccgctaaacgctctgtatgcgtacaaaatcgtatcaataatattcgattttgtacttgcaatttcaaccgcaatgcttgtttactcgtttgcaaagaataaccgacggctcaaagcgatactcacctactcagccgtacttctttcggcaacggtgatttttaactcatcgttttgggcgcagtgcgattcaatttacacctcgtttataatccttgcaatcctgtttttgcacaaagacaagccgattgcatcgtttgtgttcatcggcattgcgtttgcattcaagctgcaaaccgtattcatcattcctgttctgctttattactggatttcgacaaagaaaatttcgattctgcatttctttataatccctgcggttgatgtgataatgtgcctgcctgcaattattatgggtagaccgtttatcgatatcatcacaatctacgctgaacagaccgactacggaaagcttattcagatgaactgtccgaacttttacgcactcatatgtgacggaaacgatataacatattattatctgttcaagcagttttcggtctttctgacaattgccgtactcggaattatgatgtgcattatcatctataaaaaggttgatttgaagaaccttgaaacttttcttctgacaacagcgtggactgtgttcacctgtatcatgttcctttcgtcaatgcacgaacgctacggttatctgcttgacattattttaattgtctgtgcggcagtaagtgcaaagcatttgtggattccgattgcgtcaatgcttataagcctgagaggctattgctactatctgttctcctacgagcttataaaccttaaattaacggcaatcatctacaccgcactttatgtttatataacattcctgctcgtaaaaacaattttcagagcaaaatcatctgataatgtttttgcaaaaacaatttaaaattaaacatattttaaataacaaacaaccgccaaaatccattatatcgggttttggcggttgttatttttatttattcaatgatttttaatttttgcaaatacaacagcaacaagaaatgtgacaaattctgtaattgggaacgcaagccatatgcctgtcatttgaacagcgctgtttaaaagccaaattacggggactaacagcacgccctgtcgcaacagttgaactacaacgccgggcataatactgtctgttgcctgttcataggttgcaatcattgcagaaaagccgctgaacacaaatccgagtgacataattctcattgccggcactccaaaagcacacatttcttccgatgccgaaaacaaaaacaatatctctttcgggaaaatcagcaccaagagcataccgacaatcatcataacagtcgcgataattgttccgctcttatttgcttgtttaaggcgaccgtactcttttgctctgtaattaaaccgcattataggcaaacagccttgaatcagtccgttcaccgtcataaaaatcaactgctgaaccttgaaatatgctccgaaaaatgcaaccgccgtgtccgaatatcgcaccaaaaacatatttgcaaaattcacggtgaatgctcccaacgcattcataacaaacgagggcaatccgtaggaaaatatcagctttatcatctgcggttcaaggcagtttttaaacaccggcttaaccttttgttttgtaagaaacagctgtatcaacgcaatgattgttgaaacaacatagcctaaaaccgtggcaactgcagctccgaccacacccattttcggaaacggacctatgccgaaaatgagcaaagggtcaaacacaaaattgaatacaacacctgcaatttgaaaccacatcggagcaatcatattgcctgttgcctgaagtattttttgaattacaatatgcaccatatttggtatctgcataaaaacgcagacgctcatatacgcaattccgtattcaaaaatctctttgttttgcgtaaaagccgaataatagggatttattatgaaaagcgaaaggaaatttatcagcactccgacaactaccgaaattaccactccgagagccgctgcagaatttgccttttgctgatttttctgtcccaaataacctgcaatcaaaacattaacacccacacctatccacacggacaacgcattcataagcgttgtaatcgggaatgcaagcgatactgccgcaagtgcctgttcatttatccccgcaacaaacatactgtcaacaaggttgtatgaatactgaaaaaacattgaaatcagcggcggtgccgacatttgaattataagtttgttgacaggttcataagccattttgttttccgttttaacgcccatattaacaccccttgcgtaaaataaaaatcgccatacacccataatgagtgtatggcgaaaataagaatcacatcttagaaaaatccataccaatttatatttatcatatcagtaagctaattatatcatacctgtaaaaaatattcaagattatcaccaaaaatttactttttgctttcaagccacatatcaagggctttttcatagacatcaatgcttgtgattccgagattcataatgaatgtgtgatattcctttgcgtcaaagcttgagccaagctcgctttcggctgtttcacgcatatcaatcatcttgaggtagcctacggtataggggagaaaataacccggatttgaacgggcaaggtcatacgcctcttttgttgcggctgtaacgctctcgctgtcagccgaaccgagtgccgttgacatatactctttgactttttcataatcccagccgttgtagttcacaccgacatcgaccatggaatagagaatatagccgagaatatcatttgcgtagataagcttcttaatgccctcgcttgtatcaaggtaatcaagcgtacattttgaagcatactgcgcccagccctcggtagcgccgataaagcttaaaatcttgcggacattcgggatatccttgtttgcatttgatgcggtaaactgataaagatgaccaggatagccttcatgggcaagagttgtgtacatctgagtcatacccttatttgcaaagtcggggttgattttgatgatattaacgcttgtatcgtcaattcgtccctgaacatagtacgctcccacattgtcgctctttgcggaatcgctcatataatctgccgtgtaagaggttgtaacgggagtcggaaagtcctcctcgatattctcaatcaaaaattcaagcacctcatcggcgtccttaaagtcgggtttgtagtcctgaaatttgctcaagtcatcctgcgaaacattgctcatgctcattccaacctttgtaaagctgtttgtaaggtatgacttaagctcctcgggagtcatactgctgcttgttttgtctttgacaattgccgaataatactttttgccgattttgccgtaaccgcaaagaccttcttcgtttttgcctgattttttgagactttcaagtgctgaatttgctgatttcaaagcaggaatgtagtattcttcaaaatactttttgttggtttcgacaacagtctttttctcggaatcgctaagaccgagtgactttattctcgactcaaactcgtcaacaagcacggacttgtcattcttaatatgcttttcgcactcgtcaattgactgctgtgcgatatcttcagccataaagtaaccgtcctcagcctgtttccttgtgaactcaatgcactcatccatatagcgttttgtgtccttcaaaacagcaaggtaaaggtcggtatcatccttttcatagaaagtaaactcggacagggtggtaaagagatttgcaacaattcccgactgcggtgcaaatatactctgcaattctgttgtaccctcatatgaaagctgaatttcaaagtagctttcaagggtgtcatatgtctgcttttgagaagaagtaagtcccgaacggtcaaactcctccaaatccgtttttgcctctttcagttcatcaaaggattcttttgtatcttcatcggacacatgaccgagggtatagtcctcctcgtcatatttcagaccgtagtccgacggatttgaaatgtcaaaatgtgcggtaagagcgtcatcctcaagttcttccgaaaacaaatcgtcacaatatttatcgaactgaatttgtgcatccgttttggttggttctgtgtcagaatcaaagtcacaggcacagacagaaaacgccataacggcacataacataacagcaagcgcacccttgagtgactttttatttataattttcttcattttgtcctccgtaaagattgttgtttaccaaagtataacatattatcgtgctgttattcaatgattatttttaatttttcccttttccgcagtaaccgtagcaacgctcaacaggcattgccgttcttttttaacaattgttgaaaactatgtggaaaatgtgtataataatcagccctgctcaattgtatttttgtaaattgtaaccatttgtaattatttgtaattttctctgtaggggcgttcattggacgcccgccttgatgaaatattatgtccatacacatatgttttgatataacataaattgtgtattcaaatttgcacgaattgggaacggcggctcaccgtaattttcaatttataaatgctttatcgcttcgcttaaatccgtacacaaaaaatctatcatcggtttaatttcgtctgtcggctctgacaaatcgggaaccataaccgtggtcatacctgcggcatgtgcagattttatgccgttaatgctgtcctcaaacgcaacgcagtccaccggctcaagcccgagcttctttgcggcaatcaaaaaaacctcgggatcgggcttgccgtttttaacatcatcaccgcacacgaatgcgtcaaatttatcatagagattgattttcttcataatcttcaaagccgtttgtgacgaggttgaagttgcaagcgaaattttacaaccgactgattttaaataatcaaaaatttcgtacaagcctttttttacaggcacaccgttcttttcgatacgcttaaaatagcggattctcgactccgccttgtaagcaggatagtcaaaatcatcgccgtaaaccgacttgtaatattcgtaggaatcctcactgcgaagtccgattgtctttttgaaaatgtcgagattaaactctttgccgtcctcatcaagcatttcctgccagattgaataaacaagcctttcgctgtcaatcataagcccgtccatatcaaaaactgcgcccttaaacataaaaccgccccttttttcgcttttaagtctgtatataatagcatattttacaaaaaaagacaaatcagttgtaattgcgacaaagttatgatacaatcatttgaatggtctgtgaaaaatataaatttgagggtaaggaagttttatggcaacatcaatttatgcaaaacctattaaggcaaaaacgattctgaagttcactctgccaaccgttcttatgatggtttttatgtcactttacacggttgttgacggaatcgttgttgcgaactgtgtcggaagtgacgcattgtctgcaatcaatattgtatatccgttcacgctcgtatttatggctgtgggcttaatgttttcaacaggctcaaatgctataatcgcaaagaaaatgggagaaggcaaacaggaggaagcaaaccgacttatgtccggtgttgcaatcacggcaacggtcatttctgttatcattgctgtgctgttcacaatttttgccgaacctatgtacatgatgttcggctcaaacgaaaaaattctcccctactgcattgactacggcagcgttatgattccgtacggctttgtaatgtgctggcaaatgctcaaccaatcgtaccttgtaacagcagacaagccacatatcatgcttgttttctcgatactgtcgggttgcacaaacattgtgcttgacattctttttatggcagtgtgggattttggaataatcggcgcaggactcggcaccattataggaatggctgtgggtgcaattccgcttttgctctttttcaacaagaagcaaactctgcactttggtaagcctgaattcaaggtcagtgaaatcctctttgcaatggcaaacggctcgtcagaggctgtgacaaatctttcaacagccgtgacaacagcgctgttcaacattcagatgatgcactttgcaggcgcaaaaggcgttgcggctataagtgctattttgtacattcactttattttcactgcggtttcgtttggattcacttcgggagtttcacccgtcatcagctttaactacggcgcacaaaaccacgaaaaactgcaaaagctgttcaaattatgcataaaaatcacgctgataatttcggttgcaatgattacggcatctgaattttttgcagaaccgcttgtcggaattttctcggcaggcaacgaaaaaattcagcagattgcactcagcggattcagaatttttgcaataaattatctgttgtgcggaatgaatattttcgcatcgggacttttcaccgcactcaacaacggcaagatttcagccgtaatttcagttgcaagaacgcttgttttcgagtgtgccgcaatgctgattttgccgatgtttataggcataaacggtgtatggtcggcattgcccgttgcagaattgtgtgccgttgcaatttccgtaacatttataattgccaatgcaaaaaaataccatctggtcggtgtaccaccgcaccccgttcgtgcagacagtttgtgatatcaaaagcatatcatgcccgagtgtagcattgtaaccatttgtacaaataaacgcaaaaaatccgagcatcaaaacaatgctcggataattttttacaacattaaagctcaattaaaatcgaaatcagattgcacgaactctgattacgccgtcaactgctgcgatttttgcaaggtcatctgcaccggcgcctgcaacatcaataattgtgtaagcatagtcgccacggctctttgaaagcatattttcaacattgccgctgatctgtgtgagaaccttcttgagaagctcgggaacattcttgtgagcaacgcagaaacgggtatcgtcagcatttgttcttgcaagtgaaattgcaggatagtttacggagttgatgatgttaccgttctcgaggtactccttaacctgatcacaagccataacagcacaattttcttcactttcgggagttgatgcaccgaggtgtgggaggcagataatattctcttcaccgaggatatcgtctgttccgaagtctgtaacatacttagcaaccttgccgctcttaacagcctcaagaactgctgttgaattaacaagaccgtcacggctgaagttgagaatacgaacaccgtctttcatcttggcaatcatatcggcatcaaccatatctcttgtgtcgtcagtaagcggaacatggattgtgaggtagtcgcaatttaccataacatcttctgcgctcttcatgagcttaactgtaggagcaagcttgagagcgttgccaacagacataaatgggtcaaagccgattacattcataccgagagcaacagcggcatttgcaacaagaataccgattgctccaagaccgataacaccgagagtcttacccttgatttcgggaccgacaaactgactcttgcccttttcaaccatcttaccgacagctgcaccgttgcccttgagagtcttcgcccattcataaccctcaataaccttacggtttgaaataagaagtcctgcgataacaagctccttaacagcgtttgcgttagcacccggtgtattgaaaacaacaataccctgctcgctgcacttatccttcggaatgttgtttgtgcctgcgcctgctcttgcaattgcaagaaggttatcggcaaattccatatcgtgcattgcggcacttcttacaagaactgcgtcagggttctgaacatcgtcaccgtatttatagttatcaccgagacggcttgtgccgatagcggcgattttgtttaatgtaagaatgttatacatcaaaatcaatcctttttaattttttattttaagaatttacaataacaggcgaacagcgttcgcccgttatatcataatattcaataattacttgttttcagcctcgaacttcttcataaactcaacgagtttttcaacgccctcataaggcatagcgttgtaaattgaagctctcataccgccgactgtgcgatgacccttgatattaacaagaccgttttcagtagcctctttaacgaatttagcgtcaaggtcagcgtcacctgtaacgaacggaacattcataagcgaacgatcctcgggaacaacagtacccttgaaaagctctgaagaatcgaggaaaccgtagagaaggtcagccttcttcttgttgatttcatacatcttatcaagaccgccaacctcgttcttaatccattcaagaacaagctttgcaatgtagattgtgtagcaaggcggtgtgttgaacattgaaccgttgtcagcgtgagttttccagttaagcattgtaggagtgatatccatagcgttgccgataagatcctcacgaacgataacaaccgtaagacctgccggagccatgttcttctgcgcgcctgcatagagaacgccgaactttgaaacatcaatcggtcttgaaagaatacaggaagaaatatctgcaacgagcggaacatcacctgtgtcgggaagctcgtgataaacagtaccgtaaattgtgttgttcatgcaaatgtagaaatagtcagcgtcttttgtgaatgttgaaggatcaagctttggaatgtatgtgaaggtcttgtcagccgatgaagcaacaacattagcctgaccgtaacgggcagcctctgcatgagcctttttagcccactgacctgtgataacataatcagccttaccgctctttgtcataaggttcatagggatagccgcaaactgtgttgacgcaccgccctgaaggaaaagaaccttgtagttgtcaggaatgttcataacctctctcaaaagagcctcggcaccctcgatgattgtaccgtaaatttttgagcggtgtgacatttccataacgctctgaccactgccttcgtagtcaagcatttctgccgctgcttttttaagcacagactcaggcagcattgaaggacctgccgaaaaattatatactcttgccatttctgatatctccctttttaaagaaaatttaaaaatatagttgtaaaaataaatacacctaaattatacgcttttagcacgctaaagtcaacaaattcatagcactaaagcataaaaatcgaaaaatttcgggattctgttgtgcaaatgaatcagtcaagcttaattttgccgatacagccaacgatttcatccctcatacgctcagcctctttacgagcggcaacggcaaaatcatcttctgtaagcccctgctttttccatgcgcacataatgccacggcttgagttgatgattgcaccaagaccgttttcgtcaaatgcgtttttaacatcatcggcaccgccgccctgagcaccgtaaccgggaacaaggaagaatgtgtgcggaagttttgctctcatttcaccgagctgttcgggatatgttgcacccacaactgcacctactgccgaatagccgtgcttacccataaggtcttcgccccagccttcgcacatcttgcccatatgctcataaacgctctcatttgtttcaagcttcatatcctgaagttcgcccgagcttgggtttgaagtttttacaagaacaaaaatgcccttgtcatccgaatcgcaaatttttgcaagcggcttgataccgtctgttccgaggtaaccgtttaccgtgagtgcgtctgcaccgaatgcgtcaatgctttcgcctgcaacatctgtatgaccgaggtgtgccgtagcatatgcctccatagttgtgccgatatcgttacgcttgccgtctgtgataacgaacataccctttaactttgcataagcgattgtgtcacaaagagccttaacgccctgccagccgtacatttcataatatgcagcctgtggctttacggcaggaacaatatcataaagcgcgtcaataagcgccttgttgaattcaaaaagtgcagcagccgcaccctcaagcgtcttgccatacttttcaaagcattttgttttgattgattcgggaacatagtcaagcttaggatcaagacctgcaaccgtaggattctgcatttttacaatattttcgataagtctgtcaaatgccatagtgattctcctcattttttgttattctttctatgatcgggcaaacaattcatatcccgacagcaatatcttttttacaatgctgttgttcgcccctacgaattattattttttagctgttgataatatcataaagttcatttgagaacttgtaataatcctgtctgtcctcttttacaaactgaattgcaggacggggatgtgtgttgtactgacctgtgagaaggtacggaatatcgtaaccccacttaacgccctcagccttaaacttgtgggtgtactcctcaatgattttgagaataggagcaacctgatacttcgggttcttgaggaaaccgagaagaagttcaagcgcacagttgcctgcgcctctgcccatgccgtcaacggttgcgtcaaggtagctgacaccctgagtcatagcctcaattgtgttggcaaaagcaagctgctggttgttgtgagcgtgaataccgaccgacttgccgtacttgtcggcaattgagcagtaaaggtctgcaagtcgtcttgactcctcgggatagagtgcgccgtagctgtcaacaatgtagaaagcgtttacgggagttttgccgagagtttcaagagccgctgtaatatcctcggttcttgcctttgaaacagccataatattgattgttgtttcgtagcccttctttgcagcgtcctcaatcatttcaacagccgcaggaattgcgttgatgtatgttgcaactctgatgaggtcaatcgggctgtccttctttgcgataatatccttcttaaaatctgttctgccgacatcagccataacagcgattttaagaggagtcttgttgtcgcctacaatttttctgatatctgcatcgttacagaatttccacttaccgaaatcttcttcgttaaagatttcctttgatgccttgtagccgaattccatataatcaacaccggctttaacatttgcattgtaaagatccttgataaatttgtcgtcaaatctgaaatcgttacaaagaccaccgtcacggattgttgcgtctactactctgatgtcctgtcttaccgacaggaggtcacctttctgtgccataattttactcctttatgttaaagtttatattaaatttattttgtaggggcggatatcatccgcccgcttgatgtgaatttatgtttgtgaaaaactatttgatatcgtcaatgttgttttaaaatcatatcccgttgaaataaaacatttgtatttttaaaacaaaacaacatattttaatgagcaaacaaatagcaattattcgttttggttttacaaccaaaacgattggcgaacacggttcgccgctacagtatatcattatctttgtttcatttatataatttgttttaacaacaatttcgcactattacttgcgggcggataatatccgcccctacgggttttatttgctcaatcttcaaaaactaccttaccgccgaggattgtctttttgaccttacctgtgagggttctgcctttaaacggggtgtttttgcttttgccgtgaagtttaccggcatcaactgtccattcttcatcgggatctataagaacaacatcggcatttgcaccgactgaaagagtgcctgcgttgattttcaaaatccttgcaggattaacgctcatcttctcaacaagctgtgaaagcgtcattttgcctgtcttaaccaggtatgtgttgcagaccgcaaacgaggtttccatgccgattgaaccgttgggggcttttacaaaatcagccttttcctcgggtgtgtgcggtgcgtggtcggttgctatgacatcaagtgtgccgtcacaaagcccgttgataatctcgtcaacatcagcctgagctctgagaggcggattcattctgtaatcagcgtcacctcttaaaagctccctgtccgtgagcgaaacataatgcggagcggtttcggcggtcaccttaacacctctccttttggcatcacggataagtgcaacgcttgttttggtgctgacatggcagatatgaataggctcgttaagagcggcggcaagtgcaatttctcttgcagttccgcagtcctcggcaccggcagggattcccttgacaccgagcttttcagaaacctcgccctcgttaattttaccgccgtcggcaagaaacaagtcctcgcaatgtgcgacaattgtcatgccgagctttggagcttttttcattgcgtcactcaaatactttgtgttttcaacaggtctgccgtcatcggtaagtgctattgcacctgcacttttcacagcgtcaatgtctgtgggttcttcgcttttaagccccttggtaacgcttgccgcaacataaacacggctgtcggcgtctttagctttgtcaagaatatactttacaatttcggggctgtcggttgtcgggttggtgttcggcattgcaagcaggcttgtaacaccgcctgcggcagccgccttgcatcccgtgataatatcctctttgtgagtctgaccgggatcacgaagatgcacatgcatatcaacaaatcccggaacggcacaaagaccgtctgcatcaataatctctccgtctgatgtaatgccgctgccgatttcggcaatcacaccgtcctttatgagaatatctgttttttcgttaagcttgtcggcaggggaaacaaccactgcgtttttaattagcatttccatgtttttcctccgttaagaaaagaaattatcttctcttgtttctgtttgcagggcggtgattctgctgtgggcggcggtcggttctgctgtgaacctgaacaagtccgtcgctttctcctctttcggcacgcattcttgcacgctctgccttttgtctttctctctctcttctctcttcctctgcctttttgcgtttggcaattgcacgcttacgctttatcattattgaaacattcttgcagaaatatccgcagtgaatgccaaaattcttcactccgcctgcaaagcccctgagagcgttaccgatgtttttgcctacattggcaagaacctcttccgttgaccgtttatcggtcggttcaccctcggtttctttattattctctttttcaagagcgttctgctttacggtttctgcttttctttcaacctcgccgataacatcaaagtcctcggcatctctgaggtctgagcttttgataacccccattgactttttgggagcttcgtcaaaaaagtcataaccgctgtcaaacttgtttttcttagcctttgcccttacaagctcctcatcatcaacctcttccccggttttctcctcgggatcgtcactgccgaaaatgatgtttgcgtacttgtcaacctttttttcaagcggatgcttttgttcggaaacctcctcggtttcttcaacatcggcatcgtcctcacggtcgatatcgtcaggctcgcttgtttcaaaaagatcgtgttcgggttcggggataacgagtgtaggacctgacgaagagcttatgtcctcgtgtttttcaggtgtttctgcgttatctttttcgttttcgtcaattttttcgggttcagtctctgaggtatctgctgcggtaggctccttttttttttcgtcctccgtgctgttttcctcgtaaccgtagttgtttttatatgcctcacgctcaagctcactcttgtaagcctttgcggagttgattatctcgtcaatttctttttccttggcatcatccgtgtcataaccaaagtttgaatactcacttgtaatttcttccggttcttccatattttcgattatcggctcgggagcatatcttctgcccggcaaagccggttcttcttcaacctcttccgcatatttctgctttttctttgagcgtttatcgggcttttcgggagaatcgtcaaaattgtcaatgtcgtagtccgtacccttttcaccgagtttatacttgactgcaagctcctcaagaatagcgttattcttcttagcctttttatgctttctgattctcacggcaaaaattatgatgagaacaatcaagataaggataacaacaccgccgccgatgattatgtacggaataaatccctttgaaaacggcaggtcgctgaattttaccgaagatacaattttggaaaaagtatcgtagtcaacggttgtaacatcaccctctgttctctgcattgtgatattaatgttcataccgtcataaaccgtgttggcaacaaaggttttcacatcgcccttactgctctgagcagttgcgtcaaacacaagccacacagctttttctttttggtcgggagtacagctccgatactcgtcggaattaagaaaattgttgcgtatatttgaaagctcgcttgaagaaagctgagcatagttgccgacattctcgctgctctcattttttgtcattgtcacggtcagaataaccgatgacatgttatccataccctgaagatagatatttccgttctgaaaggttttcattgttgtgtcatagtcaagaccgaaaacggaaaaatatttatctgtgcttttactgtcccttgtaacagcgctcataccgtcaggcattgaaagcgtcatatcgtcaatctgcggaatctcgtaatcttttgttgcgcccgaacaggcaaaaataccgcaaaataccgttacggcacaaattgcaagcgttacagctcttttaaaaacagttttcatcatgtccgtatattcccccgaaactaaattagattcatcaatactgctttttagaatgtatatctaattaattatacataatctgtcaaaaaaatacaaggtttttaccgtttaaatttgaaaacaagagtaccctattcgtgaatgcagtatgatattaaagaacatattacgcctgagcgtgcataaaattgaaaattgaaaatggaaaattatggtcgagaagacaattagcaagaatacaaaacattgtcgcccgactgtttttgtatatttttggtatatacggaagttgttgcaaaactgtatgtacggatattatccgcctgcagataaccacgcaaagatttgtacaaattaaaattatataaataaacattcactttcatataaaacaaaaattgcatcaatgccgtatcgggcatcaatgcaatttctttatctgactatcttctcgaattgactgcggtggcacaccgccaaccgaaattttacattttcaattttcaattttcaattaaatacaagaccgccgtttattctacagtaaccgacttagcaaggttctttggcttatcgggatcaatacctctgttgattgatgtgtaataagcaagaatctggagcggaactactgctgtaatcggcataagaagctcgtctgtatgcggaatttcgataacataatccgcaacaccgtccttgagttctcttacacaggcgtctgtacaaacaagaataacctttgcacctcttgacttaacctcaacaacattgctgattgttttggggataatacctgtctgagttgcaacggcgataaccggaacatcctcgtcaataagcgaaattgtgccatgctttaactcgcctgcggcatagctttctgagtgaatgtacgaaacctctttgagcttgagcgaaccctccattgaaagggcatagtcaagacctctgcctatgtaaagcaagctgtcggttgcaacaagctttgtggcaacgaacttgcaggtatcctcgcagttgtcgattacatactgaactgcctcgggcatttttgtaagagccgaaacaagtcgcttgcactcggctgtgctgattgtttcctttgcaagagcaagctcaaaggcaaagagatacataacggaaagctgtgtgatgtatgcctttgttgacggaacggaaatttcgggacctgcgagtgtgtagatgagcatatccgcctcacgggcaattgaactgccctttgcgtttacgattgcaagagtttttgcacccttctgctttgcaagacgcattgcggcaagactgtcggctgtttcgcccgactgtgaaatgatgattacaaggtcgccctcgcctacaatcggatttctgtaacggaactcggacgcaatgtcaacatttacgggaactcttgcgagatcctcaataacatacttgccgaccatacctgcgtgcatggcagtaccgcaggcaacgattgtgatatttttgaaattcttgattgtttccgttgtgatgccgcactcctcaagaaacggaagtccctctttgattctcggcataatcgttgttctgatagcctcgggctgttcgttgatttccttaatcataaagtgcggataaccgctcttttcggcagcctccatatcccagtcggctgtctgaagttccttttcaatcggatcaaggtgttcgtcaacgaacgaaacaccgtcaggtgaaagtgttacgatttcatcatggtcaagaagataataatcccttgtgtactgaagaattgcaggaacatcggacgcaataaagcactcgccttctgcaacgcctacgataagaggactttcacggcgaaccgcaaaaactctgtcggggaaatccttgaacataattccgagtgcaaacgaacccttaagctcagccattacactgtcaattgtttcaagaggatttccgttgtatttatagtcgaggagctgagcaacaacctctgtatctgtgtcgcttaaaaaagttcttccctttgagatgaggaagtctttaagctccatatagttttcaataataccgttgtgaacgattgtaacccttgtaccgctgtgtggatgtgagtttacatccgaaggctcgccgtgggttgcccaacgggtgtgacctatgccgacatgacctttcggagtgccgacctctgcaagcttatcctttaagtcctgaagcttgcccttggtctttacggtcttgatttctccgttatcaaaaaccgcaatacctgccgagtcatagcctctgtattcaagctttgtgagagcattaacaagcacctcactgcaatccttaggtcctacataacctacaataccgcacataaaatttctccttttcggttaatcattgaccttgtggcaaaaagtaggtacaagttctgccaaaagttcaactgtcttttcactgtcattgttttctgcggtctttttgagaacctcaagctttgacagcatatctgtttcgtctattttaatttgatttcctatgaaaattttcttgttctgtgttgacttaagaccttcttcgtccataagaagctcctcaaaaagcttttcacccggacgaagtcccgtgaaaataatcggaacatctttgtacggaaccttaccgtacattctgataaggttctcggcaagggttgtaatcttgacgggagcacccatatcaagaacaaaaatctcaccgccctttgccattgcacctgcctcaagaacaagcgaaacagcctcgggaatagtcataaaatatctgataatatctggatgtgttacggtgacgggcgcaccgttttcaatctgacggcgaaacagcggaataaccgagccgtttgagccgagaacattaccgaatcttgttgttacaaattcggtatcggtgctgtgctgcgccttgtactgaataatcatctcacacgcacgctttgttgcgcccataacatttgtcggattaacagccttgtcggttgaaatcataacaaacttctttgccttgtacttttctgcaagggttgcaacattgaatgtgccgaagatgttgttctttacagcctcctcgggaacggtttccataagcggaacatgcttgtgagcggcagcgtggaatacgagttcggggcgatatgtcttgaagataagctccattttgtcgtaatcacgaaccgatgaaataagcgttacaaggttaagctttgtgccgtattcaagcacaagctcctgctgaatgtcatatgcgttgttttcgtagatatcaacaatgatgatttgttttggatcattctttgcaatctgtcttacaagctcactgccgattgaaccgccgccgcctgtaacaagacaaacctttccgttgataaggtcatgaatctcctttcggtcaaactcaatgggttttctgccgagaagatcctcaatcttgatttcctttgcctgtgaaataagctgtgtatgcccgtcatcaaacaaaagctcgccgagataagggataatcttgattttgcactctgttgcggaacagtagtcaagaatcttccttttctcatcttcctcacatgacggaactgcaacaataatattgtctatgcggtattcatcacatattttaacaatttcgggacaggttccgacaacggggattccttcgattttctgattcagctttttcaaatcatcatcgacaaagcataccggaatgatgctttttgaaggattattaacatcattctgctctttcgcattgtgaatttcacgaacaatcattctgccggcattgcctgcgcccacaataagggtgcgctctccgccctctgcccttcctgcctcggtaaggtcaagaaaagcccttctgaaaacaaaacggaatgcaagaattccgacaagggctattgcgaaatgtactacacaaaaaatctttctctgcggaatctgcaaaaacaacgagattacaaagccgagcgtaaaccccgaaaagacggcagttccgcacacaatatagtcctttgcgttaaagtatcgccacaattttgaatatgttccgcttatataaagcgtaaacagacacatgacaagatcaataacaatatagctcaacaagcctttgcttgaagcagtacctatgtagccgacaagcaagagaatataatttgcaagaataccgctgacaacgataataaacacatctgcgagagccagaaacatcttacgcaaattaatcttcttcataacccatacctcttctgtttaactttgtgtaaatttcccgagtaacatataaatacaattatgatttattatacaacagtgcaaaaggaatgtcaaacaaagcaattcctaaatcaacttaaaatccgacaatcaaagcacaaggagcagtaataatcagacttgttcgacacacatttgttgacaaccgcacaaaacgagcctaaaataataccatacttaatatgggcggtaaattgaatgaaaaatttttcgataatcctcggagcaataatacttgtgctgtttgtgactctcgtaatatggggcgtttactgtgacaacacaattgcaatcacaaattactgtgtaaacaatactaagaacgacgcaaagctgaaatttgttgtcatcacggatctgcacaacaaggaatacggagaaaagaacgcagaccttgcagagcttgtaaaagaacaaaatcccgattttattgcagtttgcggagatatggtcaaccgtggcgatcccgacacaacaaagatgaaagatgtgcttgaaaagctttcaaaaattgcacccacatactgctgtctcggcaaccatgagcgtgacaatgctgccgaattcggaacggattttaaaagcgaaacaaattcaacaggcgctgtattgctcgataatgaatacataaaattcaccaaaaacggcaagagtgtgcttatcggcggaatgagcgactacccttattacgagttctacactcccgatgacgatgttccgtcaagaacgctgtgggaagaatttgccgaaaaagcaaagaacaatttcacaattcttctgcaccaccagcccgaatacattgccgaggatgcaaagaaaaccgacatagacttaatcgtctgcggtcacacccacggaggacagattcaattgccgttcatcggcggagtaatcgctccgaatcagggactttttccgaaatatgacaaaggcgaatttgaccttgacggcacaaaaatgattgtctgcgcaggtctgagcaacaccgtattcatccccagaatcaataatcaagttgaaataggtgttgtgacggttgtataacatcggttctcccctattactttcatataaagcaaaaattgcatcaatgccgtattcgggcatctgatgcaattcttttatcagagtatcttctcgaatagattgcggtggctcgccgtcagttcttctcgctgtaattcctaagttccgcaggagttctgccgtattcggacttgcagaacaggataaacgaatttacatttggaaaaccgttttcaatcgtcgcctgtctgacggtgatttttttgtttctcaaatcatcaatagcgtgttcaagacgaacacggcgaagatactttgaaaatgtttcctctgttttatccttaaaatattttgaaaaatgagcaggcgtcatgcctacataattggcgatttcattgagcgtgatttcgtgtttgtaattatcgtgcatatatctgatagcacttttggcgcagtcaaaatcatcagcctgagaaccgtgaacatattgtatatcgttgtcaatgcaatcacggatgagatagtacgcaacgctgtacatcaccgctcttaccttcatgctgataagcttgctctcgtactcttcatatccgtggaatatgtccattgcttttctgataaactcaagagcttcgccctcgggttgtttgaaactcggcacaatatgcggatcgtcaacatacggtgcaattgcctttggaatgatattgagcataacagcctgagtatcctcaccgatgtcctcataggaatgaacctcctgactgttaagaacatagacatcgcccgcattgagaataatttcacaatcaagcttgttaagccttaccttacctttttttatataggaaatttcatatgaaccatgccacctgagtcccgattcaaaggcaacttttctgtccggatatcttgtaaccctgccgctgtaatacggctcgggcggtaacaacaccttcttgtacttcatggtttcacccttaactcaattaaaatcaatcaattgttaataacatagtcagcgcaaaaataaatatatttaagatccgcaattaccgcagaatggtctgtttttactacaactgttctgcgttcttttttgctgatttcctcaacacagcgtgcaacattgcactttgaaggctcgtagccgtacttttcaaaaaattcttccgcagtcataacaagcgagccgtagccctcaaacatatgcaaaagagaatagtcaatcagcttgtattcatcttcaataaggctgattccgatatcgcagtttgtgactgaaccgatgtaatacggtgcgtcattgaggaacaagcctgtcttgaacgaaccgattgaaacggtaagatccgagtttaccgccgtactgcacacacccgtgtcaccgttgattccgctgttgatgtctgcacttataacataggcatttgtcatattaatctgctcaaccgcttcaagcatttcaccctttaattcacctgaaaagcctgttccgagcagacagtcaactacaatgtcaaatcccgtgaaagccgccgcctgtgacatcggcatctcctcggcaccgagcgacattgcggttttataatagtaaaggccgtcctttgaaaagccgtcgcttgctctgaaaattgtcggtgtaaagccgtttttgcataaaatacaggcgagcgcataaccgtcgccgccgttgttgcccttaccgcaaactatggcaaccctgcccacaaactttgccgaattaaaaatcccctgtgcggctctgtacataagctccgccgaaggagtatgctccgcaatcgtccttgcgtcgctttttctcatattttcaaccgaaacgacctgaacaaattccatcttatattcctccgctttctgaaatttccatagccttatccgccgtttgcggcattgtaagccgtcataacagcactttcatccatattacaaccgagcaaaaacaacggtgtttccttaaagaactcatcaagcaattcaagcagcttttccattctgctccgctcaacatcaataaccgttgcctcaagcaactgtttcataacctgtgacggcaacaccctgactgccgtgttctcttctgctctctgaagaatatacacagccttaacgggtgcttttgtatttgttcctatgtcagctttccccatccacggagttccgtaagcataaaattttccgtcacattttcgtataaccggcttgtcatcgttaatcatcgtcaccctgttgccaaaatgccttcgccacagagccgtgtgggtagacttgcccgttccgctgactgccgaaaaaacatagccctcgccgtcaagctcaagacaggacgaatgaaaaaagaatccgtcaaatccgtcaagcacggcgttgcagaattttgagagtatcagaacatcctccgcaccttgttcgctgaggttgtcggaaagcccgagacgctcacggatttcgtcatccgaaaccgatatcgcaatgtcggtctttcccgattcattcgacttaacggcatagctttcaagccgtttcctgcatattttaaattttggattaacttcaacattcaaatcagctattctgtatatcggcatatctgctccgctaaatactataatgaaatattgtaacacaaattaatgttttttgctacggcgaaatgaataaatattattttaccttttagtgcaagttgttcagtcgcacagctttaaaggcaaatattgcacaatacaagccgtgttattttgtaacaatgcacatacagcttattttttattcattttaaagcctgtaaaaaaagcattattttacgactttttcaattttgtttactttacctgtccgactgcttttttgcatactcttcaaggtatgctctttcataaattcaaatatcctgtgcgtaaccgttcctataagaatcggaatgaatattcctgcggcaaggtagattatgcagtaaaaatttaagccgttcggacgataaatgtaccagattgttgacttgagttttaaaatatcgaaatctttgaacagcggtgtaattacgctcaatccccagaacgcccattttacaatcataaaggcaaaaatgtggtgaatcattatgctgtaggtattgtcagaaatcattctgacaagctttttgttcttgataatcggagtaatcagctttgcaaccctcagccagaacgcaatacccgtgattgcggttacataaggaatgacgcagccgttgtcaaacttcacgcactttgacggagtgtattcaagattttcacagaatgtgaggagaagaagctgaactccgagaacgattgcaaaatatgcaacgctgttgagattatcgtgtttttcaagcttttcgtgataaaatctgccaaactcaaaacacggcagaaaaaatattgacctgaacaataacagcaacgcaccctttggggcaggattccaaatgcagtattgcacaccgaaaattccgattgcaagatacacggcaagaatgacatactcgttgcccctgtgaacctttttgagcagtttgcggaacagtatgttaaaaacataaacacagaacagcggatatacaaaccacgaaccgaggttgtaggcaaaactttcgccgtcaataaacggcataacaaaaaggttgtacagatcaaatttgccctgagcaatcgtatagccgacctgagtaagtgcgaatgcaattattccgtaaacaatgttccatagatacgcaggaatcaacaagcgttttgtccgtccccatatatatttgaaaatatgttcctcgtgcttttccttgtaaaaatatcccgaaatgaaaacgaacaaggcgagattgtacgaatacttcggaaaccaatcgtacatcagcgacacaccgccgttgtagcaatgccccgaaactatgataataatgcctattgccgacaaaattttaaaagtaaaattaatgtttccgtcatcgccgagccttttgttttcagctgtgacactgttttgtttaagtgcagatttactgcgtgtttcgttctttcccataattccctctcatctgtatttgtcgcaatttaaaaattccgcaaattaacacggtaattgtaccacaaaagcaatctgcaatcaatatatcaaattcaccgtgcaaaacacatataaatcattattttgcacaatctcacttttgttttaacaggcatttttagcaggcatctaaatctttcatttgcaactgttccgccatacaattgtgtacatacccttaaaaaactaagattaaaatgtaaataaattcagtcaaaaaagccggacaaagcataaaataaaaaaatatgcaaaaaactattgacacaacctttacataatgctataataataaagctgtaaaaaacagcagagttgtatatcgcgggatagagcagctcggtagctcgtcgggctcataacccgaaggtcgtcggttcaaatccggctcccgcaaccaaacaagacggtttttcgaaaccgtcttttctttttccaatatttccgaaaacacctgaaaatggcttggatatgcggttttcaaacgtcaacaaaatcaagttggaaaaagttgagtttaattaaatacagttaaatcgctgtcaaagtgcagtcaatacattaacctaacccgccgagatcgtttccgacaaaaatttcggaggttaaagctatgacaaacacaaaaatcacttacacacagcagggcggttatcttttgcccgatttaaaattacctgagcagccgaaggttaccatagggatatggggacagcgacatctacgctatattgaaaaacaccacccgataagatataccaatcttctgacgagctataaacttactgcttaccttgccggcatagacgaagaagcgcagactatgtatgaacgaattgtaaatgaaatggcaaaacgcgagggcataaccgagcagttgaaagccgaagatatgatgacatgggtaaaatgtatgaataatgtctacgcacgagcaagagagattgtaaatactgaattgatctacatctaaaacaataagtcgccgtgttgttatacgcatacctgcgaggttagaccacgctaattgatttagtgtggtatgttttttcaaaactgtttacaaatagtctttgaagatatataataacctcactacgaataaaaaggagtttggttatgatttgtcaagaatccatcggtagattaatagatatatacaaggatgatgataaaatacttaaaacaattgaacgctgcgttacttcattcgaagaataccatagtagaatatttgagatggagttatggatgaaaatatattctaagaccgtttccggagaagaatataaggaaaatgtttcgctgcgagataaagcgcgtactatgtcgcacgattctattctgggaaatgttaatttactgaacagattagctgaaagaaataaccttccccttgtttatgatggtatcgtgtcacacgaaagaccttatcgcagagaggttgccaatgcggtacttgaatatgtcgagaatcttattaaaaacagaagataa

SEQ ID NO: 199 - DNA, 7719 bp, unidentified
  source 1..7719: mol_type = unassigned DNA
ttagattttggcaagtgcctgatccaaatcagcaattaggtcatcgatatgttctgttccaatggataggcgtacggtgcccggataaatttcctgttcggctagctcctgtgcattgagctgcgaatgggtagtgctcgccgggtggatcaccaatgatttcacgtcggccacattggcaagcagggagaaaatttccagactgtcgatgaaacggtgtgcctcttcttgtccgccttttacctcgaaagtaaagatagaaccggcaccgttcgggaaataacgttgatacagtgcatggtcgggatggttggataatgacgggtgattcactttcttcacttttggatgattgtttaagaaattcactaccttcaatgcattttctacatgacgctctacacgtaaggaaagagtttccaggccttgcagcaggataaaagcgttgaatgggctgatggtagctcctgtgtcgcgcagcaaaatggcacggatgcggattgcgtaggcggccggaccggctgcgtcaacgaagcgtacgccatgatagcatggatcgggttcggtcagttgtgggaatttgccggaagctacccagtcgaattttcctgaatctacaatgactcctcccaatgaggaaccgtgtccgccaatgaactttgttgcggaatgtactacgatatctgctccgtgttcgatggggcggattaaatacggagttccgaatgtgttatcaataatcaaaggtattttgtggcgatgggctatttctgccactgcttctatatcaatgatatttgagttcggatttcccaaggtttcgataaatacggcttttgtgtttttctgaatagctttttcaaagttcgacaaatcgcttggatcaacgaatgttgttgtgataccatagctgggcaaggtatgtgccagtaggttataacttcctccgtaaatggttttggctgctacaatatgatcgcctgcacgagtgatattctcaaaagcataagtgatggcagcggcacccgaagcgactgccagccctgctactcctccttcaagagcggctacgcgttgttcaaagactccttgagtggagttggtcagacggccgtagatgtttcccgggtcctgcaggccgaagcgtgcggctgcatgggcggagttgtgaaatacataagaggttgtctggtaaataggtactgcgcgggcatctgttgccgggtctgcttgttcttgtcctacatgaacctgtaaagtctcgaagtgtaatttctttgttgccataatcgtatgttttttaagtttatattcttcctttattttcttgcaaagttatgagatgtagatatatcgaacaagatatagatgaaatatagaaaataatgctatttttgtgcctttatatagaataatgtaactgcgttattcctgaaaattaccttttagaagaatatttttcttatggatacttttgataagctggataaagtagatttgcaaatactccgtactttgcaagagaatgcccgattgacaacgaaagagttggctgcgcgggtgagtctttcttcaactcctgtttttgaacgtcttaaacggttggagaatggaggttatataaagaagtatattgccgtattggatgcggagaaactgaatcagggatttgtcgtgttttgcagtgtgaagcttagacgtctgaatagggatatagcggcagagtttacacggatcatacaggacattcctgaagtaaccgaatgttataacatatcaggaagttatgattatctgttgaagattcacgctcccaatatgaaatactatcaggagtttattctgaatgtgttgggaacgattgatagtttgggatcactggaaagtacatttgtgatggcggaagtgaagcatcaatatgggatacatatttagtcctttgtgtgatagtctgaaatttatcttgtatatttgctatgtaatataaatcctgttttgctgacacaatgaaatggcaactttgtaaatagcttcgcccatatggattgtaacaatagagagttctgctgctacaactgtttgtgatttaacgtaagtcacaagttattttttttattctattcaataaactatataaaagaagccattacaatgaattcgaacatatatcctcgttctaatgattttcagactatttacctgaatacggtgattaagaatcctgctattatcgtaggtgattatacaatatacaatgactttgtaaatgatccggtgctttttgagaagaacaatgtcttatatcattatccgattaataaagaccgtttgataataggaaaattctgctccatagcctgtggagctaagtttcttttcaatagtgcaaaccacacattgaattctttatccaattatacgtttcctatcttttttgaggaatggaatttagataagagagatgtaacttctgcctgggataataaaggggatatagtaataggtaatgatgtatggattggatatgaagctgttattatggcaggagtacatatcgggaatggagcagtcattgcgtcgcgggcagtggttactaaggatgttcctccttatacaatagtaggcggaacgccagccagggagattcggaaacgttttgatgagcaaacgattgcccgattgcaagaattgcaatggtgggattggagcgtcgaaaagatctccgaatgtataccttatattataggtggaaagatagaagaactgatgaaaagataaacaatgcatatatgaaatttataatagaacccggaacttctgctgatatagatgaattggaaaagctgtataatgaactgaatgattatctggcagctacgattaattatcccggatggataaaaggtatctatccaattcgggaggatgcagttgccggtgtgaatgataacatgctttacgtagcaagaaccgatgggagaattgccggttcggtcatcttaaatcatcagccggaaaaggcttatgagaatgtcagatggaaaatggaactggattatagctgtatctttgtgatacatacttttgttgtgcatccttcttttttgaaaaagggagtagggcatgcgttgatggattattcgttggaattggctcaaaggtcgggaataaagtctgttcggttagatgtttatgagaaaaatcttcctgccatatcgttatacgaaaaatgcggtttcgaatatgttgataccgttgatttgggattaggtaaatatgggcttaactggttcaagttatatgaaaaagtaatttgatgtatgtctaaatagatttttgtgtctcgttattttataataaatttattcttactatattagtggcaatataaaagagaagagtttatgaaacagttattatttgatatattgaaatattcattgagtgattttttagtaagagatagaaatagtattttagctgatgtgaatgaaagaaatctttgttcgcgactggcaatgtatttagaaagaattgtttgtaaaagtggaataaaaggttattatgcggacgtcgaatacaatagaaataaagatggaagggtaaagacaatattgaataaaaagatggaggttgtgacaattaattgcgatcttattttgcatagtcgtggaaataatacaaaatgtgataatttgatagctattgaaatgaaaaaaagtgatagagacaatgatggaaaacaatctgatagaaatagattatgcgcattgacaaaagatagttatgatgatatatggtcatatgacggtattgtattacctgaacatgtttgtggctatgttgttggttattatattgaaatcaatcgatttactaataccattttattagaagagtatgaaaaaggtgaaaagacaaatcaatggtcagtagatttttctaagggactaatagtttttaaaagaatgaataattaattatatttgtgagtggcttcctatagtgaagctactttttattttacagatatccccaacattacagttatctcccttgtcggattccatatggaatgaggaatttccccttttactagaaatgcttcattcgcatagataatcttttcttccttatcaagtattattttagcttgtccacttataacaataaataaatgattatgcacatgagtatgtagattaatagggccgccgccatccggttctaaataagctatcgccccgtctattatttctccgcagttgccgaagagtttttttgctaagaacttcaggtgttccggtggagtggtaaaaccatctaattgattcataattgtatatatgtatttttttactatcacgtcaccacaaaagtaatcatttgaaattgatttctcttttattatatgtaattttgtaatctaaaattgagatagtagaatgaaattaagagacttctttttaattatacttttgttatgttggtgtgatatttatgcgcatactatcaaggttagtgataaactgaacttgattcagctgaatgagaacgtttatattcatactgaaaatgacaataatggtattgtttatataaatggtggtaaggctgtaattgtttcaactcctgaaaacgatgaagaaactaactatttaattgattatatcaggaatcacttgaaaagtgaaattgtagcttgtgtcgtagatagatggcaccctgatgcaatgggcggattaaatgccattaaaaaagctaatataccatcttatgccaacagacttactcaggtaatagcgaaagaaagaatgttacctattccggaaaatgggtttgatattactttggaattgaccgttggcaaaagtaagttgatatgtcattatttaggagaggcacatacgaaggatgggattgtggtgtggctaccaaacgagaagattctttttggcggtaatcaggtacgtgcaaaaggttggtatggaaatattggtgacgctaatttacgggaatggtctaatacaattgcccgtgtgaaagatttatatggagatgcaaagatcgtgatacctggacatggacattatggaggaaatgaattgttggactatacaataaatctttatagaccgactttatggggtaaaatcttgaaatggaatgatgtacaggtaaaaccggtatttaataattgtggggtaatatttgaattagcagagtctgattctatcaatgagggaaaaagattcttgaaaaatgcgacaatttatattcagcagaagaataaaaacagatatttgaagattcaatctccaatgattagacatgataatgaggagagccaggtactgtcatctgataaaggtaggttgcagatatataatataacaatgaatgaattgattgaagatttatactataaacaattatatatatctttagaagaacaatcggttgatgctttaatcattttgaaagaagctataagataataaacatgatgctatacacatgaagaagctgactatcatattcattctgttactatcaacattctcttgtttctcacaaactgaatttacaacttgcctatttgatggggcaagaagcagagttatccccataactgtttatcagccacagaaagtaaactcaaaaacaaaagtcgttatattcaatcatggttatgatggaaataagaatagaaaatctaatcagacctattcttatctgacacgattcctttctcaaaaaggattttatgtaataagtatacaacatgaattgccgaatgatccactcttggctatggaaggcgattttatgcaaacccgtatgccaaactgggaaagaggagtggcaaatatctatttcaccattcaggagtttaagaagttgaaaccacaattagactgggataaacttatactgataggacactccaatggtggtgatatgacaatgttgtttgctactaaatatccgcatttaataaacaaagccatatctatggatcatcgcagaatgattatgcctagaacggagaagccccggttgtatacattaagaggatgcgattatgatgcggatgcgggactactccccacaaaacaagaacaggagcaatttcatatgaaagttgtgaaattggacggaataacgcatagtaatatgggagagaatggaacggaagagcaacacaggcttattaatcaatctatttttggatttctgacacagaaataattgaagtattctatttattttatccaacggttttaaatcgggagcctgtttttcttataactttgcagctgattttagaaaaagaagtttggaatgataaataagtatgaagcacggctaggtacagagcgtatgttgccgctcgttttcaaaatggcgcttcccgcagtagttgcccaattcgtcaatttgctgtatagcatggtcgaccgtatctatatcggacatattccgggtattggtactgatgcgttggctggggtaggagtgacgacttctcttgttatactgatttcttctttctcggcgattgtaggaggagggggcgcgccattggcagccatggcactgggacagggcgatcgtctgcgtgccggaaaaattttggggaatggttttgtcttattaatattattcgccctgttcacttcgttcatcgcatatacctttatggaaccgattttgctttttacgggtgcttcggaaaatacgttggaatatgcggttgattatctttccatctatttattaggaaccgttttcgttgaaatatctacaggattgaatagctttattaatgcacagggacggccggctattgccatgtactctgtcttgatcggtgccttattgaatattattcttgatcctatttttattttctggtttgatatgggagtgaaaggagctgctttggctaccgtattgtctcaagcatgtagtgcggcgtgggtattgagttttctcttttcccggcgtgcttccttacctttggaaaagcgtaatatgcggttgagccggaagattgtattcgccatgttagctttgggaatatctccatttataatggcaagtacggagagtctggttggttttgtattgaatagtagtctgaaaaattttggagatatttatgtcagcgcattaactatcttgcaaagtgcgatgcagtttgcaagtgttccgttaaccggttttgcgctgggatttgttccgattatcagctataattatggtcatggtgataaacaacgtgtgaaagactgtttccgtattgtgatgataaccatgttttcatttaacctgttattgatgctgcttatgatcttgtttcctacgattgttgcatctgcttttactagtgatgaaaaattgatagaaacagtccgttggacaatgcctgttttcttgggcggtatgactatcttcggattacagcgagcctgccaaaatatgtttgtagcattaggtcaggctaagatttctatttttattgctttgttacgtaaagtgattctactgattccattagcattgatattaccacattatatgggagtaaccggtgtatatgcagctgaagcaatatctgatgcgacagcggcaatttgctgtactttgttgttcttttggcagttccccaagattctggggaaaatacaggggaatattttgcgtacagattag

SEQ ID NO: 200 - DNA, 19065 bp, unidentified
  source 1..19065: mol_type = unassigned DNA
tcagcggaacaatgcctccccgttcaccggttccccgttgtgggtcagagcaaagtatacgttgcttccttcggcgctgtagtatttcgtgggcgctgccacactgccgatggtgtcgccgggattcacataggaattctctttcactgtgatctccgtcagctgtccataagttgcctcatagccgtcacccagatccagggtcaccgccttgccgatctcctcattttcgaagattgaagtcacttttccctgcgcacaggcggtcactgccgtaccttcttctgcggaaaaaatggtggcgggattgtatttatactgatccagtgtagcaaaataagtgctcttgtccatagagtaatgcatcagaatatcactctgcaccggttgctgtaatccgtcgctttctgcaaagtgcagtgtcttctcaacgaccacatccacgcctgctgtctgctttcccccggtctcttccttttgtcggtcggcatcggaattctgctgctctttctgtgcggcctccagcagggtctcctgatccgtcagccccggaatctctacgttgccggagcctacctcctggggcatatagtccagatcatcctcggtgacaggagttcccgcgatctcatttcccgctgtattatttgccgtcagtccggggatgttctcgtcctccttcagaagatgttcgtcgttattctccgtgatctcctgtaatttgtcatccgcattgttgggaagcgcagtgaagtccaaggtataaccatcatccctggactccacattctgccccttcatatagacccctgtcatggtcaatgctgccagaacaaaggccgaagaggctaacattataatacgctctttgttaataccgctctttttatttcttctcatatcttatccgcatccttcctgttccctgagtcaactgcctgctattacgtccttcaaaccattttccctggtttatcctatagtcttgcccgattcaagggttttattcagaatgtcttcgatatgaaatttgcatttatttggaactattcagagccatgtaaatagcgtcgaatgtttgcattcgtaagaacatttgatgctatttatagggcgaagtaactgaatagttatatttattctatgcctgtgcggcataggcagccatatccacgtgctgtaccgtacccacatttccgttttcgtataagaaaataccggtcttgcggaccacagcattggtcgcattggcattggtagtgccgtcctgagccttacggtctccctgcagggtaaaatccgtagaaacgttttgcagacagatagcaccgacacccttgtcagaaagtttgtacagtacgtcgttgccgttttcatccttgcaccagatttttaattttgaccagatggaatcgttctcatcgatccagccgttgccatcctcatcatactgcgccagatctgcaaagccatccccattccgggtgccgaacagctcactgccgtcgttgatagtgccgtcaccgttcttgtccagtgccagatagccgctgccattcagcacggagatctcttcttccttgccatcggcatccagatcaaaataaaaggtctgatccgacacttctgccacatcagtatccaggttgatcaccagcggatcatggagcgtgaattctgctacattgagttgctctttgtagtattcctcgcatctgcggctcatatttacatttacattaaaattgatctctctgccatccttggtccgtacacttcccacggtggaaaaactggtatcctcctgttctatgttccaggtctcgctcacatagttcaatattttcacacgggacgtgaccagattgaacacgtctgacgcaggtgttgcggttccctgtgtgctgccggaattcgtctgggtattatttacgctattccctgtattccagctgtttccggtctgattaccgctgctccatccgttttcctgcatccagtcccgcaaagtgctgttcctggacgggaataataaatcaaaaatataacgcaccgtatattcccggatggtagacaatgtctgttcactggcactgcttcgcatatcccatctggcagaagataccagcaaacgactctgccagtctttggctgtcatcgtggtgttctctgcagtgttctcctgttcctccgtgttctgtgtggtatcctcaccattcggcgtcttctgtcccttggtggatacatctgtcagacctgcctgataatccgttatctcaaatcgtctgacgcttgtcttagaagcgtgatagcttctggcggaatccattcctatgcttgcggaatcaattctcaaatctgtaattttctcctttccccgacctcaccacgaaccaacagggcgcgcttcctgtaacgcttaacagttcaccgctgcatgtattcataaaagcgcctgctccgcagtcgacgccgctaagcggctcatcttttatttcatacatgcggcactccgctcatgcaatatcatatgttctgctttgtgtgccagcacccaagcagaacatatgatattgcatggctgaactgttaaactaaaaaaagatggtaaagaaacagaatacatataatatgcctctgtctggttaccatccgtggtgtcattatcaaactgtaaaaaataagtagcaggaagtgactggccttgtcacctctctactacttatatcgtccgctatggacattttatttagtgttaatttactgctgtttgggctgagtgggagcgccaggggttccgggtgcggaaggcaccggtctgccggctgctttcagctttgctgcgatcatgctggctaccatttctctggtcaccacgatgttgccaccgaagggattgatcacgaatcccagcgccgggctgatattgccctgtgcatctttgcgcagcagcattcccgcataatcgtcaaagttcatggcgaaagtctgctgattctcctcatctctccacctttttagctctgtccagtcagtgaacgccatgaagaacttccgaccgtcctcggtggacagcatcgggaactgtactttggcatctcttgcgatggtcacccggccgttttcatcgggcacaggcaccggatcgatcacgaccggagacaggaactttgctttctgcagttcatccaggaacatctgtctgtgttccggggtgtcctctgcttttaataattcaatggatcccaccatcatggggttggataccggtttgttaaattccatattttttctccttacttctcattgtaactattcagcctctcttcgcgaaacgcatctgcgatggttagtcacaagtctctgaatagttacactcggttatagttgatcaggcatcccttcaggatgatctgacgttcttcgtcggtcagctctcccagcttcagggtgaattccttcatgccttctccggttgttaccacatatgccttaatttcctcggccttgtcttccacggctttcttaataccaggaatgaacaggtaatccagattcttgaaaggcaggtctccgggctggatcaggaaaggaagcatgccccagttgatcaggttggaacgataacgcttggtggcatactcgttggcaatatttgcccagccgcctaataccttctggcaggaagcagcctgctcacgggcagaaccgtctccgggcttcactgcgaaaatagtggaaccgaatccggtgttctcacgacttgcatcgggatactgtttctttacttcacccataacatccttcagtaccggaactgcctgacagggatgtccgccgttcatacgctctttctctgccttctggatctccttggcacgtcctacatactgcggatccttacggcttaaagtgaactctgccagtcccagaggattggagcggtaggaagaggtctcaccggatggaatcagctcatcggtagtagttacgggatcgtggatctcggatactacctgcagtaccagattctcaggcagggcacccatagcgggccagtccttgatattgggaccgaactggatctctacgctctcgtctgccacaccgtgggaatcgaagacacggttcttgtaaatattgctatcgaaatgatatttgtattttccgaaatctccatcgaagtccgttgcgggagtcagcacacccttgttggctgcagtggctgcgatggaacgggcatccatcagagctacggaagcgatctggccgttctgcagcttggagccttcacggttcgggaaatttctggtagagtgacggatactgaatgcgttattggcaggcgtatcaccggcaccgaagcagggaccacagaacgcagtcttcatgactgcaccggtctctaagatggtagccgcacagccgttgcggatcagctccatgtatacgggcatggatgcgggatatacgcttaaagtaaactcatccgcaccgatgtatctgcccttcaggatatcggcagccgcacagatattctcgaatccgccgccggcacagcctgcgatgataccctgatctacaatgaacttgccgttctttactttattcttcaaagtaaagtctacggcaccgtccagacttactttcgcacgcttctccgtctcatccagaatatccatcaggttcgcattcagctcttcgatggtgtaagtattgctgggatggaacggcatggcgatcataggacggatcttgttcagatccacctcgatcagtccgtcgtagtatgctacctggccgggattcagttccttatagtcttcggtacgtccgtggatctcatagaactcacggatctggtcatcggtcttccagatggaggacagacaggtggtctctgtggtcattacatcaatgccgatacggaaatcagcactcagggaagccacaccggggcctacgaactccattactttatttttcacatagccgttcttgaatactgcgccaatgatagcaagtgcaacgtcctgaggacctacacccttcacgggagcaccatttaagtatacggctaccacgccgggcatgttgatatcataggtctggttcaacagctgttttaccagctcgggaccaccctcgcccatagccatggtacccagtgcaccgtaacgggtatgggaatcggaacccaggatcatcttgccaccgccggctaacatctctctggcaaactgatggataactgcctgatgagggggtacatagactccgccgtattttttcgcacaggtcagaccaaacatgtggtcatcctcgttgatggtgccgcctacggcacacagggagttatgacagttggtcagtacatagggcatggggaacttctgcagtccggatgctctcgcggtctggataatacctacaaaggtaatatcatggctggtaagcttgtcgaaacggatcttcagcttgtccatattgccggaggtattatgctcctgcagaataccatatgccatggtgtttttcgctgcttcttctttggagatcgtaatgccggtcttcgcctgtatctgactggctgcttccgggttatccgctacgatgtccgtaccgtttaccaggtaagcgccgccctgtgttaactgaatcatgctcgtcctcctgttattccacttcttatgcgtaatgtgcatctaaatgtgcactcctttcattatactggattgttttctcagatgcaatgatcttataggatgtttttgccactgtaccacgctaaattttatttttctccgggaaccattcctcttttgttccggtgttgctataatatcctcagaaattatgccgttttccgaaaatctatgcgaaaacgacagttgtcggccgaattccggcggccgcggaaaggaaccttatgaatgtagtaatagctatcgattccttcaagggaagtatgacctccatgcaggcgggtttgagcgccgccacggggatcaaacgtgtttataaagatgcacatattaccgtccgtcctctggcggacggcggggagggcaccgtcgatgctctggtaaacggctgtgacggccgtatgacacaggtgcaggtcacaggtccttccggtcaccccgttgtctgtccttacggcatcgtcgacgagacccataccgcaatcattgaaatgtccggtgccgccgggattacccaggtcagcggagaggaaaagaatcctctgaacaccaccacttacggtgtaggcgaagtcatcaaagatgcaatccagaacggctgccggcattttattgtcggtatcggtggcagtgccaccaatgacggcggtgtcggaatgctgcaggcacttggctttggctttctggataaaaacggaaatcagatccgcttcggagccaaaggactggaggatctggaatccatcactacggatcatgtgcttcccgaactcaaggaatgtactttccgcatagcctgcgatgtctccaacccgctctgcggagagcagggatgttccgccatctacggaccgcaaaagggcgctacttccactatgatcctgcagatggacaaatggctggcttattatgccgctctggccagagaacagtttcctcatgccgatgccaaatatcccggtgccggtgctgccggcggtatgggatttgcttttcttaccttctgcaatgccacactggaatccggtattaagatcattctggaagaaacccatctggaaaaatatatccgggatgcagatgtcgtgatcaccggggaaggccgccttgacggtcagacggttatgggaaaagctcccatcggtgttgccaagattgccaaaaaatatgaaaaaccggtacttgctttttcaggctgcgtggtcaaagaggccgttgcctgcaacgcagagggcattgatgcctttttcccgattctgcggaacgtggtatccctggatgaggctatgcataccgacaatgccatgaccaatatgacggatacagtagagcaggtgttccgtaccatacagacattttcctccgtctgcaaataatgcactttacagtttttctcttaatgataagcttatcaacgtaaaaagtttctaaatgtaaagcgaagatttttcacactcaaatttgctcctgcactgtatactcaagcatcccataccacagcttaaaatctccggatgacatcgtgtccgcactgcccctgctttctaacacttttcaagaaaatgtcaacaaccagctgtagtatgggctgccaccactccggaagttctgtttgtattgaaaatgccattttttgctaaaaaaatacaaaagcaggagattttggccttttataagagcttattttcgctaaaatgggaaaaataataaaatcagtacaaaaaatgttggatttagaagttttgttgtactgattttgctattttgatgcgatttgccccaaagcaatagaaatgcctatagtgtacagatattatgagaaagcacaaagcgcccacgtcagatggaatgtccttccaagaatgattgtcggaaggtggtgattttttctcgaaaagcattgaaagacaggatggaatgaacaggatgtttgcggcaggctcccttgcatgacagccctacgctacgaaccatgcaaaaaaagagcgaaacagcatcgcttgtgcgcaagctcccacgacgtgttccactctatttctgcatggctcgtagctatgctaactttccatttactaaactatagattattcttcgtatccgtttggattgttcttctgccatctccaggaatcttcgcacatctctttgatgccattctcagccttccagccaagttccttctctgccagagaagcatcggaatagcaggtggcgatatcgcctgcacggcggggtttgatcacgtaaggaatcttcacgccggtagctgcttcgaagttcttcacgatgtccagaacactgtagcccacaccagttcccagattgtagatcttcagtcctgcattctcctcaatcttcttcagagcctttacgtggccctttgccagatcaacgacatggatgtagtcacgtacaccggttccgtcgggggtatcgtaatcatcaccgaagacacccagctctttcagcttgccgactgctacctgtgtgatataaggcatcaggttgttggggataccgttgggattctcgccaatggtaccgctcttgtgagctccgatagggttgaagtaacgaagcaggatcacattccattcgggatctgccttctggatatccgtcaggatctgctccagcatagatttcgtccagccgtaagggttggtgcactgtcccttggggcattcctccgtaatgggaacaaatgcggggttgccgtatacggtagcgctggaagagaagataatgctcttcacaccatgttttctcatgacatctaccagggtcagggtaccggcaatattgttctcataatattcccagggcttctgtacggactcaccgactgccttcagtcctgcaaaatgaatgactgcgtcaatctgttccttgctgaagatctcttccagagcttcacggtccagaatgtctgccttatagaaaggaaccttcttgcctgtgatggcttctactctggggatcactttctcacttgcattgcagagattatccaatacgactacatcatagcctgcctgctgtaattccactacggtatgactgccgatgaatccggcaccacctgttaccaaaattctcatacactctctcctatccgccgtgcataggacaatactatttgttcactatggcggctgcacaatctctcatctgtcagagccggatgaaattttttcttcgtttcttacagtatcagattactgtaattctatcgattcctcaataaccttatgttgtgaaaatctgtcgaaatgtttacagcaccacaccattctcggtgagcagttctctggcactttccacagagtccacaccggtcttgttcttgatcggcgcaaattcttttcttctgactacttcgaagggcagacagctgtccatctgatggatcatatccagcaccagactctcgaatttgtagccgttgggagcctccggcttcaccggttctccgttctcatccagatacgggatcttcttctctacgatatgcaggggcatcttctctgccatgatcttttccagatcctgtaccttgaacagataattcaggatcacaccataattatacgcgggttctcccttctcatccttagcattcatcagttcatcggtcagttcataatattctacgatagaaggtctgccatcctctaagcacataacgcctaccttctcatccggtgcattcttgcggaccaccttggagcctaccacacaatttttctgaatagtagctccgatgaagcagggatctgcgattcgctgcaatacattatccacggcaaatacattgatccactcaatgccttctctgtgtacaatgtccagcatgccattgtttttcatggaaatgaaccagccgccgttaccattgggggaagtggacagcttgcccttttcctccagatagatcttaccttcataatcggtagccgcagccatctcctgtttaaagaaatgcacatattccgcattatatccgaagaaatcatgctcctttaaaaaggctatggtcgcatcgttgttcttatcactggtcattacgaacagatggatccaactgtctgcctgatgtacgacttccatcagattattgatcaggcattcaaaaatatacagttcatgagtcagtcccacattgtacattcccttgggattgtcagatcccagtctggtgcccataccaccggccagaaggaccgctgctaccttgccctgtcggatcgcttcgataccggttgcggtaaattcctccctgtttgcttcgatttcgtctaactgcatggcagccaacggtgtgatcactcctttttttgccagatcttctttatgcttgcaagcttccagaatgctcatatccgtagtttcgatctgatccagaatcccctgcttctcttcctcgttgagctcccagtaatacttcagaacatgttcctgaccatactttgcaagcttctccttagcctgttccagtgtcatactcatattcctacctccgttttattttctccgactattccaccccgggtaacagtcaattttctctattatacttgatatttcctgcgattgcaaaccttactcccgggatcgttcccgccctgttaagattctgtaaatgccttgcaaagattctgtaaataacccgacaaaatggtgttaagggtcgctcaaaactattcacccgggggtatctgtttactataatacggtatatgaagtttttaaggacttcatcgaatgttgtacagaatgacagaaagttgaggaattcattatgaatattggaattttaatcattgcaatcgtaggcggtgttaccggacttttatccacagcatatctggcagtcagtttccctgctgtgctcctgtggaagctctatcgcagggtggtccacagaattcctctcacccaataagctaactacaaacactttccctctaaaaaggacccggaagctttcgcccgggtcccttgtcgcattttcttattctatttttattcctgtaccggatcccagttctcatccaccagtgtcgcagttaccgcaattccttccgatgcattttctgtgcggatcacaagatagaacattccttcttccgaatccacggcatattctgacggatcctccggcaaaaagacagaaaatccctccgggtactgctgcatctccagaaatcccttttccagcagtgcagttttgtaggcttcttttactgcatcccggtccccacaggagtacacctttattgaagcaaaagttccctcttcgctgtctgtctccgtacaatctgaaatcacagcatcgggatagataatatcctgctgcaccgctttcagatattccgttgacatccggacactctgtaagatctcaaaagtatcttttccatcctcggaatgcgccatgagtaccagactcaaaaacaaaatgagcagataacttcccagtgctcccgccagtattttcgcaaaaggattctctggctgccccagatttgtataagaagtgatgatccagccaaaatttcggtagtccaccgcggtattacagtattcgcagactccgccgcccaaaatgtccacactgcctccgcagttggggcatttgtattcccggagtgccctgctgtgctgcgttaccacatcctgtctgccttccagttccagccggatctcctcataacggttccggatcttctttcctgtatccagtgtcaatcgggtcctcacttccacgctgattctgtaagactctccccgtgtctccgcctccagaaaacgcacaccgcaaatgcaacagtccaccacattctgataccgtgccaccaccgtatccagatcacaggatgcgaaaaagcgtacctgctctgccgtatccgccagatggatcattcgcagctggtattccagattctgaagaaaattacccgtggagaattccgggattgcggcctttactttcgattcgtcttgaattctcggctttctgcgagtctccatcacgatcaacattacaataaatataatgagcatgtaaaacaacgaccggaaaaataccggagccagaccaattcccagcatcatggctgcggctgcctttaccgcattgtatccgttcctgcccaacgccaacagcaaaaacataatgccgcccgcacagatggccagtaccgcaagagaaatcgctgtaattcccaccacagcaccggctttcataaagttggaaatacttttctgtcttgcgtcctcctccagagaaaatccggatacctttgtttcaaaatcactgacgagaaactttgccccgcaggcatcacagccatcgatatagctggtcagttttccctcatgtccacagttagggcagataaccatatctctctgcatatccgctttcaaaaagctcgccgctgcaatctccggtgtctttaggaacgcaatttttttcccttgcggtaataagtccgtctcatttttaccggctgggtacggcggcagctataatcataaccatccttccagggaccatcatagtccgccagtcgtgccggctcctgcatctccatatccaccgtcagttcccgctgctgcagtctttttctgctcaggcgcagactttgccagaaaggctgggttgtctgctccatcaggttctgttccgcttccccgttgccctgatagaatgcttttaattccccacagaagtcttctgtccgtccctcgatctctttccgtgcatcattcagaaactctgttgccatttcgttttttctctcctcataagtgatcctgccgcgtaaaggtcctgatatcttttgtatcttatgtcccaactactttgtcccatatagctatgtatccattatataagttggtacccggtatttcaagacactttcccgtatagaatgatttgcctcatcgaatatctagtgctggtgcagatacttctctctggtagccagtccgccgcggatatgacgctcggatttattcacatccaataccttccgcgcctgctttgccaacgccggattcacctgggccagccgctccgtcacgtccttatgtactgtgcttttgctgatgccgaatgctttcgctgtctgccgcaccgtggcgttgtggtcgatgatatagttggctatccctatagctcgttcttcaatatagtctttcaaaggaaaacccctcaggatacttttttacagtgtatgaaagtatctgaggggttatgatagggattgtatttatctctccaattatattattgctttcttttatctatggatacataagtagtgtatgcctatattcaacaacaattttcctatggttctgttacctcctagtctaccatatgtcttaaatacatatatgcaaaaggaggaatgctcatagtttgcatgaacattcctcatctttcaagctatgtcatctgtcaccttactcttatcctctaagtcaatatctatttgaattccaagtaatttgctttctggtgcatcatcgttgagttccagaataacattatccctaacaatatttttatagtcttctgtactcattataccctcaaacgattcaagtgcatcctcattaatagtacatatatattgaaaatcttttttacagcatgtttcatatactattctaaaaagagtctccctttgtcttggatccatattagcaaacaatctactatcatgagcaataaatctcatcttgcttatctcacaattcaaaatcaaccagtcaaagcaaaacattcttacttcattcaccccatcagaggagtcgtcttctatacgtgcttctaatgaatatcgcaacaaattttctccagtattattttttataaccaatccactttttttcttgggataaaagcgtttggcatattcccaatacttatttcgtaattcttccaaatacccgctttcctcatcaagatactcatctgttgccttatcttgctttatcatttcctccttaattctccgtttattttctcgatatgtcttcaaaattttttgatattcctgtatcctgttcaattcattctgtaaagatgataattgttttgtcaatgccacatattcttccaatgctccatgcgaattcaaataatcaagcaattcatccatcctacttccaagttctactattttgctgtcaatttcctctaacgctcttttttgttttgccagttcatttcgaaggcgtacgtttcttgtagccaataactcactatgaaactgggttacctccgcaagacttctttttaccatctctggaatttctatttgagctgcctcatatatttttagtaacttttcctcttttacttcagtagtttcctttgtagattcctcaatattttttatatatgtgctaacaagtactcttttattttccagttctttcttttgataactcttttcatcagcctctttttctaactcatgatagttttttgatactttgaacacagatatttcctttgccaattctgcaattctatattctaaatctgcaacatctaattctgcatcattttttcccaaatagtactgtcgaaaaagcggatcattttttattgccttctctgttgccgctgcagccacttgcctatcgcgaagttcccttttagcaacaattagttccttatctatccctaacaaaaaacaattattcaaaattttactataatcgctttctttaggaacaaaagcatcatatattgaataacacagacgagattttctaacaaatcttgaaaaaagagttgtccatgtcatatctttgggtgtttcttttaatccaaaacaaagttctctcaatctctcctgaacttcttttggtttcagtatctctccattaaattcaattttattttgattgcatgttgatcgcatgcaatagtgttctttatcatctatttgaaatcttaatgtaaactcccactctggaataactttcgcaaaagattcaatttttcttgatcccaaacaaaaatgaattaaatgtaaagttaatgatttgccaacgccattatatgtattgccatcattctcattatgaggagtaacctgtttccctgcaattatattaatgccatctttaaaaataattggatgaaaagatttttgattagcagttaaacttatcagtctcataacacagcaatcccctttcatttttttcaatcgcaccaataataaacaaataatctaaggccataatatattgatcaaaggaaaatttcgtcgaatatcttttattagaatattcttctttataatattcccataaatcatctatcgtcataggtttagataattgctgaagtagaaaagcaccaaatccaaaaaaggactcacttactgacaattgttttttcggtaatatcatattttcatccctttctatatctagccttatctaccttggttcttcaaatatatcacatgttgaaaaataatatgccatcaaaacccagacacatgtaagcatcgacatggttcttttaggcacggaattttccagaatataatagcatctacaatctgaagcattctcttgctcatcttcaataatttcacatgccttttcatataaagccctaaactttttttgtaaaatatcctttattcccggattttcgttaaagtattgatttaataatccttcttgatagctccctacagtaagatttgcttcaatttcttcacttaaattattaaaggttattttttggacgaaatctggtacaaccaatttttctccagtactaattggcaattctgcattcaataaatatcttacaacttcattaagtgcatcatattctataatacaatctgacacatcaggaataaatcccactatctcctgcatatcattttcatctaacatgtcaaattttccttgcaaatcttttgctgtaaaagtttcaatttctatttctgaatataatggatttgatttcaattcgagagctttttgaattattggtgctggcaacccctcatatctatcatttacgacaaaataaaatttcttaattgcacatatattattccatttatcatacaaccctttaaaatctgtttctaatttttttaccgcatcacctactgttttttctttattaacatctctaggtgcataaacttgatagtaaatacctgtttggctaacaaatccatcattttttctatcacctatattaccatatgctttaaccggctgaaaatttggttccgctttcgtcataacaaaaacaaaaaaatcttcaaatgcctgtcctttatactgtaatattttaattctaaaaagtatatctgcaatatatctatcacctttttccaatataactatcccctttttcacttttgaatataactaaattattataacatgactttcattatttggtttataagttcatacaatttttcaaactttttcattaataattttctttcaccttttattgttctaatttatagatttcatttttcgcaatacgtatcattcctcgtaaaaccttctacattgtcactaccaaatgcgcatattacggtatattacggttttactaatattaattttttataatcttccttactgcgatattattgccgatatcacttactattctcatagctcgttcttcaaaaaagcttcttttcaatgcaaaaaatatgattgaaattgaaataaccttatatattcatgttataatttattgattttggggcatgttccaattcatataaacgtttaatcatcatatctatgacgcagtcattgtaacattcattacggctacaattgcttggtatattgcaaatcttataacccccattcactaaaattcttccttttttatcctttgacataagtttttgcatcctaatatccccttattcacaattatatttttacatagttcttgacaatcaaacatcttcttgctaccattctaatcaagaaatgggttttcaccgcacttattgttgtggcttgcccgtttcttttttcaattataaatacatcctttatccgacatagcagattcctgcacttgatttatcatttcatcataatatgccctataacgatacgctgtccttcggctgatttgaccttcttttacaatttccataattgtcatacccgcttcatacttaattgcaaattcctgataagaagccatccatgccgcattatgccttttacgtcctcctaaattacgtgccttaagacgctctatttcagccctaagttcttcattttctatttccaattcatcaatgtgcgtcattgcttcctctaaaatgcttatcacaaatgtccctccatccttttgtgtgtcattttggtttatggcactattataattgctgactgcaaatgtgtcaatttgatttttgacacgcaaatacttttactaaaaaacattacaagcgcacctgtttaaagacatcaaaacaataaaagcacatgaaaaagattttatattacactctttttcatgtgccattttcaaagacattcgctattttattatgataattaccctttgttataaacgcttttaatattctttttctaacttcctataatccacctttcccatcattgtcattggtaattcatctataaattcaaaatagtaaggaactgctctttcagccaattttgtagtacataattccctaatctcaccctctataattcccgtatctcttttgcactcatgtttcattaccaaaaatgctttcgggaccttgccatttgcgttatcctctatcccgataactgcacattcttcaatatctggatgctgagttatgacattctcaatcgaaggtggaaatattttaaaaccatcaaatctgataatcattctctccatcctactatctatagtaagcactccctgtttagacatatgacctatatctccggaatgtaaccacactttaccgtccttatgtcgttgtaacactttatccgttaattctttatttttaaaataccccaacataacacttggaccggttacacatatttctccttgctcatcatatgttaattctttatccgttcccggctcaaaaatactgattatattttttaccaaaggtatgcctacacttcctatctttctacatgtaggcatttctaaagttgccgtagatgcaagttccgacattccccaacctttatacaattttcctttagattttttacggattaactcatcttctatcttcttttctaaattctcgttaatcatatctccaccacaacccaaattgtggaaaaaagaaagatctttcaccgttttgctagacgttaaaacttcataattatgaggtactgtattgcagtgattaggtttatattttaaacacaatttaaccatattctctgcagtaactctaggttgcactatagtatatagtcctaatgacagcggcaaatgtacagacgcaaccattccaaatgctgcaaatgctggaattgccgtcaaaaatctctcccttctatttaattccagcgaagtaagtttatactgaaatgctagtgcattcaagttatcatttgataataaaattcccttgggcgttcccaccgttccactagaatgaaccaatagagccgacttatttttttcgtattctactactttacccttattgttctcctctaattcacaaaatttcttccatgtaataaacaaatcatcatgtagcgatttcttttgctttttcctgttttttatgtagtatcctatcttagtaactgttggcattgaatccgccgccgaaaccaatatcactttttgaatatttgtctcagatataatttccttaattttaaaataacaggcatcaaatagcaccaaaatttctgattcattttccttcaagtaaaatttcaattgatctttattggatcgtggatccagcatatctgaaattgcccctatgctattaagcgcataaaatgccactattgtttctactgttgttggcatgcaaatactgacaatatccccttttcctactcctaattgcgcaaactgactggcacacttatttattttatgaaacagttcttcgtaagtgattagtcttccaaaataattaattgccgtttcatttaatctatttttattacaaaggcaaatataatcataggccgtcatatggggaatttccacattgattgcctcatcactatagtatttcaaccatggtctatctatagagggataacctgtcatttcgtttcttgcttcttttttcat

SEQ ID NO: 201 - DNA, 14126 bp, unidentified
  source 1..14126: mol_type = unassigned DNA
atgtatttaaagagtcttgagatccagggattcaaatcatttgcaaacaagattgattttaaatttcataatggcattaccgggatcgtagggccaaacggaagcggaaagagcaacgtaggagatgcggttcgctgggtacttggtgagcagagtgccagacagctgcgaggaagcaacatgcaggatgtgattttttccggtacggaaaatcgaaaaccgctcggctttgcgtcggtttcgattacactggacaacgccgaccacaaactgccggtggattatgaggaagtgacggtcagccgccgcgtctaccgctccggcgagagcgaatatcgtttaaacggaacttcctgccgtctgaaagatattcaggagattttctacgacaccggtatcggaaaagagggttactccatcatcggccagggacagattgaaaagatcttaagcggcagaccggaagatcgaagagaattgtttgatgaggcagccgggattgtcaagttcaaacgaagaaaagcggcagccgtgaaaaagctggaggatgaaagagcgaaccttgtccgcgtaaacgatattctctcggaacttcagcgtcagctggttccgcttcagcatcaggcagaacaggcaaagatctacctgaagaaaaaagaagaattaaaaaagatcgatctgcatctatttctgctggaaatggagcagcggaaagcagaacttgcgaatctggatgaaaaacgaaagattgccgaagaacagctttctgatataaagaaagaatacgagacgatccgcatccattatgaaacagaagaaaaagcgatcgaggagctggaagagcggatcgagcagatccgggaacaggagcgacaaagtcagttgctccaccagcagctcaccggtcagatcgaagtcctgaaagagcagatccgggcacaggaggatcaggaagtccgcttaaaagagcgaaagagcgtgatcgagagcgaactttccagaaaagaaaaacagagaaaagcggaagaacaggcgtttttgcttgcaaaggaaaaacaggagcaggtttctttgacggaagcggactatcgcctggaagcggatgcgacgacggcgatgctctcccatctggaaatgcagatcgaggacgggaaaaatgaaatcatttcacttttgaatcagcgtgcttcggtgaaaggaaatgttcagcgatacgataccatgcaggaacagatgcagatccgaaaagcagaagtaaccggaaagctccttcggattggcagcgaagatgctagatggcaggagacgcttcaggaatatcagactgtctacgaaacggtgtcggaagagattgaaaaacagcttcgaaagagcaaagagcaggaagataagattgaacagctccagcagaaactggcagggcagaaccgggaactggaacagaaacagtctttctatcaccgggagaaatcaaggcttgagacactgagcaatttaacagaacgctatgatggatacggaaacagtatccggaaggtgatggagcagaaagacaaaaatccggggatcctcggcgttgtagccgatctgatcaaagtagaatcttcttatgagacggcaatcgagacggcacttggcggcagtatacagaatattgtgacggacagggaagagaccgcaaaacgcatgatcgaatttctgaaacgtggcaaatatggccgggctaccttccttccgctgactgccatcggaagaaaaggaaatgcaggaaacaaagatgccgtgaaagagccggggattttgggcgttgcgagcactctggtccggacagaagagaaataccgtgcactggtggaataccttcttggcaggacacttgtcgcagacaatatggatcatgcgatcgcagctgccaggaaatatcaccattctctgcggatcgttacgctggaaggagagtctttaagtccgggcggttccatgacaggtggtgcctaccgcaacagcagcaatcttctgggacgcagaagagaagttgaagagctgcaaaagaaagtacaggcactggaaaaagaatggaaagaattgcagctggaagtcgatgaaaaccgaaaaaaaaggaatgaacatcgcgaaacagttgtaattctgaatgaaaagcttcagaaagcctatgtttctcagaatacggcacgcatggagatccgccagatggaagaaaaacgggaagaatccaaagaagagctgacaaggcttcaggaagaatctgcccagttagacggcgaattaaagcagatcagccgggaaaaagaacagatcgaagaagctgtgaaagagtctgaaaaaagagaagcacagctgcaggaacagatcctgggatggcagaaagaacaggaagtccagagggcggagctggagcagcagaatgcccgcattgaaaagctgcatctggagcttgcaaatgccggacagaaagaagaatttgcagggcagaatctcaaacgtatcgaaaaagaaatccgaaatttaagggaagaagaaaaagagatcgggcagaaaaagcgggaaagtctggatgtcattgcagaaaaagaagcacagatccggcagattgaaagccgcattgcaggtacgaaagaccatggacgcgatcatggcaggcagctgcagaagcttcaggcacaaaaagaagagaaaagtgcggcacagaaaaccttttttacaaggcgggaggagctttccgggcagatcgcagatctggacaaagaaaacttccggcttgcatccatgcaggaaaagcttgaaaatcaaaaagaagagcggatcagtcagatctgggatgaatatcaggtgacaccttcggaagctgctgcgttccggaacgaaaacggcatggatcagaagcagaccagaaaacggatcgaggagatcaaagcagcgatccgccagatgggcaacatcaacgtcaatgcgatcgaagattacaaagagatgtcacagcggcatggatttcttcagaatcagcacgatgatctcatcaaagcagagaaagctttagaagagatcattctggagctggatgaagggatgcggaagcagttccgggagaattttgccaggatccaggtggaatttgacaaagctttttgtgaattgttcggaggcggcaaaggaacgctggagcttgtggatgatgaagatattctggaggcaggcatccggatcatctctcagccgccgggcaaaaaactgcagaatatgatgcagctctccggaggcgagaaggccttaacggcgatcgccctgctttttgctatccagcacctcaaaccgtccccgttctgtcttttggatgagatcgaggcggcactggatgaggcgaatgtcagccgctatgcaaattatctgcacaagttgacaaaaaatacacaatttattattattacacacagacgcggaacgatggcagcggccgaccggctgtatggcatcacgatgcaggaaaaaggaatctctgcactggtatcggtaaatctgatcgaagaggcactggatcagtgagaaaggaaagaagatgggtgagaaaaaaggattttttaagcgcctagtagaaggactgaccaagacaagaaacaatatcgtttccggtattgattctattttcagcggattttccgcaatagatgaggatttttatgaggagatcgaagaaatcctcatcatgggagatctcgggatcaatgcgacaaccgcgatcatagaagatctgaaacagaaggtgaaagagcagcacatcaaagagccttctgcctgcaaacagcttctgatcgacagcatcaaagcccagatgaatgtcggtgagacggcgtacgagtttgaaaaccgtcagtccgttgttctggtgatcggagtcaacggtgtcggtaagacaaccagcatcggaaaactggcaggaaaattaaaagaccagggaaagaaagtaattctggcggcagccgatacgttccgtgcggcagccggagaacagctgaccgaatgggcacaccgtgcaggagtggagatcatttccggacaggaaggatcggatccggcagccgttgtatacgatgcgatccaggcatccaaagcacgtcatgcagatgtattgctctgcgatacggcaggacgacttcataacaaaaagaatcttatggcagagcttggaaaaatcaaccgtgtgatcgaccgggaatatccggaagcttaccgcgagacactggttgtgctggacggtacaaccggtcagaatgcacttgcacaggcaagacaattttctgagattgctgatattaccggaatcattcttaccaaattggatggaacagccaaaggcggtatcgccgttgccatccattccgaacttggtatcccggtgaaatatattggcgtgggagagagtattgacgatctgcagaaattcgatgcagacgagttcgtaaatgcactttttgatgtgaaagattcagaagaagaggagtaaagacatgcttacattagacaaatttgaagaagcttcagaaatcgtaaaaaaagcaacacaggagacaaagctgatctacagtaaatatttcagtgagcagacaggaaacaaagtttatctgaaaccggaaaatatgcagacaaccggtgcttataaagtaagaggtgcttactataaaatcagcacactgagcgaagaagagagacagaaaggtctgattacagcctccgcaggaaaccatgcacagggcgttgcctatgcagcaaaagagtttggtgcaaaggcagtgatcgttatgccgacaaccacaccgctgatcaaagtaaaccgcaccaagagctacggcgcagaagtggttctctatggagatgtctatgatgaggcctgtgcctatgcactggaactggcagaaaaagaaggctatacctttatccatccgttcgatgatccggctgttgcaaccggtcagggaacgattgcaatggagatcatcaaagaactgccgctggttgattatatccttgttccgatcggaggaggcggactggcaaccggtgtctccacactggctaagatgctcaacccgaacatccgcgtgatcggtgtggaaccggcaggggcagcctgcatgaaagcttcccttcaggcaggagaagttgtgacactgccaaatgtcaatacgatcgcagacggcacggctgttaagacacctggtaaaaatgtgttcccgtatctgcagaaaaacctcgatgatatcatcaccattgaggacgatgatctgatcgttgccttccttgatatggttgaaaaccacaagatgatcgtagaaaactccggacttctgaccgtggcagccctgaaatatctggatgtaaaagacaaaaaagtggtatcgatcttaagcggcggaaacatggatgtgatcaccatgtcttctgttgtacagttaggtctgatccagagagaccgtatctttaccgtatctgttctgcttccggacaaagcaggagagctggttcgtgtggcaaccgttattgcaaatgaacagggaaatgtcatcaaactggatcacaatcagtttgtaagcacgaaccgcaatgcagccgtagagctgaagatcacactggaagcatttggaacggatcacaaagagcgcatcgtcaatgccctcaaagagcatggctataatccgaaagtgattcgcccgaatctttaaaaggaggggagcaatatgaaaatagcagtagcgggaacgggatatgtagggctttccaatgccctgctgctctcccagcacaatgatgtgtgggcagtcgatatcctgcaaagaaagattgatctgatcaataaagggaagtcaccgatcgtagacagagaaatcgaagaatttctggcaagagaggatctgcacctgacagcaacgacagatgcagaaaaagcttataaggatgctgattttgttatcattgcaaccccgacgaactacgatccgaagaaaaattatttcgacacatcttcgatcgaaacggtgatcgaactggtacagaaggtgaatccggataccgtgatggtgattaaatcaacggttccggtcggctatacaaaaggaatccgtgaaaaataccatacagaccatattctgttctcaccggaatttttaagagaaggacatgcactgtatgataatctgtatccttcccgtattattgtcggatcgccggagaatcagcgtgacaaggcacatgcatttgccgcacttcttcaggaaggggcgatcaagcaggagatcccgacactctttaccgatcttacggaagctgaggcagtcaaattgtttgcaaacacctaccttgccatgcgtgttgcatttttcaatgaactggatacttatgcagaggtaagagggcttgacagtaaacagatcattgaaggagtaggactggaccctcgtatcggcacgcattataataatccgtcttttggatatggcggatattgtcttccaaaggacaccaaacagctgcttgcaaactatcatgatgtcccaaataacatagtggcagcgatcgtagaagcaaaccgtaccagaaaagattttattgcagagcgcattattgaaaaaaatccaaagattgtaggagtataccgcctgacgatgaaaaccaattcagacaacttccgccagagctcgatccagggggttatgaagcggatcaaggcgaaggggatcgaagtggttgtatatgagccggcaatgaaagaagaaacgttctttaactcccgagtgatccgtgatcttaaggagtttaaagaagtaagcgatgtgatccttgccaaccgctgcagtgatgagattgcggatgtcatggacaaagtctatacaagagatctgtatttcagagactaaggaaaaatgaggagagataaataatgaaattaattatacaggtgccatgttataacgaggcacagacgctggaaattgcactgaatcatctgccaaaacatatcgacgggatcgatgagatcgagtatctgatcatcaacgacggaagccgtgacgataccgtcaaggttgcaaaaaactggggcgtgaactatgtagtcaatttccggacgaaccgcggactggcaaaggggttcatggcagggctggatgcctgcctgcgaaacggtgcggatatcattgtcaatactgatgccgatgatcagtactgcggagatgacatcgaaaaactggtgcgtccgattctggaggaaaaggcagatattgtgatcggtgaacgcccgatcgatgatactgagcatttttcaccgctcaagaaaaagcttcagcatttcggaagctggaccgtgcgtgtggcatccaaatccgatattcctgacgcaccgagcggtttccgtgcttatagccgtgacgcagcgatgcgtctgaatgtaacaaatgaatatacctacacactggagacgatcatccaggcaggacgcaccagaatggcaatggagtcggtgccgatccggactaatccggagcttcgtaaatccagactgttttccagtatgtttggttatgtgaagcgttccatggtgacaatcgtccgttcctttatgatgtacaaaccgctgcggttcttcctcgggatcggcagtgtgctctttctttgcggggcactgcttggtgtacgatttctgttctattatgcggcaggatccggaaacggtcatgtgcagtccctgatccttgcaagtatcctgatgctgatgggcttccagaccggcgtgatcggactgctggcagacatcattgcggcaaaccgcaagattttggaagatgtacagtatcatgcacgtaaactggattatgacagagagaaagaggaaaaataaaatgacaatgacgaaacaggacaggatttgtatgatctcactgtttgcggtaatgctggtgcttatgggagtgccggcattatgtctgagtacgaacaccgttgtggatgaacttggtactctgactaacacagcccttttgaccggaagaaactggggaacagggattataagcaatggtggattttattatcgttatggaatggcgtttgtgtggcttctgccgtttctgatctttaaagatccaatcatggtttacaaagccgcatcttttgtgaatgctttgtttatggcaacgacaccggtgatggcttattatatcagcagacgttacttaaagattgaaaaagaaaaggaagcggctcttctggcagccggttctacgatcatcagcagcgtgatgttccaggggatctatcttcgcggagacatgatgctgatcgtgctcaactgggtttgtgcacttcttattttaaatgcaatgtatgcaaaaaccagaaaagagcggcagatctatacgatactgctgagtttctgtgcagtttatgcctatgcatgccacagcagaggaatcgttatggtgatcgcgacggcgatgacggtattgctgatcccgttttttacaaaggaaaaagagagaagacttccgtacatcagcttttttggcagcatggcagtctttcttgtgatcgacaagattctggtgcgatattttaaacgaaccatatggggaagcagagcggcacatgcgaccggaatcccgaaagaatctctggaactgctgacaaaaataaaaggtatcaaatcttatattcgaatggcggtcggatggctgtataattctttcagctcgactcttggactggtatgcgtgggtctgatcgcctgcgtgatcatcgtatttctgatgtttcgccgttcgaaaaaggtcacatcggaagaaggcacactggcactgtttggattcttatcttatgcaggaagctttgttctcggaacggtattcttcctgaagagcgtcaaaaagaacttttacagttcttacggaatccgcgtggaccgaatcgtatacgaccgctatgtctgctgtgcattcggtgttctctgcatggtggcactttatgttctggtctggaaaagagatctgtttggcattaaggcaaaactgctttctgtggcaggatgcggtgttaccctggtactgtttgccagaatcactgccccatatctgaacaaccagagttttgtgcggaaatatatgggaatgttagttacctttgttaagaccaatgcaaaaagcgtgacattcaaaggagatcatgtatcaagcggggtaatcctgtttggcgttgtggcactgatcctgtttttattgatcctgtttctgtgtcagaaaaagaaaggataccaggcatgtgccctgaccttgcttgtctcggtactgctctttggctacaatgtaacaaacattacgatttccgaaagcaatacaagagaagcgagaatttcttccgcctcaaatctgattctgtccttcggagatatctataaagaatattcttatgtatggacagaaaaaacagcggcaccgatcaaatcgtatcaggtgcgtctgatggattatcatctgatcagcaaaaattatcagggttttgacgaaacagacaacgtgtttgtgatttcaaaacatctaccggatgaaaaacagtttcagaacggtgagtactatctgatcgacagcgaagattacaacaaaaaagaagactttgtctatgtcaaaggaagcgaactgaaagatgcactggagaagagaggtgtttctctgagtgcttatacaggatgacagacgggaggaaagtatgaaagaagtggtgatcgccattacggcagccagttacagcggaaacaaaggagcggcagcgatgctgcaaagctccatccgtcagctttatgaaaaatatggaacacgtttgaaaatcaatctgatgtctgtttatccggaagaagataaagaacagatcccgtgggattttatccggatcgtttcctgtaaaccggaacagcttttgtttatcgcgtttccgctggcagttctctataaagtatttcattttctgcctccggtaaagagtctgcttttgaagaataaaattctgcgggcatattatgagacggatgccgttctggatgaagcggggatctcttttgtggacagccgcggatttgtgatgaatacttatggttttgtgtgtgcggccgtgccgatgctgatgggcacaccggttctgaaatattctcaggcaatgggaacctttcactctttctggaatcgttttctggcaaaatggattcttccgaagatgcggctgatctgtgccagaggaaagggaacccttgacaatctgaaagggatcggcattgagaagaatgtaaaactctgtgcggacggagcgtttacgatggcagatgatccatattatctgaaacaggttgaagcagaagcacagaaggatgcctttttcaatgataaagtggttggactgtcgatcagctcggttgttcggaaaaaatgtgataagctcgggattgattatccgaagatcatgacggattttattgaccgtctcaacgaggatggatggaacgtactgatcatcgcaaacggtgcgagaatacacagcgacaaaccgcgaaacaacgatcttccggtctgcgatgcggtctatgaaagcgtgaaaaacaaagagatggtcagatggtaccacaaagaaatgacggcagaagaaatccgtgcgtacatcgggaaatgccgttttctggttgcttccagattccatgccatgatcggtgctcttcagcagaaagtgccggtgcttctggtgggatggagccataaatatcaggaagtgctggatttttttgagcttgggcagtatgcgatcgatttttccgatctgacggcagagtccctgcaaaaggaatttgagaaattcattcaggaagaagagacgatccgcggcaagctggatgaacattatgaagaagtcatggaaagttccaagaaaaacattgtttatgtttctgagattgtagatgaaatagtaggagaatgatcggttatggaagaaaatacacaggtaaaaaaagaagacgcggaaatcctagaaaacgaacagaagggcggaaagaagaaatggatgaaatatgccaagatcggatttttactgctggttgctgtttttctggttcgctatttttataaaaattatgattcctataaaaatctggacgttgagatcaactggctggtatttacgggagcggtgctgttttatttcctttataaagtgacactggcttctttatggcactatatcacaaagttaaatcactgttcaatcaagtatttcaaggcaatcacagcatatctgtattccattctcggaaaatacattccgggaaaagtttttatgctgcttgcccgcgtgccggcatacgaagaaggaggagcaccgatccggaaagtgacggtctgctttttccttgagaatatctgtacgcttctcggagctgcatttttgtttttggtttcgctgttcttttttccgaacgacctgctcaatgattacaaatggctgacgatcggtctggtgatcctgttttttatctgcatcaacccgaagatcatcaactttttcctgaagatccttgagcggtttattaagaaaaaagatctttcgattccgatcacctatgggcagatgatcaaagttgtattgctgtttatctgcaactggctggtcgttggtgtcggattctatatgctggtatgctccatctatccggttccgacatcagagtttctctatgtggccggaatttacggactgtcctgtatcatcggaattcttgctgtatttgcaccgtccggtcttggcgtaagggaaggtatcatgctgcttggacttggtcttgttatgccaaaagaatatgctgtgattatttctattatatccagactgtggcagactgttgcggaactcattttgattgcaattgcttttattgtaaataagattatggaatttcggaaaaaaaagaagaaaacagcttgatctgaaataaaaaaagaaaaagccatcatgtcaagaaaaaatacttgacacggtggcttctttcgtgtatgataaccaaggtgattgcagtggaaaagattttagagcagacattattgtatgatttttatggtgaactgcttacagagcatcaacagaaaatatacgaggatgtagtattcaacgatatttcctgcagtgaagttgcagagaatcagggaatcagcagacagggtgtgcacgatctgatcaaacggtgcggacatatcctggatgattacgagacaaaactgcatctggttgagagatttgtaagtctgaaagaaaaggtggaagccataaggatggcggcagatgatccggaagaagtaaggaagatttcggatgagctgctgaaagaattataaaaccgactgacggtggaggttacgatggcatttgaaagtttatcggataaactgcagaatatatttaaaaaccttcgcggcaagggaagactgacagaggcagatgtcaagacagcactgaaagaagtaaagcttgctcttctggaagcggatgtcagctttaaagtcgtgaagcagtttataaaagcggttcaggagcgtgcaatcggtcaggacgtgatgaacggactgaatccgggccagatggttatcaagatcgtaaatgacgagctggtaaacctgatgggatctgagacgactgagatcgcactgcgtccggcaagtgaagttactgtgatcatgatggcaggtcttcagggagccggaaaaactacaacaactgcgaagctcgcaggcaaatttaaatcaaaaggcagaaagccgcttctggtagcgtgtgacgtgtatcgtccggcagctatcacgcagcttcagataaatggtgagaaacagggtgtggaagttttctccatgggagacaagcagaacccggtcaatatcgccaaagcagctgtagaacatgcaaagagtcacggatttaatgtcgtgatcctcgatacagcaggacgccttcatgtcgatgaagcgatgatggaggagttacagaacatcaaagaagccgttcatgttgatcagacgatcctggtggtggatgcaatgaccggacaggatgcagtcaatgtggcagacagcttcaatcagaaacttgagcttgacggtgtcatccttacaaagctggatggagacaccagaggcggtgcggcactgtcgatcaaggcaacctgcggcaaaccgatcctctatgttggtatgggcgagaagttgtccgatctggaacagttctatccggagcgtatggcatccaggattttaggcatgggcgatgtgatgacgctcatcgagaaagcacaggccaatatcgacgaagacaaagccagagaaatggaacagaaactgaaaaaagcacagtttggtttcgatgattatctggagagcatggctcaggttaaaaatatgggaggcatatccagtatcttaagtatgatgccgggtattggcaataaagcagcagatatcgaggctgcggtggatgagtccaagatggcacgcatcgaggcgatcatcctctccatgacaccgaaagagcgttccaatccggatctgttaaatccgtccagaaagaaacgtatcgcaaaaggtgcaggtgtggacatcagcgaagtcaacaaactggtcaaacagttcgaacagacacgcaagatgatgaaacagttccctggtatgatgggaggcaagggtgcaaaacgcggcaggttcaagcttccgttttagcacataaagaatgcagagaagctgccaaaggcaggttttcatagatatcaaagatataaaaatactgaggaggtgaaagtaatggcagtaaagatcagattaagaagaatgggagaaaagaaaaatcctttctatagaatcgttgtagctgattctcgttccccgagagatggaagattcatcgaggagatcggtacctacaatccgaacatcgaaccgagtgaattcaaggtagatgaggagctggcaaagaaatggctggcaaatggtgcacagccgacagaggtagtaggaaagctcttcaaaatcgccggtattgaaaaataa

SEQ ID NO: 202 - DNA, 13831 bp, unidentified
  source 1..13831: mol_type = unassigned DNA
ttaatcatccagaacagaatctaaaatcgcaatcattttatccacatcgcttttttcaataataagcggcggaataaaacgaatgacatttgcgcctgcgctcatgaaaatgacgcctttttccaatgcctttgtaatataaggaccggcaggaacggaaagttccaagccacgcatcagtcccataccacgtgtctcaacagcaatttcttttttctccaccaatttctgcagacactcaccaagatactctccaacttcttctacatggtttggaatctctctcttttcaaaaatttccaatgtctttgctactgctgcgcaggcaagtggatttccgccaaatgtcgtgccatggtctcccggcacgagacattttgccacttcttctttcgcagcaatcgcacctaccgtaattccatttccgattccttttgccatcgtcacgatatccggcacaatatcgtatttttggtacgcaaacatcttaccggaacgtcccataccacactgaatttcatcacaaatcataacgatatcattttcatcacacaatttacggattccctgtaaaaattcagcgtttgcaggataaattccaccttcgccctgaacggcttccacaatgatggcatatgtattttctgtaaccgctgcttttacactctcgaaatcgttgtaatcagcaaatgtaacaccctgtaacatcggttcaaaaggctctctgtattttgccgtaccggtaacggacaatgctcccatgcttcgtccgtgaaatgctttattcatcgagataatctcatgacgattttcatgcccctgcataatggcatattttcgtgccattttcaaagcgccctcattggcttccgtaccgctgtttgccataaatacacggtcaagtccggttgcctttgcaagacctttcgctgcctgcaataatggctccgaataaaaatagttagaaaaatgaattcctttatcaatctgtgctttcaaagcatctgtgtattccttatctccatagcccaatgcacaaacggcaattccggcaccaaaatccaaatattcttttccgtctgtatcgtataatttcacgccatctccatgatctaacacaaccggataacggttatacgaatgaactaaatacttctctgattcatctatcatctgtttcatatcacatgctccttcctaatcctgctcatgcggatacaatgttgtgtggttatcaataattgctgtaccaataccttttttggtaaagaactcaagtaacagacaatgctgtctgcgtccgtccagaatatggacacggcttacaccttcttctaccgcttccacacagtttcttattttcggaatcataccaccgccaatggttccatcctcaatcaactgttttgcctcatcagttgtcaatacagaaatcaatgtttccgggtctttcgggtctttgcagacaccctcaatatctgtcataaatgccagtttttctgcatgaatacactttgcaactgcacttgccgcatcatccgcattaatgttatatgcctgataattttcatccataccaatcggcgcaataatcggaataaaatctttggcaatcaaagtgtcaatcaaatcggaattaacagattttacttttcccacaaaaccgatatctcttccaccggctgtttttttctcacagagcattgtgccgccgtcttttccactgatgccggctgcctttacgccaagtttctccatcatctggactaaatgcttatttaccttatttaaaaccatttctgccacttcaatcgtatcggcatctgtcacacgaagtccttctacaaattcactctcttttcccatatagccaagccatttgctaatttcttttccgccgccgtgaacaataatcggctgcatgccaaccaatttcaacaaagcaacatctttaatcactgattcctgcaatttttcatccagcatagcgcttccaccgtattttacaactactttttttccgttgaaatcacggatataaggcagtgcctcaatcagcgtttccgccttaagtacaacttctttcattttatcttccatctttttgtcctctctaacttctgtaatcgccatttatttttacataatcataagtcaaatcgcatccccaggcaattgccgatgcatccccctgcttcatgtcgcaaataaatgtaactgcatcttttcctaataaaatagtcgcctcatcttcactgtaatctgtcggcacaccatcttttactaaaacaatctgctcatcctcagcttctaaaatcaaatcgattacatccgggtcaaagtctgcaccggaataccccagtgcgcacaaaacacgtccccagttcgcatccttgccaaacaccattgctttcacgaggtttgaagtcacaaccgatttactaaaaatctttgcctcttctttattcttacagtgaactgctcttacttccatcagcctcgtagcgccttctccgtccgctgccatctgttttgccaaatccgttgcaacaaaactcagtgcctctttgaattttacatatccattcgttcctgctttgatttcaacaccggattcgccattggcaagcaccagatatgtatcatttgttgatgtatcgcggtcaaccgaaatcatattaaaactatctgacacaatttcggaaaccatttcctgcagtaaatcatgtgaaatttttgcatctgttgtcgtaacgctaagcatcgttgccatattcgggtgaatcataccggagcctttgctcatgccaccaactgttacggttactccgtccacctcaaaactggctgccgcttctttcggaacagtgtccgttgtcataattgccttagccgcaagcagacctgcttcttttgtatctgccagtgcatcctttaaaagttttgcacctttttgtagcggttctttttttatctgcattccgataacgccggttgaagctgtcaaaacctcttttgtcgaaacaccaagtgcctctgcaatttgtgaagccatgtactcattaatttctttaccttcgcctccggtacaggcattggcaattccactatttaatacgaccgcatgaacatcctttttgctctcaacaatttctttatcccaccaaaccggtgctgcctttactacattcgttgtaaaagttcctgcacagaccgccgggctttctgtatagacaagggccatatctgtacggtttttatatttaattcctgcctctgcgctcgccgccataaatccttttgctgctgtaacgccgccttctattgtattcatcatattttcctcctttacggaaccatcggtacaagccggagcccctctgcctcatcaaatccaaacatcagattcatgttttgaactgcctgtccggcagcaccttttgtgatattatccattgctcccatcataatcacgcgatgcgtgcgctcgtcaacttttacatttacatcgacaaagttgcttccctcaacccatttggtctccggacacacaccctcatccagcacgcgcacaaaatattcatcttgatatgctttcacataagcctctcgaatctgctctcttgtcacaccttctttgtattttgcatatgccgtaaccaaaataccacgattcattggaatcaaatgcggagtaaaattaagtgtaacatcttttccgctaatataggaaagctgttcttcaatctccggtgtgtggcggtgcgtggctactccatatgccttaatattctcatttacttcgcagtaaagatttggaacttttgcacctcttcctgcccctgatgttccggattttgcatcaataattaaagtatccatatcaatcagtccttctcttgcaagcggtgcaatcgaaagtgttgaacaggttggatagcatcccggattagcaattaaacgtgcctttttaacctgcttgcggtttaactcacacaatccgtatacagcctcatccaaatactgagggcttttatgtgtgatgccgtaccatttttcataaaccgcaacatcttttattcggtaatccgcactcaagtcaatcacctttgcctgggaaaggatttcgtcatccagaacacctgccaaatacccctgcggtgttgcggtaaatatcacgtctgcctcttttgccaaagtatgtaaatcatcacttttacaaatattttctacaatctgaaaaacatttccaaaaacggaactaaatttcttatccacatagcttctcgaaccataccatacaatctcaacttctttgtgctgcaataataatcgaaccaattcctgtcctgcgtaccctgtagcaccgataattccagcctttatcatagcatcctccattccgccgtactttggcagctcactctttttattcatcatttatgcatatttatacatattatacacaaacctcaattattatacatcttttccaataaatatgcaatacctaactagaatttattcgttattctttgaaaataattgattttatgcttgcataatattcacttgtggtgtatattagaaaaaggttaataccaaaaaatacatacggaggttctattatgaaagaaaaagttattttagcttattccggcggtctggatacaacagcaattattccatggcttaaagagaattttgattatgaagttatctgtgtctgcattgattgtggacagggtgaagaattggacggtctggaagaaagagctaagttctgtggtgcatccaagctttacattgaggatgttgtcgatgagttctgtgatgaatatgtagttccttgtgtacaggctcatgctgtatatgagaacaaataccttcttggtacttcgatggctcgtccggttattgcaaaacgtcttgttgaaattgcaagaaaagaaggcgctactgctatctgccatggtgctaccggaaaaggaaatgaccagattcgtttcgaactcggtatcaaagcacttgctcctgatttgaaaattattgcagcttggagaagtgataaatggacaatggattcccgtgaatccgaaattgaatattgcaaggcacatggaattgatcttccattctccgcagattccagttacagccgtgaccgcaacttgtggcatatcagccatgaaggtcttgaattggaagacccggcaaacgagcctaacttcgatcatcttctggttcttggtactacaccggaaaaagcaccggatgaaggtgaatatgtaactatgacatttgaagccggcgttcctaagagcgtaaacggaaaagaaatgaaagtttccgatattatccgcactctgaatgaattaggtggaaaacatggtatcggtattgttgatatcgtagaaaaccgcgttgttggaatgaaatcccgtggtgtttatgaaactcctggcggaacaattctttacgaagctcatcagcagttggaagaattaatccttgaccgcgatacaacaacattgaaaatggatatggggaataaacttgctcagatttgttacgaaggcaaatggttctctcctctgcgcgaggcagttcaggcatttattgagtccacacagaaatatgtaaccggcgaagttaaattcaaactgtacaaaggaaacattatcaaagccggaaccacttcaccatacagcttgtacaatgaaagcattgcaagttttacaaccggagatttgtatgaccatcatgatgcagaaggtttcattaacctctttggtctttctaccaaagttcgcgcaatgaagatggcagaagtagaaaagaataataagtaaacaaccgtattgttgtaaataataaaacagccttccatccaatgatgtgaaggctgttttattatctttttatatcactgatatatcagaagattttatgcatcttcattggtatcttcttctgctaactgttcgtattcatccgtagaaccaaactcagcaaattcagagaagtccccatcctcatatgatgctgccgcttcatcttcctctacatcagcagatccctcaacttcatcattctccgtttcaactgcttcgtcgtcaacagtttcactttcctctgcatcgtccgaaatcgtaagataaacgtcatcatctaccccagtttccacatcctctgctgcttctgtttcctcataagattcagattcttctacgacatcttcataatcaacggccgctgaaacatcctcatccgcctctgtcacaaatttagcaacttcagaatccaaacgacggcttacatcctctgttacacgaatgcttgtctgaatatccatcatactatccgtcaatgtagttacagactcagatacaccggatacctgattggaactatcattaatcgtctctgaaatttcatgtatcagtgttgccatctcatgcatcgtatctttcaatgcggttgcactgtcagcaaactgaagcatcaatgtatcaatacgatttgcatcgtcgttatactggttaccggtatttacaagattatcataatccggcatgacctcattttgaataaacgtcagcatcttattagcattgtctgcaagctctcctactgaagaatttacttccaaactgatatcctgaatgttatttgctgtctcacggctcgaatctgccagtttacgaatctcatcagccactacagcaaatcccttaccaacctcgccggcacgtgctgcttcaatggatgcattcaatgcaagcaggtttgtctgagaagaaatctccaaaatatcatttgtcaatacattaatcttttcaacatctttactcttttcaagagaactctgaagcagtgtattaatttcacttgccatctctgccgtcatcttacggcgtttctgaccactctcctgcaatgcattcgcacggtctttaatttcctttgcgaaatcagaaccattatttgcctcaccggcaatatgctccattgcttcataaacacgtcctgcctggtcattcaaatggtcggcatggtttgcaacctcttccattccggcagaaagtttttccattacctcagataccagtttgatatcgccattcgatgtatttacaccattaaacacctgctcaacattaccctgcagctcaacggcatcggatttgatttccataataatgtcgcggagtaaatcaataaacttattaattccgacaaccagtgttcccacttcatcttttgtttttacctgaatctgggatgtgaggtcaccgtggtcttgttcaatacttcgtacaataccgttcaagtgacgaattgcatgtttggttggacgaaggattgtcgctacaaccattaaaatacagaatacaatagaaacaaccaacaaagcaatcaaaacaacaaatgctaatgtactctgtgatgcagctgcactaagtgctccctgcgaatcctctactttctggctgttcaccttctgcatgtcatcaatagcactctgaaatttcttgtagataggctctaccgcttcattcaaattcttcatgccattcagttcataatcatcaattgcctttttcgatttctggtaagactcactaaatgttgcatacgcagctttatagtcttttaaagcatcggcttcaccactgtcagaactcttctctgcaataacagaaatattcttatccatgcgttctgtggcttctttaatatcctttgataactgttttaaatcatcgtcatcaaatgcagtcacatagcgagccagcttatactgaagcaatataaaatctgactccatctctcctgtcttctccgttatcgtcatgtaattgtcgctaatcgacttggttgcccggttcatctgtgcaatctttgaataaatcaatgtagaacacagtccacatacaattgcaagaatacaaaacggcaccatgattttcaatccaattgacttcctcataacaaatctcctttttatgtaattatatagttatacactctattcagattataacatcataccttaaaaaaaacaagaaagaatgtcttaaatcgacactctttccctaaaaaaattcattattaactttttatttattaatgtctctcacatcatatggcgtactctgatatacataatagttaagccagttactgtagaacaattgaccggcagaacgccagcggacaaccggctttttctccgggtcatcatccggaaaataattagccggaatactcggattcattcccttatctaggtcacgaaaatattcttttgccagtgtatctgaatcatactccaaatgtcccgtcataaaaaactgtctgctgtcttctgtttttataaccgccacacctgctgcgtctgatacggcaagcacttccagctccggaattttctcaacatcttctctgtttaccgtcatcgcacgtgactgcggacagtcaaaaatatcatcaaaaccgcgaaacagcggagaactttttttcagcacccgatgtttgtacacgccggataatttttcctctctgtcgactctctcaataccatagtgataatataaaccggcaaatgcagcccaacacatgtaaagagtacaatgaacatgcttctttgaccactccataatgtttgttaactcatcccagtaatccacatcttcaaatttggtatagtcaagcggtgctcctgtaataatcataccatcaaaattacggtctttgatgtcatcaaatacacgataaaaggtttccaaatggcttggtgccacatgcgtcggcttataactgctcgtctgcataaactccacatccacctgcagcggtgtattggacaatttacgcaaaagctgtgtttctgtctcaatctttgtcggcataaggtttaaaatcaatacatgcagcggtcgaatatcctgatgcattgcacgatactccgtcattacaaatatattttcattttccagaattttctgggcaggtagtgaatcctgaattttaataggcacaattaccactcctaacttatttgataatatttgccattgtaacacaaccagatactgtttgcaaggcttgcggttattctctcatgcatcctgacataatacaaataccgcttgcacctttacgcatgacttccggctctctctcctttgtcatgccgccaatagcatagacaggaacctctgaattatcgcaaatatttttcaaaaatgataatcctctcggcggtaaatcttttttgcagtccgtagcaaatatgtgaccggcaattacaaaatccatcgaatatgcctctgcctcttttaactgctccagagaatgaatagacgtactcatttccttcacagactttctaagattttccctttccttttgagacatctgtgccataaccgaaagcggcatatgcacaaaaggatgaaaaagagaaagtgccgccttgtaatccctatgcaaaatacattttttccctgccaaatttgtgattttcaaaactttcttagcaagttcttcatattcctcatgggataaatctttttcccgcaaaaggatggcattatattcatcgccttgtgcgatctgccggattctttccaagaaatccccctcacacagatgacggtttgttactgctattctatacataaatataatcactcataaccggctgaagtccatgctccaaaatcgcatcataaacttcctgcacatttctggtgtcatcaatttcaaactgttcgtcgccctgctcttctccgcttctgccaccaattccgacatctacaccggcagatatctttgtcgcacaaatttgaatcagattatcacggacacgtttacattcacgagtggaaaccgtaatggaagcaaacggcaaaagcagacggtaagcacacacaacctgtaataactgcgcttcgtgtacatccatcggattaattctgtcattattaatgattggacgaagtcttggacaggaaaatgcaatttctgcctgtggatacttgcgctgcaataaataggcatgaattcctgttgcaaatgcatcttttctaaaatcatcaaggcctaacaaagcagcaaaaccaacgcctcgcattcctccctttaaggcacgttcctgtgcatttaaacggtatgggaaaatgcgttttttgcctgccagatgaagcgtttcatatttatccgaattataggtctcctgaaatacggtaacataatcggcaccacattcatgccagtatgcataattctctgaattagtcggatatacttctaagccgataaccttgaaatattttcttgcaatcttgcaagcctctcctatgtattttacatccgacattttcccgctctcaccggtcaaaatcaaaatttcctgcaaaccggattttgcaatttcaaccatttcacgttcaattccctcggcatcaagtttcgcacgacggattttattatggcagttaaaaccacagtaaatacaataattctcacagtaatttgcaatataaagcggtgtaaacatcataatggaattaccaaaatgtttccttgtctccttctgtgccatctgtgcaatttcttccaaaaaaggaagggcagccggtgacaaaagtgctgcaaaatcttcgggtgtacgattgtctttataaatcgcgcggcggacatccgcagctgtataagaatcataatcgtaggcattcattgcgtccactaccgttttctcaacatcggaatccaaaacttccattccctctaaatatgtcatgtggtcaattcggttttctttcatatcttccagaattgtttcacttaatatactctcatttactttatccatgtcgtcctccaactatctttatttcgttttaaaactgccatcctgaatatagccggtcagcggtgaagatgcacttcctccacgctctaacacgcgtcctgtaccggcaagataagcctttcttcctgcctcaattgcaagtttaaatgcctctgccatagccgggatatctccagctgtcgcaataccggtattcgccataattgcggcagctcccatttccattgcagcacatgcttcagatggttttccaatgccggcatccacaataatcggaagattaatttcatcaatcaaaatctgaatgaattcttttgtacaaagacctttgttcgagccaatcggtgcagccaaaggcataatcgatgcagcaccggcattcatcaaatcacgtgccacattcaaatccggatacatgtaaggcataactacaaatccttcttttgcaagaatttctgtcgccttgatggtttcctgattatccggaagcaaatatttggaatctctcataatctcaatttttacaaaattgccacagccaacttctcttgacaagcgtgcaatacgaactgcttcgtcagcatttctcgcaccggatgtattcggaagcaaggtaacaccttccggaatataatctaaaatatttgcacgtccatcctgattcgcacggcgaagcgccaatgtaataatctgtgcaccggcattttcaaccgatgccttgattaaatccagtgaatattttccggagcctaagatgaaacgggaagaaaactcctgtccaccaagcataaaagtatctttattttccatgttcttatcctctcaatctttgtatttgaatttacattttacatgtcaggggtttgacagggttgttttatcaacctccaccaacaaaacttaccacttcaatcacatcattttcttttatctgaaccgtttcgtaatctttctttggaataatctcaccgttgatttcgaccgcaattttgttcttctcaaaattttgttttgcgataaaatcttccagtgataatccttcacagtctgaaacctggtttccattcaagcaaatcatatcgtctctcctttctcttctgatacaacaaaaggataccacaaaaaaagtccacacccgaggtggtgtgccccttcttgagatatcctcaatctactctcaactatatcatgaatggtagggggtgtcaagtgggtttgttggcagtgtttgttgcccctttttttgttttccgtaattccggcagaaaagttttgcgtctcgtgggcactcccgttaattgagtgcgtagcggtatgggcactgaaactaccagtgccacataccgacgtactcaaaacccacgagccacaaaatttttctgccggaattactggaagccaaagaaactggcagcgaacatttaacttaaaccatatcttatccatcctcacaacttccaaaaaaactgtatgtttgaagacagaaaattttcttcttctctttcgctttgtcaataagaattatatgttatggtttgtatcaaacaattaatgttagtttttcaagattccaacaattcacaaagaaaagatttatgtctcatgggtacgaatgcgcgggtatccggcttgcgtattttgcatgccgatacccctgcgtattcgtcttagcgggagcgcccatgagacataaacttttctttgtgaattgtggaaactgaaataagcatccataaatatttatcacaaactatatcaactgtatcttacactaattcatagcagtgtcgagaagaattatatttctaactgcttctactgagtcagcaacaaagtcagctccggcctcttccagttcttctctactgccgtaaccaaataatacaccggcgcaatcgattccgtttttctttgccccgatgatgtcatgggagcggtcgccgaccataagaattttcttattattatattctgccggaatctgttttagggcgtaagcaatgacttctgctttgtctgtgcgggttccgtccatatttgccccggcgatataatgaaaataagttctcagtttataataatcgagaatttttttcgcatatatctctggttttgaagtggcaacgagacagagaatcccctgttttgttaaaacacgaagaagctcttttattcccggatatacttcattttcgaacattcccttttcttcataatattctctgtaataggaaacggcctgtatggcctgttcccttgaaaaagaataaaatttctcataagactcgtgcagtggcggtccaataaaacgataaagagattcccgtggctgtccttcaattccatattttttcagagaatacatcaccgaattggttattccaagtccgggatttgtcaatgttccatctaaatcaaatagtacaatgggatatctcacttttttatctccttcttccaaagtttagtcatttcttctacaacctcacgaatcgattttccttcgcagtctactacataatcagcatatttttcgtataacggttttctttcctcatataaatccagtaaagtctgttctttgcggatagaaacgccgcgctccgacaaatctcccagacgatttttcaactcttcataagataatttcaaataaaaaaccgcaccgatttcatgcagatgctgcatagcttcctttccatacactgcacttccgccggttgcaataattgttcttttcacatcaatagatgcgtttacttgattttctatctcattaaatccgtcaagtccttctttttcaataatttcatgaagaatgcacccctctctctcctgaatcaccaaatcagagtcaagaaaagagagtcctaatctttttgcaagtacaacaccaactgtactttttcccgctcccggcataccaatcagtacaatattttctttcat

SEQ ID NO: 203 - DNA, 13277 bp, unidentified
  source 1..13277: mol_type = unassigned DNA
ttacttcttatcgttttcgcgaatctccacccggcggatcttaccgctgattgtcttaggaagctcttctacaaactcgatcacacgcggatatttataaggagcagtcactttcttcacgtggttctgtaattccttaatcagttcttctccggcacgtgctttatagtctttggatagaacaatcgtagcttttactacctggccgcgaatctcgtcgggtactccggtaatagcacattccacaacagccggatgagtcatcaacgcactttccacttcgaatgggccgatgcggtaaccggaactcttgattacgtcgtctgcacgaccgacaaaccaaaggtagccgtcctcgtctttccaggcaacatcgccggtgtaataaataccatcgtgccaagcttcatgagtgcgttccgcatcccggtagtattctttgaaaagtccgagaggtttacctttgctggtgcggattacaatttgtccttgttcacccgcttcaacagagcgaccttcatggtcgatcaagtctacatcatattgaggattcggcagccccatgcttcccggtttcggttccatccaaggcatggtggagatggtgagggttgtttctgtttgtccgaaaccttccatcagtttgatacccgtcagcttcttgaaagtttcaaatacggcagggttcaatgcctctccggcaatggtgcagtatttaagtgaagacaagtcgtactttgtcaggtcttcgtgaatcaagaaccggaagatggtaggaggtgcacagagagaggtgacatgatattcctggattttttccagaatagctgccggggtaaacttctcgtggtcgtagacgaagatattggctccggcaatccactgtccgtagagttttccccatactgcttttccccagccggtatcggcaatggtgaggtgaagactgttctcgtccaggttgtgccaaaaactaccggtaacgatatgacctaacggataagtaaagtcatgtgccaccatcttaggttcgccggtagtgccggaagtaaaatacatcagagagatgtcatcattagtattcgcatggcgcggacgtacaaacggagcagcattttcgataccctgatggaaatcttcgaagccttccgggatttccggaccgacactgactaacttttcaaccgtgggacattcgggaagagcatctttgatatgttgcaggatgattccttcgccggcagctacgatcattttgatgtcggcagcattgcagcgatagataatatccttcttggtcagcaagtgagtagccggaatgacagttgctcctagtttgtgaagagcgatggtgctataccagaactcataacggcgtttcagaatcagcatcaccatgtcgccacggccgatacccaggctctggaagtaagaagcggtcatgtccgtagatcgtttcatgtcggcaaatgagaattggcgactttcgcctttgtcatttgtccaaagtaaagcgttcttgtcaggttgttcggctgcccaggcatctactacgtcataaccgaagttgaagttctccgggacgtttattttcaaattcttgttgaagtcctcttgtgagctgaaagaggtctgtgataaaaatctttctaccatgatgttgttacataattactgccagaaaacgtaccgttttgccatcgagcgctttcatgccatgtggaagtttagagttaaaataaatactgtctccttgattgaggatgatttctttgccttcgatgttgataagcatacgtccttcgatgacaaggttgaattcctgtccattatgtttgttataatggatcggctcgtcgattgctttcggttcaacggtaacgatgaacggatcggcggtacggttcatgaatcctgaagccagtgactggtatttataagctttggtacgttcaatgctgatacctttgccggcacgagtcacaaagtagctgctcattttaggttcttcgccaaacatcagagcgtcgagggctacattatacgtacgggctattttttgtaacatgctgacagagatgtcgtaatctcctgtttccgcaagccggtattcttcagcagaaatgtcactatcgcgggcgatatcctctgcggtcagttccaatacatcacgtaatccgcggaggcgttctgctatctgtttaatttgttcattcatacaaatggttagtattttatgattaataattctatggtgttatttggaagctttcatggctttgataatagcagaggtgaagccgttgtgttctaattcattgatacccttgatggtgattccgcccggagtggttactttgtcgatttctacgctggggtgggtgtcgttgttctgaatcagtgcggccgctccttttaaggattgggctatcatctgcatggcatctttagggcggagtcccatttcgattccggcttgcatggctgcctgaatgtatttcagtacgtaagcgataccgcaggatgccaatgcggtggctgccgctattttatcttcggggataagcatcactgttcccatctcgctaaataaccggaggatgaagttgtcttgttcatcattcgtgttgcgcgcggcaacaagcgtcatgctttccagttcgctgatagcggtgttcggaatcagacggaacatgggcatttccggtgctacgacataatgagccagttcttcaaaactgatgccggcagctacggagatgagtatctgtttgctttttaatttcaactcgcgcatcaccgattccataaaccacggtttgacggcaaggatgacaatgtctgctcctgtggctgcttccagattattgttggtggtggagatacccggaaattcttttttcagtttctctagttttccggcactgggattggatacaatgatatccgaatcgtctatcagacttccttttgccaggccacgggctattgaaccgcccatgtttcctgcaccgataatggctattttcatatacgcttgtttttaatgagttgttacagacaaaggtaacagttaattacgaaaaaacaaaaagcagccagaataagaaataaatttctaataaaggctgcttttatcgttggctgtttattaatcaaatgagcggttagagtacttttttgaaccgggcgaggaactctttcgcttcctccatgctgagacagagaggaggtaacaggcgaagtacattcgtgccgcttgctccggtaaatacatgctcgtcatagatgagacggctgcgtagttccttgatcggttcttcaaattcgaggccgatcattagtccgcgtccgcgcacttctttgatttgcgggaattttttcagctcttccagtaagtaatcacctactgccttagcattttctaccagattttcctgttcaatgacatccatcacagcgagagctgccgaacatgccaggtgatttcctccaaaagtagttcccaactggccatataccggtttaaacatcgggctgattaagacacctgccattggaaagccgttaccgattcctttggctacagtgatgatatccggcttaatgtcattatattgatgagcgaagaatttaccgctacgcccgtatccgctctgaatttcatcgagaatcaggatcgttcctgtttcgctgcaagctttgcggagttcctgcataaattcggtggttggtatcttgataccgcctacaccttgtattccttcaatgataacagcgcatgtgtctcctttagacaattcctgtttcatcgcttccacatcgttgagtgggagataggtgacatgaccgttattgttgataggagcgataatagaaggattgtgagtcgcttctactgcaagagacgtccgtccgtggaatgctttattgaaagatacaatcttagtacgtccgttgtggaaagaagcaagtttcagagcattctcgtttgcttcggcaccactgttaatcagaaacaggctgtagtcttcgtaaccggaaatctttcctagtcgttcggctacctcttgttggagcttattgataacggagtttgagtagaaaccaagtttagccacctgattactgatcatcgctacatagtggggatgtgcatgtccgatggagataacggcatggcctccgtagaggtccagatattccgttccgtttttatcccatactttacagccatcacctttgacaatgttgatattgtataaaggatatacgtcgaataaattcataattcttctgtttttaaaaagctgaaggcttcaaacgtagtcctacggtttcttccagattgaacatcaggttcatgttatgaaccgcttgtccgctggcgcctttcagcaaattgtcgatacaagagataatcaatagtttgtcaccgtgtttctccagatgtatcaggcacttattagtattaacgacttgtttcaagtcaatattcttgtctacgatgtgtacaaaggagtcttttgcataatattcctcatacatacgaacgatttcttccagtgctactttggttttgactaccatcgttgcaaagataccacgagcgaaatcgccacggtatggaatgaagtcgatctccgcatcgaaactattttgcagctgtttcagtgattgcttgatttccggaacatgctggtgctcgaatgctttgtacacactcatattgttgtttctccaactgaaatgactggtagcacccggtttcaccccggctcccgtacttcctgtaatagcatttaccattacatcatcagtcagcatcagattcttggcaagcggaagcaaaccaagctggatgcaggttgcaaaacagccggggttggctacgtgcttcgccgtacaagtggcacgacggttcagttccggcagaccgtagataaagtcgtggtcgtcacttttgatacggtagtccatggagaggtcgataatcttcaggttttccggtatgttgtgactttccatgaatttctttgtatctccgtgggcggtacagaagaaaagaacgtcgatttcgtccagaggtaactggtcggtgaacgttaaatccgtttcgccatacaggccttcgtgaacgtcggtaattctgtttccggcattactgctgctgttgataaatacgatttcagtttccggatggttgagcagcagacggattaattcgcctgctgtatatcctgcgccaccaatgattcctgctttaatcatatctcttcgtctttgtggttattatagtaaacacgtagcggagtagaagtcactttgataaagccttttgcgtcttcggctgtccagcctttctgcatttcaccgtattctccgaatttagtcttcaccagatcatcttccgattctacacctacggtagagaaggaaagagggcgaagctcgaggatagctgtaccgtttacgttgcgctggctttcctgcaacatggcttcgatgtcacgcatcaccggctccaggtattgactttcgtggaggaacataccgtaccagttagctacttgatccttccaatattgttgccatttgcttaatgtatatttctcaaggaaacggtgagcgccgataatcaacatcggggcggctgcttcgaatcctacacggcctttgataccgataattgtatcgcctacgtgcatatcacggccgataccgtatgctgcgccaatctcttccactttctggatggctttgatcgggtcgtcaaacttctcgtcgttgacagctttcagttcccctttttcgaaagtcaggcggagctgttcgctaccttctttttcaacgtgcttgaggtaagctgtttccgggagtccttgcgcggagtcgaggatttcgccaccacagatagaagtaccccataagcctacgttataagagtatttcagtttggtgaagtctgcactgaaaccatgcttgttcagatagtcgatttcttcctgacggctcaatgccatatcacgggttaatgtgatgatttccacattgggagccagtacgaggaaagtcatatcgaaacgaatctggtcgttacctgcgccggtagaaccatgtgcaatggcgtctgcaccaatttcgttagcatagcgtgcgatagccaatgcctggaaaatacgttcggaactaaccgaaataggataagtaccattacgcagcacatttccgaaaaccatgtatttcaggctcttttcgtagtattcctgggtaacgtccagcgtcacgtatttcactgctcccagtttataagcattttcttcgtttgttttcagttgttcttcgctgaaaccacccgtattggcacaagctgcatatacttcgtaacctttttctttggcgaggtacatgacggtgaacgatgtgtccagtccgccgctgaatgccaccactacttttttcttcttttcttccatagtgctgtatcttttaaatgttatttctttcttgttcttttttgatgttccgcggctctgtcggatcgtacagcatggctgtgcagatgcagaacttgcggtttttcgctaccagaatatcatggttgatacatccttcgcatcctttccagaaagcttcgtcgtctgtcagttcgttgaaggtgacaggcacataacccagttcggtgttcattttcatgacagctgctccggaggtcagactgaatatttttgctttcggccatcggagacgtgccagttggaaagaagcctgtttgatgcgttttgccagtcctaatccacggaaatcgggatgaacgatcagaccggaagtagccacatattgcttgtttccccatgattcgatgtaggtgaatccggcaaaagtatcgccacaaagagcaataatcgccttaccttctttcatctttgtcgctacgtattcgtgtgtacgttccgcaattcctgttcctcgtacggcggcagcatttctgatagtttccaaaatagtgtcaacgtaaacctcatgtgaggcgtcggctaccataacatctatttgttgagtgtccatttctttattatataataataggtataattattcgatattgggaatgatgagtgacaaaagctgacgtattttactggttgcaactccttcacgcaacaccaacatgatcgtatcgtcaccggcaatggttcccagaatttcactgaattcattgttgtcgatgtcataagccatgctgctggcataaccgggacgggtgcggataacggcgatgttaccggaaaactgcaaagagataaatccgttgttgcgtaacatttcaccggcactctggtcggtagaacgtttatacataatgttgttcggcagtacatatacgtactttccattcatactggcagccttggctactttcaattgtttcaagtcgcgggaaagggtggcctgtgtcagttcgaagccttcgcggttcagctcttgcagcagttcttcctgcgaaccgacctccttgcttgagataatcattttgatggcgtctaaccgatttgctttcttcttcattgtataattattctaagaatggcgcaaaagtatgcattattttggagaaaagatgcataaaaccaaagtttttttgcataaaagtgaaaatactttagaaagggatagtgatataatcaggatatatgtgggtatatgtaacaaagttgtttctttattgcttcattttgtgctgactttttttattgtctattaaaaaagatgcaattgtttgtttagggatttttaaatatataaatttgtaaagtgaataaggagacaaatcgtatgatagatgaagatattgagctttattctctttttagaaaaggagatagaaaggcttttgatactttatttttgaagtattattccatactatgtgccttcgggaagtactatattcctatagaagatgctgaagaagttgttttggatatcatgacatggctatgggaaaacagagaattccagatcatagaaacttctttgcgaagttatttgtttatggcggtcagaaacagatgcttggatttaataagtaagaatcagacaaaaagacgttgttatgagcatatgtttgctaaagaaatgcagacaagttttgaagatcctgatttttatgtagtggaggaattgatggcgaaaatagaaaaggccgtgatgcgattgccggactcctatcgtataacttttgagatgagccgttatcaagataaaacatataaagagattgcgaaagaattaaacgtttccataaaattagtggagtatcgtatccagcaagcattgagacttttacgtgtagaactaaaagactatttaccgttgattacaatcatattcccttattttctctaaggatagccgattcgtttttgagtcttaaaataaaaatgcagcttttaattaaaaaagttgcatttttgtttaggggctaattgaagtattccgtcttcttaataaaatgaacataaaagatgatggaattacatgaaaatatagatgaggctcttttactcctttatttttccggtacactaggagagaaagaaaaagaagaggtagaaaattggatttccctctctgaagagaacagaaaaatagctaaacagatttgttacatacaccacgtaacagatataatagataccgtgaagcagatagatcctaaacaggcattggtgaagctggataagagattgtcaaaaaggaagaaaataaactggtgggaatgggggataagagcagcagctgtgttatttattcctttattcttatctttcttctattttgtatttaatcaagataaaaattatgatcgttatgtcgaaattcggtctaatccggggatgatgacaaaagtggagttaccggatggtacttgggtatggctgaattctgcttcttatctaaaatatccagtgtcttttgaaggagaatatcgaaaggttgaattgctcggagaagcttatttttcagtacaaaaggataatggacggaaattcttagtcgatgtaggaaaggggattgaattagaggttttaggtactgaatttaacgtggatgcttatccggatgataagtttgtagctgctactttggtgacaggtagagtaaaattccattgtcagcagaaaggcagggaggttacttatagtatgcaacccggacagaaggtgatttataatttattggatgagaaacttttgtgtacaactacttttgttgaatctgatattgcttggaaaagtggaaggatcatttatcgagatactcctcttgaagatgctttaagaactttgagcaagcgttttgacgtagagttccgtattgttaatccattattaaagaaatattgctttacaggtacttttattaatcaacgtctggataagatcttggaacacttcaaaatagcttcaggggtgagatacagatatcttgaatcggcattggacaacggtgttgtgaaagagaaaacaataatagaaatttattaaacaaaaaagaactatgaaaacactccctccttaaacaaaaaatatgggaaaaatatagcactattcttcccatataaaaaatcatttagccttacttgtttgccgacaagtgtagttaactttatttttaatttaaatcacaacaaatttatgcaaaaacattgtagtatccaaattcttgggattaaaaggctactgaaagcaactttaaaaggaattccattgcctatgagattattaattattatgctatgtgtttcgataggatgcattcgtgcgacaaatacttatgcgcaaaatgcgatccttgacttgaaagtcaataatcaaacgattgaaaccgtcttgaaaataatagaatcgcggactgactttgtattcttctttaacagtcagcaggttaatgtacataaacgtgtctctattaatgtcaataaacagaatatttttaaaattctagatgaggtttttaagggaagtgacgttgtttattcagtgcttgataaaagcataattttgtctagtaaaagatttgcgcctgatggaaatttgaagaagattacaggtaaggtcgttgatacgaacggtgaaccgttgattggtgttacaattgctctgaaaggaagcaatagaggaacggtgagtgatgtaaacggaaatttttctttaaacggagaagaaggaaagcttaatgtgttgaatatctcatatattggttataaagaccaacaggtaaaagttgaggatggtaaaactttgattattacattggaagaggataccaaggttttggaagaagtagttgttgtgggatatggtacacagaaaaaaatcaatttgacgggtgctgttgctgtggttgacgataaacaagtaatcggacgttcggccgataatttgtctaaactacttcaaggagctgttcctaatatgaatgttactgtttctaacggtcgtccgggacagggtggtagcataaatattcgtggtatcaattctatcagtagtagtgccacgcctttgatattagttgatggtgtagaaggtactatcgatgcagtgaatcccaatgatgtggagtctattagtgtattgaaagatgcttcttctgctgctgtatatggggctcgtgcagcttatggagtaattttggttacaacaaaatctggtaatgatgataaaacacgtgtttcttataacggacgttatagctttggctcacctacagtttccagagattttgagactcgcggttattattcggcggctatcaatgatatgttttattctacctatcaaggttctaactatacgaattataatgatgaagattattatgaaatgtggatccggcgtaatgataaaacggaaaatccggaacgaccgtgggtggttatcaaagatggtgaatataaatattatggtaactttgattggtataactacttcatggatgagtctcgtcctacatgggaacacaatattagtgtcagtggtggcaataagaaagtgcactatttcctttccggtgcttattatgatcagaaaggagttattcggaaaaatatggatagtttcactaaatacaatttccgttccaaggtaagtattgagattgctccatggttgaagataagtaataatacgtcatacaaaaaggattcttatccatttccggggccaggtgctattaacaatctttttgatgcgataagtaagcatgccttagcttctattgttccaatcaatccggatggtacatatatggggaatgcaacagttattacaggaggatatcgccctgctaatgatcttagtgcaattcttgaatacggtaaacacaagaatgaggatactaattacttttttaataccacctttgaggcggtaatgacacctgttaagaatgtaacggtgacggctaattattcgtttgctcaacatgaatatacggcaatgaatcgtagtgctaattatccatattcacgtgtacccggagaagttctttggaaaacagatggttatggccttaatactctttatgaacgttctaatcatgattggtttcattcatacaatatttatggaaattatacaaatacatttgccgatgtgcaccatgtaagtgcaactgccggtgtcaattatgaaactaaattttttaaagacatcaaaatacaacgtaatgatttattgtccgaagatttaactgattttaatttagctaatggtgatgaaatgagtattgcgggtggtaaaaatagatatgctcttttcggtcttttttatcgtttgaattatgactataaaaatagatatttatttgaatttagcggacgctatgatggtagttcacggtttgcccggggacatcgctatggcttttttccttcagtttctgccgggtggagaattaatgaagaaaagttctttgcaccattacgtaaacaaattagtaatttgaaattacgcttttctttgggagcattaggaaaccaacaagtcggatattatgactatttgcagactatatcttctggtggtacaatttcttatgcttttggtgataaaaataaagcgtcaggtgctagtatctctgctccgaatgcttctgatttcacttgggaaacggttgttacaaaaaatatcggtttggatctcggactattgaataatcgtttgaatatgacggctgatatatatgtacgtgatacgaaagatatgttgatggcttccaaggatcttccgaatgtatatggtgcttcttctccaaaaacaaatgctgctaacttacgtacgaaaggttgggaagcatcgattagttggaatgattcttttaatctaaagggaaaagcgttccattattctgtcgtactaggcttggctgataatacgactaaagtgacaaagtataacaatgataacaaaacattgggcactccatatgaaggacaacaactgggagagatttggggatatgttgttgatggtctcttcaaaactgatgaagaagctgaaaactatccggtaaatcagagttacgtaaataatatattgaatatttctgtaaaatctcaaggtctccatgcgggggatgtgaaatatgtggacttggatggcgataatattatttctcctactttatcggcaaacgatgtgaaggatcagaaagtgattggaaattctttaccaagatatacatattctgtcagattagctgcagattggaatggaattgatttttctgctttgttgcaaggcgtcggtcgccaacattggtatcccaatggtgaaactagtctgttctggggtccctatgcccgtccttattgtacttttattccgaaggatttcttgacagatgtttggtcagaagataatccggatgcttatttcccacgtccgagaggctatgtggcattggatgttaatccacgtgagttgtctaaacctaatactcgctatttgcaaaatgtggcttattgccgtcttaaaaatgtaacagtcggttactctttgccacgtacttggctaaaggctttgcatatggaacgtgtcagggtttattttagtggagagaatctttttacattcagccctttacatagtaattatattgatccggaacatgctggggcttctacgagctggaaaagtggtcatacgaacgtgacttcttatccaatgagtaagacctattcatttggaattgatgtgactttttaa

SEQ ID NO: 204 - DNA, 5292 bp, unidentified
  source 1..5292: mol_type = unassigned DNA
ctacagcttctctgtcagtgtctgacacgcctttgccgttccgagaagctcaggcagtacttcctgctttgtaccaatcttttttaattgtccatccgcaatcacaatgatcttctccgcaatatccagaatacgttcctgatgggaaatgatcaggatcgttccctgaatctcatcccgcatcttttcgaaaacacggatcaggctgttaaagctccagaggtcaatacctgcttccggctcatcaaagatggaaagctttgttcctcttgccgtgatcatggcgatctcaatacgcttcagttccccgccggaaagactgttattgatctcgcggtcaatatattcccgcgcacaaagccccacttccgacaaaatatcgcagatctcattgacactcagctttttccccgctgcgatcgtaataagatcacggactgtcagtcctttaaaatgcaccggctgctggaatgcaaagctgatgcccttattggcacgctctgtgatattcaatcctgtgatatcctcaccatccagcagaatttgaccgcttgtcggtgtcacaattcccgcaatgatctttgcaagcgttgacttacctccaccgttcggtccggtaatcgctacaaaatgatcctcgatctgcaggctgatatcccggatgatctctttgttatcttctacttcataacatatatttttcagttctaacataaattatttcttcctttttgatttctgattctgccatacgtcagctattatggtttaccgctccgcgcgcatcggattgtgcaggaagtcttcataggcaagtctgataccgtcttccagctctgtcttgtatttccagccaaggctttcagcctttgaaacatccagaagctttctcggtgttccgtttggcttactcgtatcccacttgatctctcccgtaaatcctaccacctttgccacaagctctgtcagttctttgatcgtcagttccttacctgttccggcgttgactgtctcatctccgctgtagttgttcatcaggaacacacaaaggttagccagatcatccacgtataagaactcacgcagcggtgaaccgtctccccagcaggttacctccgtaagccctgcctcttttgcctcatggaatctgcggatcagcgccggcagtacatgggaatgtgttgggtgatagttatcatttggtccatacaggttggtcggcataacagaaatatagtctgtgccatactgtttatttaaaaattcacaatatttcaggccggaaatcttcgcaagcgcatatgcttcatttgtcttctccagctctgaagtcaaaaggcagctttccttcatcggctgtggtgccatacgcggataaatgcaggaagatccaaggaattccagcttcttacagccgttcttccatgcactgtggatcgcattcatctccagaatcatattatcatacataaaatcagccagcgcattctggtttgccacgattccgcctaccttagctgctgccaggaacacatattccggtttttcctgcgcgaaaaattcctccacagcatcctgccttgtcagatccagttccttatgggttcttgttacaatattgtgatagccctgtctttccagttctcttacgatcgcagagccaaccatccctctgtggcctgcaacatatatttttgcgtctttttccatcattttggtacacttctttctctatcatttatcgtcttattcaaaatctgagcctgcctgtcatatcacggcagcttctgcagccggcagtaagcaccgtcttacttcacaacgcccttctccagatattcttccagatttgtcttgatgtgctcttctgctctttccacagcaaccttttccatatcatgttttgtcataagcgctacaagctcttcaaagcttgtcttggtcggattccagccaagctctgtcttcgccttggtcggatctccccagagatttactacatcagtcgggcggtagaaatcagggctgacttcaacgatcactttgccattggctttattaatacccttttcgtccattccgcttccctgccattccacttcaatacctgcatgatggaaagcaagtgttgcgaactctctgacagaatgctgtacacctgttgcgatcacgaaatcttccggcttatcatgctgcaggatcagccacatacattccacataatcctttgcatatccccagtcacgcagactgtcaaggttacctaaatacaacttatcctgtttaccctgtgcaattctcgccgcagccaatgtgatctttcttgttacaaaagtttcaccacggcgttcgctttcatggttaaataaaataccggagcagcagaacatatcataggcttctctgtactcttttacgatccagtagccatactgctttgcaactgcatatggagaatacggatggaacggtgttgtctctttctggggaacctcttctacttttccgtaaagctctgaagtggaagcctgataaatacggcaggtcttttcgagaccgcagacacggactgcttcaagtactctgaggacacctgttgctaccacatcggctgtatattccggaacatcgaagctgacctgcacatgggactgtgctgccagattgtagatttcatccggtctgatctctccgatcagctttacaaggctgatggaatctccaagatctccaaatttcaaatgaaaatgcggtgttccttccagatgggcaatacgttccctgaaatccacggaagatctacggatcataccgtatacctcataacccttttccaataaaaactctgctaaataagagccgtcctgtccggtcacacctgtgataagtgctttttttgccatagttccttctcctttttctattctatatgacgatattgctattttctgtttattataatatacccatgtttctgccttatccattcattgtattgacattcagttgcattatattgacttttattttgaatttctatactatatagaaaagatcttacagaaacggagttttttcatgaagcatcaggcattatttcacggtgatctcgtcaatacgacccggatcatttatactccctcagagtttgccaaaacttcccttttacatgtacaggaaattggcaccttgcaggcacaaaaaccgcatgtcagcaaacgcgaagatctggattcctatctcttttttatggtacgatccggctccggcgagctgcattatgcacataatacttatccgctcggtgtaggcgattgtgtctttatcgactgcagatccgcctattttcacgaaacaaaggatgatctctggagtctttcctgggtgcattttaacggtccctcgatcgatggtatctaccagaagtataaggaacgcggcggtctgcccgcctttcatgcaaatgcattttctctttatgaggactgttttaaccatctttacagcatagtatccggcaattcttatgtccgggatatgcagatcaacgaagggctttctgccctgttaaccctgttgatggaggatagctggcatccggacagtatgcctgcacataccaaacgtaccagcctgtggcatgtccgggagtatcttgaccagaattatgcgcaaaaaatatcgctcgacgatctcgccgaacgatacttcatcaacaaatattatctcaccagaatcttcaaggaacaatttggtgtcaccatcaataattaccttttaaacgtccgcatcacccatgccaagcgtgaactgcgcttctccggcaaatccgccgaagagatcggtgctgaagtcggttttcacgagctgtactacttcagccgcgtctttaaaaaggtggagggctgcagtatcagtgaataccggaggatgtgggggacgtgatcagatttccagctcaaatttctgtttatcatgcacattgatatccttgccaagctggatctccacgagacgcagctctgtatccgcaaacaccgtatgacgacagcctgcagacattgtgatcacatcgcccgcttttaccgcctgctcaaatccgtctacgaccgttctgccgtttccggaaataaccacccagacttcatcccggtttttgtggctgtgataattcatgctatgccctggattcagagttaccttgatcgtcatggaagttccttccacatccaatacccggaagcttccccatgatttttccgcaaacatgatctgctgttcaaatttatccacataaggcttgatatagctgctctgctctttatcggataccagaatgccatccggcgaagcagaaataaccacatcatgcagtcccatcgcaagcacaggcacatccatctcattgacgatgtgcacatctgaacaggtctcattcaagacaccttttccgacaacagattcttccatcgcctctgtcagtgtattccatgtaccgagatccttccactgtccggcaaaacgctgcacctggatcttatcctctttctctacaaccgcataatcaaaagaaatttttgtcaacgtctcatatttatcaaataaatcctgataatctgtaaattcaatcagttcatgcgccttctcaagcacatatttcagcttgtacgcaaaaacaccaccgttccagagagcaccgcgctttatatattcctctgccacatctgcagtcggcttttccttaaaggtctcaaccatagatgtatgatctgccgtcttcggaatgatatatccatatttttcactcggataagtcggttcaattcccatcagtaccagatttgcctcacccttgtctgcctgctcagacagatctttcaatgcagcaaaatagtcatcctccacatagggatcaaccgggcagactaccaccgattcctccgggctgactttcatttcatcgacaagataagctgtcgctaacgcaatcgccggaaaagtatctcttctgcatggctctatggaaatccccacgccatccccaagctgattatgaattgctgaaacctgtgtcttggaggttgcgatcgtgacggttgcatccgcatctaccgtcttgatctgccgataaacacgctgcaccatagactcataagagccgtcctttttcttaaatatttttataaactgtttgcttctcacatcattggaaagcggccacaggcgcttccctgatccgcctgataataatacaatgttcattgtttttcctgttcccttgtataaatacaa

SEQ ID NO: 205 - DNA, 7164 bp, unidentified
  source 1..7164: mol_type = unassigned DNA
  misc_difference 930: note = a, c, g, or t
  misc_difference 931: note = a, c, g, or t
  misc_difference 932: note = a, c, g, or t
  misc_difference 933: note = a, c, g, or t
  misc_difference 934: note = a, c, g, or t
  misc_difference 935: note = a, c, g, or t
  misc_difference 936: note = a, c, g, or t
  misc_difference 937: note = a, c, g, or t
  misc_difference 938: note = a, c, g, or t
  misc_difference 939: note = a, c, g, or t
  misc_difference 940: note = a, c, g, or t
  misc_difference 941: note = a, c, g, or t
  misc_difference 942: note = a, c, g, or t
  misc_difference 943: note = a, c, g, or t
  misc_difference 944: note = a, c, g, or t
  misc_difference 945: note = a, c, g, or t
  misc_difference 946: note = a, c, g, or t
  misc_difference 947: note = a, c, g, or t
  misc_difference 948: note = a, c, g, or t
  misc_difference 949: note = a, c, g, or t
  misc_difference 950: note = a, c, g, or t
  misc_difference 951: note = a, c, g, or t
  misc_difference 952: note = a, c, g, or t
  misc_difference 953: note = a, c, g, or t
  misc_difference 954: note = a, c, g, or t
  misc_difference 955: note = a, c, g, or t
  misc_difference 956: note = a, c, g, or t
  misc_difference 957: note = a, c, g, or t
  misc_difference 958: note = a, c, g, or t
  misc_difference 959: note = a, c, g, or t
  misc_difference 960: note = a, c, g, or t
  misc_difference 961: note = a, c, g, or t
  misc_difference 962: note = a, c, g, or t
  misc_difference 963: note = a, c, g, or t
  misc_difference 964: note = a, c, g, or t
  misc_difference 965: note = a, c, g, or t
  misc_difference 966: note = a, c, g, or t
  misc_difference 967: note = a, c, g, or t
  misc_difference 968: note = a, c, g, or t
  misc_difference 969: note = a, c, g, or t
  misc_difference 970: note = a, c, g, or t
  misc_difference 971: note = a, c, g, or t
  misc_difference 972: note = a, c, g, or t
  misc_difference 973: note = a, c, g, or t
  misc_difference 974: note = a, c, g, or t
  misc_difference 975: note = a, c, g, or t
  misc_difference 976: note = a, c, g, or t
  misc_difference 977: note = a, c, g, or t
  misc_difference 978: note = a, c, g, or t
  misc_difference 979: note = a, c, g, or t
  misc_difference 980: note = a, c, g, or t
  misc_difference 981: note = a, c, g, or t
  misc_difference 982: note = a, c, g, or t
  misc_difference 983: note = a, c, g, or t
  misc_difference 984: note = a, c, g, or t
  misc_difference 985: note = a, c, g, or t
  misc_difference 986: note = a, c, g, or t
  misc_difference 987: note = a, c, g, or t
  misc_difference 988: note = a, c, g, or t
  misc_difference 989: note = a, c, g, or t
  misc_difference 990: note = a, c, g, or t
  misc_difference 991: note = a, c, g, or t
  misc_difference 992: note = a, c, g, or t
  misc_difference 993: note = a, c, g, or t
  misc_difference 994: note = a, c, g, or t
  misc_difference 995: note = a, c, g, or t
  misc_difference 996: note = a, c, g, or t
  misc_difference 997: note = a, c, g, or t
  misc_difference 998: note = a, c, g, or t
  misc_difference 999: note = a, c, g, or t
  misc_difference 1000: note = a, c, g, or t
  misc_difference 1001: note = a, c, g, or t
  misc_difference 1002: note = a, c, g, or t
  misc_difference 1003: note = a, c, g, or t
  misc_difference 1004: note = a, c, g, or t
  misc_difference 1005: note = a, c, g, or t
  misc_difference 1006: note = a, c, g, or t
  misc_difference 1007: note = a, c, g, or t
  misc_difference 1008: note = a, c, g, or t
  misc_difference 1009: note = a, c, g, or t
  misc_difference 1010: note = a, c, g, or t
  misc_difference 1011: note = a, c, g, or t
  misc_difference 1012: note = a, c, g, or t
  misc_difference 1013: note = a, c, g, or t
  misc_difference 1014: note = a, c, g, or t
  misc_difference 1015: note = a, c, g, or t
  misc_difference 1016: note = a, c, g, or t
  misc_difference 1017: note = a, c, g, or t
  misc_difference 1018: note = a, c, g, or t
  misc_difference 1019: note = a, c, g, or t
  misc_difference 1020: note = a, c, g, or t
  misc_difference 1021: note = a, c, g, or t
  misc_difference 1022: note = a, c, g, or t
  misc_difference 1023: note = a, c, g, or t
  misc_difference 1024: note = a, c, g, or t
  misc_difference 1025: note = a, c, g, or t
  misc_difference 1026: note = a, c, g, or t
  misc_difference 1027: note = a, c, g, or t
  misc_difference 1028: note = a, c, g, or t
  misc_difference 1029: note = a, c, g, or t
atgaaacaatacactgccaccgccaacgacgagggtgtccgcctctcccgctttgtccagagcgtgacccgtgacttccctaccagccttttatacaagagcttccgcaacaagcgcatcaaagtcaacggcaaaaagggtgtacccgaagaccgcatcaaggccggcgacctcatcgagctctacatcaacgacgaattcttcccgcctgagggtgcaaagccggcccacaagcccgcccccaaaaagcagcagaaccagcctaaggtgacggtcatctacgaggatgagaacattgccgtcctctacaagcccacccacctgctctgccacagcgaccgcaccggcgacgcaaaccttgtggacgccttcacccagtatctggcccagaagggcgagtacgacccccagggcgagaaccgcttcaagcccggcatctgcaaccgcctcgaccgcggcactgagggtctcgtcatcgcggccaagagctacgccgccctccgggacatgaacgagatcatccgcaccgacctgctcaagaaggaatactacaccatcacggtgggcatcccccagagcgggcgcttcactgcatggtgggagcacgacgagaagaacaataaggtgagcatccacgcccaccagtcccaggacgagcgccgcaagcagatcatcaccgatgtggacgtgctgcggacggctggtcccttcgccctctgccgcatcggcctcatcaccggccgcactcaccagatacgcgcccatctggcctatctgggcaagccggtgctgggcgacatcaagtacggcaaccgcaagatgaatgagcgcaccggcacccggacgcaggccctctgcgccgtccgcatcagcttcctcgacattcccgaggaaaataccctccactacctctccggcaaggtcatcaannnnnnnnnnnnnnnnnnnnnnnnnnnnnnnnnnnnnnnnnnnnnnnnnnnnnnnnnnnnnnnnnnnnnnnnnnnnnnnnnnnnnnnnnnnnnnnnnnnnagcaccatgcacaagccccgcatcatctttttcgacatcgacggcaccctcatcgacatggagaaaaagcgtattactgagcggacactggacgctctgcgccgcttacagcaaaacggcatcctgctggccatcgccaccgggcgttcccctctcattgtgccgaaattcgacggcgtagagttcgacgtctttcttacctacaacggctcattctgctacaacatgaccggcgatattttcgtcagccccatcccgccgcaggatgtgcagacgctgatccaaaacgccgcagcgcttggtcgtccggtgtcggttgcaggacggacgcagctgctctccaacggaacggatgacgatttgacggcatattacgccatcggcggacgagcgccggtcatttccgataagttcgatgaagtctcccgaggtgaagttttccagctgctgatgggctgccgcgaaagcgactggcccgccattctcaaaggcacgagcggtgccaaaatcgccgcctggtgggacagggcggtggacatcatccccatctccggcggaaaaggatccggtatccagaaagttctggcctattacggcctgacgcccgaggatgcaatggctttcggtgacggcaacaacgatatagaaatgtttcaggctgtcggtcacagcgttgccatgggcaacgcttctgccgatttgaaagccatcgccagcgaggtctgcggcacctgtgcagaggatggtatttaccactactgcaaagaaaatggtttgatttaagaaaacaaaaagaggccgctgtgtccaacctctccgtcacggcttcgccgtgccacctcccctatcgaggggaggctttggcatggcagaaagcccaatctcttcgccagaggctcccctcggtaggggagctatcgaacgaagtgagactgagaggttgcttttacagcgacctcttattttttgctatttacttttcttctcgttccgccttttcggcctcctgctgtcggcgcagtttcttgatgcgctttttctcgctctcgacgcggggccagggccacgagaagccctcgttctccttgcaccagcgggtcagcgggtagaacgcaaacgccagcccgaacaggtacagcaggacgtacagcagacccgaaagcgttaccagcgcgtccagcgcaccaatgagcgccatgatgaagccagctttcaggaaaaacaggccgttctggcggcagtactcggggaaattttcggccttgacggcctgacggccctggtcgccccagacccgtggatttttcatgaccgaatagccgtaaaagaccagcatcaggccacaggtgagttggaatccaaaaaacatctgcgtcgttcctcgctttattctggtgtgatggagtcagaagcgcgctcagtcgtcgttgtactcgcccagcagcggcttcatgaagggcaggaagtccagcgttgcaaagtagtcgcggggagtctcggcacggcggatgaggcggtgagagccgtcctcgcagagcaggacctcggcgctgcgcagcttgccgttgtagttgtagcccatggcagagccgtgcgcaccggtgtcgtggatatacacgatgtcgccgatgtcgattttgggcagcatacggtcgatggcaaacttgtcgttgttctcgcacagaccgccgaccacatcgtacttgtggtcgtggggtgcgtcttccttgcccagcacggtgatgtggtggtaagcgccgtacatggcggggcgcatcaggttggccgcgcaggcatccagaccgatgtattccttatagatgtgcttctcgtggatggcagtagctaccagagcgccgtaggggccggtggtgaagcggcccatctcggtgaagatggagacatcgcccatgccggcggggaccagaatttcttcaaacttcttgcgaacgccctcgccgatggccatgatgtcgttttcagtctgctcggggcggtacgggatgccgacaccgccggacaggttgatgtaggcgatatgcacgccggtagccttctggacgcggacagccagctggaagaggatgcctgccagctcaggataataggcgtcagagatggtattggaggcgaggaaggcgtggatgccaaagtttttggcaccctttgcagccagcttcttgtagctgtcgatcatctgctcctcggtcatgccgtacttggcgtcgccaggcttgtccatgacctggaagccctctttgctctcgcccagctggaaggtgccgcccggattgtagcggcagaagatgttctccggcacaccggccacgcggtcgaggaagtccaccatcgtggcgtcatcgaggttgatataagcgcccagctcgtaagccttcttcatgtcctccacaggggtctggttggaggagaacatgatgtcgctgccgctgaagccgcacacttcgctgagcatcagctcggtcagagaggagcagtccacgccgcagccctcttccttcaggatctggaggatgacggggttcggcagagccttgaccgcaaaatactcgcggaagcccttgttccagctgaatgccttgttgatgcggcgggcgttctcgcggatgcccttctcgtcatagacgtggaagggggtgggtacgtcctgaatgatgtcctgagccatcgactcagtcaaaaacggtttcttttccatgattgtacatccctctcatatatttttacacagcaaaggtgccgtgcagccagcgattttacagctttaggttctcgcgggtgggggtaaaggtaggcaccattttggccaactgctccaccacactgtcgtcgttgtgctcggcggcgacggccagctcctggagctgctggtagaactcgcccaggtcgatgttccggggcggagccacgaagatcttattgtggacggtgcggcgcatcttgtcctgctcctcgtccatcatcagctcttcgtagagtttttcgccggggcgcagacccacgatcttaatatccatgttcacgcccggctcatagccgtagaagcggatgagctgttttgcaaggtccatgatcttgaccggctcgcccatgtccagcacatagatgctgccgctctcggccagcgcaccggcctgcagcaccagctgtgccgcctccgggatggtcataaagtagcgctcgatgttggcatcggtgagggtgacggggccgccctttttgatctgcgcctcaaacagcgggatgacgctgccgtggctgcccagcacattgccgaagcggacggcgacgcacttcatgtcggtgttgcctgcgaaggtctggatgagcatctcacacaagcgcttggtgcagcccatgacgctggtggggttgacggccttatcggtggagagctgcaccagccgctccacgccgtgttcactggcactggtgagcagattcttggtgccaaagacattgttcttgacggcctcggcggggctgatctccatcagcgggacatgcttgtgggcggcagcatggaacaccaccgtcgggtggtacgtctcaaatacctcgtccagacgggccttgtcccggatggagccgaccagcaccgtgaccggcacatcacggccatacttctgctgcagttccatcagcagttcataggcacagttctcataaatatcgaagataagcagttttgcaggtttgaagcgcatgacctgacggcagagctcactgccgatgctgccgccgccgcccgtcaccagaacggtcttgccggtgaggtagccggaaattttctccgtgtccagtgtgacttcctcacgggagaggaaatcggcggtgttcagctcacggaacgcaccctgctgaggtgtgcctgcacccaccagctgggggtcgctgagcatctgcacggcgcagtgggtggagacgcagaggtcgatgacgtggttcaggcggtttcccttcagggtcgggatcgccacgatgatggtatggatgttgtagcgggtacacaggtcaggaatttcttccagtgtgccgcgcaccgggacaccgtggatggtctggcccagcttgttggggtcatcatccacggctacgatgacatggccgtagctggtgttggtcttgcagacattgatggcccacgcaccggcctcgcccgcacccacgatcatgacggggcggttggggtccttgctggtgttgccgcgcagacgctcgcccagcgggtggttcaggaagagccgccatgccagacggctcccgccgatgaacaggaaaatgagcaccgccgccatggcgttggccgagttgaagagcacaccgtggatgaagcagcggttgaccagatagacgatgcccgtcgggacggcgatcatcccggccagacggatgaggtcacgctccccggcgtacttccaaaggatggtgtagagccgcccggccagaaagctgagcaggtagactgccacgatccagggcagattcgcgtagagcagggcgcggttgtggggccaccaggaggcctcgacagcgccgtctgcgcgcagcagcagggcgaaataaaagctgaaggctacgatggctccgtccagcaccaccagcagagcccggcgggccagtacctgcagcagatttgttttcttttccttcacagaatatcctctttttcatcggggccggcatccgaagatgtcagcttccgtttttcatttcaagggcctatcaccccataatatctttagtattatactcgattctcttccccgtgtccagttatttcactttttggacatttttcttatgccgcctctcccctgccgccacggcccgcagctcttcgccgaggcccagcggccacgccgccgcaaagcagaccgctgccatccccgcgccgcccagcgctaccgccgccagctgcaaggggactccgccggtgagccagtccgctaaaagatgccgcagggccagcccggccccggcgctgacggctcccgcaaagcccggtgcgcccagccaccgccagagttgcagccgcaggccgcagctggacagcagccgccccgtgttggcggtgcaggtgtagaagctggacagcaagatcacaaaaagaaagcccttcatcccgaagcggggcagcaggagcagcacgcccacaatgcggaggcaggagtcccacatgctgtagcggaaaacggctttctgttctcctacccccttcatggcaccgtccaccatgctctcgagatacatcagcggcatggccgggccgaggatgacgaggtagctgcccgcctcggcactgccgtagagggcttcggccagcggctgaccccacacccagaacgccgctcctgccagcgccgagaaatagccggtgagccggagcatcctgtcgatgagagccgccagccgcccgttctggccccggaggtgggcctgggtgatttcgggcatcagcaggacggaaaggcttcccagcagtccgaagggaaaggtcagcagaggcagggccatccccttgaggctgccgtactgggccacggcttcggcacgcccgccggaaaattgcagatagactgccagacaggccggcaccagcatattctccgcggtgtggagagcactggcgagacaacgtcctccctccaccggccagagaatgtcccagaggcgctttcccggctcctgcgggcggcaggcaggccgcgcaccgaagcagcggcgggcctctttacggtaaaaaagtgccatcagcccagtgctgacggcctcgctgaccgccgttgcgcccagcactgccgtgcagcgcccgcccacgtcccagccgaggacgtcggcccgctccagcgcagcccatacgatgccgatgcggacggtctgctcggccagctggctcaggacgtttggctccacctgccgccgggcgatgaaaaagccccgcagtaccgacgacaccgccatccacggcaggcccagcgacgagacacgcagcgcccccgctgcccggacatcgcccagccaccattttgcggcgaggcccgccagcccgaactgcgccgccagcgccagcacgcccagcccggcccccgccagcaggagacagtgaagcatccc

SEQ ID NO: 206 - DNA, 7967 bp, unidentified
  source 1..7967: mol_type = unassigned DNA
  misc_difference 5095: note = a, c, g, or t
  misc_difference 5096: note = a, c, g, or t
  misc_difference 5097: note = a, c, g, or t
  misc_difference 5098: note = a, c, g, or t
  misc_difference 5099: note = a, c, g, or t
  misc_difference 5100: note = a, c, g, or t
  misc_difference 5101: note = a, c, g, or t
  misc_difference 5102: note = a, c, g, or t
  misc_difference 5103: note = a, c, g, or t
  misc_difference 5104: note = a, c, g, or t
  misc_difference 5105: note = a, c, g, or t
  misc_difference 5106: note = a, c, g, or t
  misc_difference 5107: note = a, c, g, or t
  misc_difference 5108: note = a, c, g, or t
  misc_difference 5109: note = a, c, g, or t
  misc_difference 5110: note = a, c, g, or t
  misc_difference 5111: note = a, c, g, or t
  misc_difference 5112: note = a, c, g, or t
  misc_difference 5113: note = a, c, g, or t
  misc_difference 5114: note = a, c, g, or t
  misc_difference 5115: note = a, c, g, or t
  misc_difference 5116: note = a, c, g, or t
  misc_difference 5117: note = a, c, g, or t
  misc_difference 5118: note = a, c, g, or t
  misc_difference 5119: note = a, c, g, or t
  misc_difference 5120: note = a, c, g, or t
  misc_difference 5121: note = a, c, g, or t
  misc_difference 5122: note = a, c, g, or t
  misc_difference 5123: note = a, c, g, or t
  misc_difference 5124: note = a, c, g, or t
  misc_difference 5125: note = a, c, g, or t
  misc_difference 5126: note = a, c, g, or t
  misc_difference 5127: note = a, c, g, or t
  misc_difference 5128: note = a, c, g, or t
  misc_difference 5129: note = a, c, g, or t
  misc_difference 5130: note = a, c, g, or t
  misc_difference 5131: note = a, c, g, or t
  misc_difference 5132: note = a, c, g, or t
  misc_difference 5133: note = a, c, g, or t
  misc_difference 5134: note = a, c, g, or t
  misc_difference 5135: note = a, c, g, or t
  misc_difference 5136: note = a, c, g, or t
  misc_difference 5137: note = a, c, g, or t
  misc_difference 5138: note = a, c, g, or t
  misc_difference 5139: note = a, c, g, or t
  misc_difference 5140: note = a, c, g, or t
  misc_difference 5141: note = a, c, g, or t
  misc_difference 5142: note = a, c, g, or t
  misc_difference 5143: note = a, c, g, or t
  misc_difference 5144: note = a, c, g, or t
  misc_difference 5145: note = a, c, g, or t
  misc_difference 5146: note = a, c, g, or t
  misc_difference 5147: note = a, c, g, or t
  misc_difference 5148: note = a, c, g, or t
  misc_difference 5149: note = a, c, g, or t
  misc_difference 5150: note = a, c, g, or t
  misc_difference 5151: note = a, c, g, or t
  misc_difference 5152: note = a, c, g, or t
  misc_difference 5153: note = a, c, g, or t
  misc_difference 5154: note = a, c, g, or t
  misc_difference 5155: note = a, c, g, or t
  misc_difference 5156: note = a, c, g, or t
  misc_difference 5157: note = a, c, g, or t
  misc_difference 5158: note = a, c, g, or t
  misc_difference 5159: note = a, c, g, or t
  misc_difference 5160: note = a, c, g, or t
  misc_difference 5161: note = a, c, g, or t
  misc_difference 5162: note = a, c, g, or t
  misc_difference 5163: note = a, c, g, or t
  misc_difference 5164: note = a, c, g, or t
  misc_difference 5165: note = a, c, g, or t
  misc_difference 5166: note = a, c, g, or t
  misc_difference 5167: note = a, c, g, or t
  misc_difference 5168: note = a, c, g, or t
  misc_difference 5169: note = a, c, g, or t
  misc_difference 5170: note = a, c, g, or t
  misc_difference 5171: note = a, c, g, or t
  misc_difference 5172: note = a, c, g, or t
  misc_difference 5173: note = a, c, g, or t
  misc_difference 5174: note = a, c, g, or t
  misc_difference 5175: note = a, c, g, or t
  misc_difference 5176: note = a, c, g, or t
  misc_difference 5177: note = a, c, g, or t
  misc_difference 5178: note = a, c, g, or t
  misc_difference 5179: note = a, c, g, or t
  misc_difference 5180: note = a, c, g, or t
  misc_difference 5181: note = a, c, g, or t
  misc_difference 5182: note = a, c, g, or t
  misc_difference 5183: note = a, c, g, or t
  misc_difference 5184: note = a, c, g, or t
  misc_difference 5185: note = a, c, g, or t
  misc_difference 5186: note = a, c, g, or t
  misc_difference 5187: note = a, c, g, or t
  misc_difference 5188: note = a, c, g, or t
  misc_difference 5189: note = a, c, g, or t
  misc_difference 5190: note = a, c, g, or t
  misc_difference 5191: note = a, c, g, or t
  misc_difference 5192: note = a, c, g, or t
  misc_difference 5193: note = a, c, g, or t
  misc_difference 5194: note = a, c, g, or t
ttatttaccctcgtatgctgcctgaatctcttttttgaactcttcctcgcccactctctgaagagtaagtctgaaacgctcaccaccgtttgcatgcttctcgaagaaactaattgctgcatctgtcactctgaaaagagtttccttgtcgcggataatcggaactagctgctctcctttatagatgtggtttccgaaaagtcctccaaacgatacgatatatcccggagttcccttccatgcatctgtcggacagctctttacgcagcgcgcacagttgttacatttgtctctgtcgatgacaatcctgccatcctccatgctaagtgcaccctcgcggcatgccttcacacatacaccacactggatacaatcgtcatggctgcactctactgtcatgcctcccttgattccgacatcgttttcctcagcctttaagcagttgttctgacagcctgtgacaccaaacttgaacttgtgaggaagctctcttccgaagtacctttcatcaagttccttagccagagtgtatgtatcgatacatccgctaggacagatttctgagccctgacacgctgtgacagtacgtactcttggtccgcagacacctgttcctacaccgccctttgccagttcctcttttaccacattgatatcctcaaccttgataaaaggaatctcaataccctgacgcgatgtcatatgaacatatccgtgtccgtatttctcagcaacctctgctactgttttgatattttctgctgtaagatttcctcctacaaccgcaattctaagcgagaaacagcccttttgcttctgtctcatgaaaccgcccttttttagggccgcgtaatcaactttctccgccatttttaatctccttactgtgtaaatatgttaatgttttgttttatatgtaaatgcatatgcacgctctcatttgcatacacattgataccttattattatggcttaatcagctatatttgcaaaagcctgtgcaaaatcctccttgaggtcatctatatcctcgatacccacactgactcttataagatcctcaaatactcctgcatcctccttctgcttatctgtgctgtgaagactgattgtggagcccggatgaatgacaagtgtctttgtatctccgatattgctgagtgtgtatggaatcgtcaggctgtctataaatttaaatgccttttccttgctgccaaccctgattgtaaggattgctccatagccgtttgtgagctgtttttttgctatttcatgccatttgctgctacaaagccccggataattaacctttatgtcaggataattgttttctatccacgacgcaagcccgagtgcattagagcattctctttccattctaagaccgagtgtctcaagtcctataatatttaagtatgcattcaccggagctaaacaggcacccatatttctgaaaagactgtttctcagctttgcgacaaatgccataggtccatacttcacataatctgcaaaccccgggtatctgttcttgtcccatttgaacttacctgagtctgtcagaataccactgattgcattgctgcttccattgatatatttggaagatgaattgaccacgatatcagctccatgctttaaaacctgtatcaggtaagctgtcgatgtggtattgtcaactacaagcggtatatcatgtgcgtgtgctatctctgcaagcttctcaatatctgtgacatccagacagggattaccgatagtctctgcaaaaatcagtctggtatgctcattgatgctgtcctctatctgctgccagttgttgttctcgacatatctggttgtgatgccgaaggcctcaagatcatggaacaaatctattgtgccaccgtagaggctggcgcttgagatgagctcatctccactgcttagtatatttaagaaggtattcatcagtgccgccatgcctgatgcgcatgccaccgatgctattcctccctcgagctttgttattctgttctcaaaagctgtaatcgtaggattggcaactcttgtgtaacagtagcccggagctttgttttcaaatattttttccagatctgccgcgctctcctgctcgaaggcgcttgtctgatataccggtggcagtgtagagccatttgtctcttttgtcacgccggcatgaagtaagcttgtattaaatctcattgttttcttcttctcgttaattcttacatagtctattgtgttactaggaattgatgagattattatacaaacgtgtgtgttgaaagtcaatgctatcagttatacaaattatttgtgcgtggttatatattttgtttatagccattaatgtcccttaaatactctgcggctgtcgttgcggcatttgctccgtcagatactgcggttaccacctgacgcagtgtcttggtacggacatctcccgccacatacagtcccggctggacgcttctatcatggtcaccattttttgttgcagcatatgtgatgccgtcctcacctgccactacatatcctctctcatcgagctgcaccagattctttataagctctgactgcggtactgagccatatgccacgaatactccgtctacagtcagtgtcctgccacttttaagctttatgcctgttggctttttttctccatatatttctgtcactgtttcgtttaggacaagctctacattttctttctgctttaagagttcaactgtgctctgtgcgccgcggaagctgtctcttctgtgaaccagatagaccttctcacatatatcggacagatataatgcatcatccaaagcggtatctccgccgcccagcactgcggctgtctttcctttatagaatgctccgtcacagattgcgcagtaagatactcccttaccggtatactcatcctctcccggcactcctgcctttctcggatatgctcctgcggtatagatgagcgctcttgcctctgctatcgtgtcatcatcgaatttcactctgtatatcactgattcttctttctcaccattttgcactgcttctatctgcactgcttctttttcgataaattctacatcaagagacactgcatgatccctgaatttttctcccaggtcgtatccgtttatatttggaagccccagatagttgttcacatttccgctctcggctatctggcctgtcccctcgtattctttttctgctactgccacattcagattggctctctttgcatatattgctgcagacagtcctgccggaccactgcctattattattatatcaaacatggaattggtacctttcatcgtccattgaattttttcggtaacttattatatacattatccttaaaaaatacaataataccgcctgcttttataaaacacctttataaaaacaagcggtatcaattttatctatcgtatatacatcctggcctcataaggtctgagcactgacatatcagaggtatccttataatttgaaatcagcacctccatgccctcacactcctttgcaagcggcattggtatctccttgtcaaagaaattgcacacaacaatcatagttttttcttcattctttctgctgtatgcaaaaatattctcatcatcctcaagtaaaagtgtgaatttaccatcaacaaataccggataatcctttctcagctgaacaagcttcttgtagcagctaaagattgaatcagggtcatccacctgtgatttggcatttattttgtcgtaattgtcatttacctttatccaaggtgttcctgtggtgaagccggcatttgccgagtcatcccactgcataggtgtccttgcattgtcacggccctttgcgtaaatggacttcatgatttcatcctttgagtatcctttttcaaggcgctcatggtacatgtttatgatttcacagtccttataatcctcgatatcatactgtacatttgtcatgcccagctcctcgccctgatagatgtatggtgtaccctgcatgccgtgcagcaatatagcaagcatctttgcagattccactctgtactccctgtcattgccccatcttgacacgatacgcggcaggtcatgattgtcccagaacagactgttccagccacagttgtagagctcattctgccagtgagccattatctttttgagctttttaaacggaagcggtgcaaggtcccatttctcgccgccctccttctggtcaagccctatgtgctcaaactggaacaccatagaaaactcgctgccatccggattgctgtaaagctttgcgcgctctgtgtctgcgccccatgcctcacccacggtaatcaagtcgcccttttggaaggtctccctgctcagttccttaaaatattcctgaagccttggtccgtttatggtgattctcttgtccggctcttttgctatctggtcgattacatcaagtctgaagccgccgactcccttgtccatccaccagagaatcatatcgtagattgctcttctgacctttggattctcccagtttaaatccggctgctccggtaaaaactgatggaaataatactgtccgatttccggcacatattcccatgcgcttccaccgaaacaagccttcatatcacttggcggcacgccttcatctccgtctctccaaatatagtagtcatggtatggattgtccttgctctttttagcctccttgaaccacctgtgctcgtttgaagaatgatttaagacaagatccatcataatccttatattgtgcttctttgcctcgtttatgagctcctccatatcatcgagactgccaaacgtcggatcaatatccttgtaatccgaaatgtcataaccgttgtccgcctgcggtgatttgaataccggtgaaagccatattgcattgattccaagcgtctcaagataatcaagtcttttgatgataccctgtaaatcaccaaagccgtctccgttagaatcctgaaagctctttggataaatctggtaaactaccgcctttttccaccatttttcgttattgtttttgctcattatgccctccttgtctcttcattatctcttttagnnnnnnnnnnnnnnnnnnnnnnnnnnnnnnnnnnnnnnnnnnnnnnnnnnnnnnnnnnnnnnnnnnnnnnnnnnnnnnnnnnnnnnnnnnnnnnnnnnnnctgtatcaaattatgctattttacaagcaccaccaaaacctcacagctttcaagcttaagctcggatgctcccactgaaacagtgctcttttcagcatcatttgtgttggacaaaagcacctttttcacactgccatcaagcctgatttgtgcctctttactgccaaaatttgccacaaccagcacgcgcttattttcatcctctctgtaataagccatgatgccatctgtatcctcatatgccggaacacatctgccgtaggtgaacagctccttaaattcatctgactttctgagtgccacaagccttctgtaatagttcaaaacagatgaaggatccttttcctgcgccgcaacattgatagccttatagttttcattaaccttaagccatggctttgctgtggtaaaaccggcatttgcctcatcactccactgcataggtgtccttgcattatccctgctcatccttccacaggctgcaagtgcctgctccttggataagcctgctgcaagtgctgccttgtactgatcctttgtgctgatatcgtcatactcatctatactgttccattttgcattttgcataccgatttcctgtccctggtatataaacggaatgcctcgaagcagtacgctgacagttcctaacatctttattccggcaggattttgagcatgctttggtaaaaatcttgaggcacctctcggctcatcatgattttctatgatattggccttaaagccgtacttttctgtctcaagctgtgaaccaagaatggcctttctccatgtgtcaaaatctatttccggtgcatcataccagccatgctctccatcacttaagcactgtgcacaaaaatcaaatatcgttgaaaaatgcccattctcaccgataaactccggcagctcctcaggcttcatattgaatacctcgccaaccgtaaatgcatcatacttcttaaatgtattgttctttaattcctctaagagctctccgacaccttctgcactttcaaccatcttgtagcaggcagccagtccgtcctctgcatccggctcaaaatcagggaaatcaagatttttctttatattgattatcgcatctattctaaatcctgacaagcccttatcaagccaccagttaatcatctcataaagcttttgtcttagcttttcattctcccagtttaaatccggctgctccttcgcaaacatgtgcagataatacttgtccgtgcccggcaccttctcccagcagcttccgccaaaataagagcggtaattgctcggcggattgccgtttttaccttttctgaaataaaagtaatcagcatactctccatccggatccttaagtgccttttgaaaccattcgtgcttatccgagcagtgatttattaccagatccatgatgatgtgcatatcacgcttctttgcctcggcaaggagctcatcaaactcctccatagtaccgaactcttcagctatcgcatagtaatcagatatgtcatagccctgatccacaaatggcgatttatatatcggagacagccatatgatgtcaattccaagcgattttaaataatccagctttgaaatgatacctcttaaatctcctattccgtcaccgtttgtatccagaaagctctttggataaatctgatatgccaccttgtcatgccaccattttctctccataatgtgtacctcttatctaatcataaattttgcactcatttacatcttgagcactttgtcttgatgtattatactgctattatagaaagtggttagtataaattcttgcaatattttttcattttataacacaatactgctcttataattttaaagagtatagttttaaaagctatggagaaacaacaatatgaaaaacaataatcagcctgccctcgggcagaaagaaaacgcaaagcacggagaagtatttttccccgttcagaaatatataacaagacttgcagcagattaccctgtcatcactacacactggcacgatgaggcagagctcacactgattacaaagggctcatgcacctatcagattgatttgctcgaatatgaagcaaaggaaggcgatatcatctttatcccgccactgctgctgcattccatttcaataagggactgcgacgaattttactcggaaacgtatgtattccatatcaattttttaggtggaaacaataccgatatatgctcttcaagatatctgactccgctaatcaaccatgagtttgccatgccttacctgattgcaccgaagcatccggcatattcatccctttgcaaatgcttcatgcgcataacaaatctatactcccgtcaggaattcggctatgagctggctctaaaggcatttctgcttcaggcaatatttctattgctgcaatacagtgaaaaaaatgctgattttggtgtcaacacatcctccgataagctcaaaaatgtgctcgattacatcgaggtgcactatgccgaaagcatccaggtttcagagcttgccgggctttgctatttcagtgaataccacttcatgcgtttcttcaaaaaacacatgaacatgacctgcgtgcagtatatcaacaatgtgcgtcttgaaaaatccgtggaacagttcgagcgcggcaacacctcaattttagatgtctcactgtctgtcggatttcacaatctgagctattttcacagggcatttaaaaagaggtatcatatgacacctctttcctttatcaaaagccttgaataa

SEQ ID NO: 207 - DNA, 7012 bp, unidentified
  source 1..7012: mol_type = unassigned DNA
ttagaaaatccggcggacaccaagcggtgtacgataattcacatccgaaatcttaataccggtcttggcagtggatgcatgaacaatctgtccattaccaatgtagattgccacatgtccggagtaacagatgatgtcacccggctgtgcattcgcaagtccgtctaccgctgttcccacgcttcggtcaccggatgaagaatgcggcaggcttacaccgaagttcgcataaacactcataacaaatccggagcagtccgcaccattcgtaagacttgttccaccatatacatacggattaccgacaaactggcaggcatagcttgcaacggactgtccaagtgcgctttcacctgttgcatatacaaccggaacttcactggtagtagcagagctttcactctttgctgccttacggttcttctcctctgctttccgtgcagcctctaaagctgccttacgttctgcttcttccttcgcaagacgggcttcctcttcttccctggattctgcttttacaaattcagtagacaaggtaacatagtcgagggatacatagccatcaccttcctcgatattaaccttaacccagttgtctaattcttctgtaacaaggagctgatcctgaattggaacaagaccaagtacggttgcatctaacgaaggctcttcacgaacctttaaggtagtagtcgtaacggttgcaatccggttacctaccttcttcgcaagggcaacggcatcatcaccggtaacacaatattccgccttgacataaccggttaccgagccggatgtgatcttataccagccgttgtcttcttcaataaattctccaacggacttatcataaagcttaccgaggatctccccttcttcgcttggaatgctccgtacattcacatagtcattcacctgtgcgatcacaagagacttaaatccttcttcttctttcttattcgcaatttcccgttccttttcgttaacggtctttgttgtggttgcttcagcagtttcctttacttccttccgggaagttttcggaacactgttattgctgacggtatcgtccttttcatcctgtatgttcttaacgcttgttccttcggatgccagataaaaatccactccggcagaaggaagacctttagattctttcgcttgtgtatctatcgtcatgccgtttaacagaagcatggatgcaaagccaaatgccataaagcgtaccggcatttttctctttctctgttgcatgatatcctccaaaattttcataaacccggttataattgttacaaaattattacgttcgttaacaaatataacacttttcctcttccatgtcaaatgccggaaaaatgttccagcacttactatgccgggaaaatactccagtatttacttatgattacttatgattgaggaaagcttctacagaggtaatggcattggctccatcggcaacggctgtcacaatctggcggagctttttcgtccggatatcacctgcggcaaaaattcccggcttcttcgtcatgccgtcttctcctgcaatgagatatcccttttcatcgcagacatccattcccagaagcagccggcttaccggcacaatgcctacggcaataaatacgccgtccaccggaagctcctgtgtttcttccgttttcacattttttaacgcaagcgcctccacctgatcttcgcctttgatttccgttgctaccgtatcccacaggatttccacattgggaagtgcctgtaatgcctcctgtaaggacttcgcagcacgaagatggtctcttctgtgaacaagatagaccttcgcacagtttcttgcaagaaaaatggcatcctcgactgccacatcaccgccgccgacaaccgccaccgtacggtttctgaaaaaagcgccatcgcaggttgcgcaataggatacacccattccggcaagctcttcttctcccggaatattcagcttcgcatgctctgctcccattgctgccacaatggttttcgtttttaattcgcccttggaggtcgtaacaagatatccatctccattctcttccacgcggagcacctctgcctcctgaaattcacaggaaagcccgtccgcatgctcccggaagcgcattcccaaatcaaatccgttgattcccggaaaacccggataattatccacctcataggttgttaagacctgtccgccgctcatggcgctctgttctaccgtaacagcactaaggcccgctctttttgcataaatcgaagcggagagtcccgcaggaccggctccgataattactacatcgtacatgtttttcccttccttactaaatccagccgccatccatcgtgatcacctgaccggtcagataagccggtgaatgaagcacctgtgaaatcatttctgccgcttctgcacaggttcccatccggtcagccgggatctcttccttcaatgcgcgacgctcttcttctgaaaagcattggttcatctgcgtatcaatcacaccaaacgccactgcattgacctgaatattgctcggtgccagctccttggcaagtgctctcgtaaaactgttgattccacctttggaagcactatatgcgacctccatggatgcaccgacatttccccacaccgaagaaacaaaaagaagctttccttccttgcggtgtaccatctgcgggatcagctcatggcttaaataaaagcaggaattaaggttcgtatcaatcacacgccaccactcctccagggtcatatcactcaaaagtccgatatgggaaattccggcattatgaatgagcacgtcaatctgccctgcctgctgcagcatggaggttacctgccgcggatccgaaatatcacaggcgtaagtctcacaggaaataccggattctgctttcagttctccggcaagaagccggagcttttctatggaatttttacacaccagacaaagatcatagccttcaaaagcaagacgccttgccactgcctctccgattcctctggatgcccctgtaatcaacgctcgtttcttcattcttccctcccgggactgcctttttacttccgcatattgccgctattcacaatccccttcgtaaaaccggcttatctttatcgttttaactgtgggaatacatcaatttcttctatataattaacccatcccaggtgatatgccgtaaccggtgaaagctcattctgaatctcactgttgttcagacgtcccttttcatcctttaccgtgtacataatctcatccggataggcctttttcacgtattcacagacctcttcggtatactccgcatcctcgtacaggtcatgcgccccgaaaagatgcaggatttcatgtgcataaactgccggaacttcccctgcaaacatcacaaggctttcctgcggattatccacaccatcataacagattgcataggtgcttcccttatgattgacaaaaacaatcgttgcaattccttttgccttatattccttagtgagtgcctcataatcaatctgatcttcgagccatccggcaatttcttcatccagtgcttcttcgtaatcttctccatcctttagggaaaagttgatccgtgcacttcctgtcagatcttcatattcttcaaaatcaaccacgagatcgactttcttatggtagcttttcgcctcggtttcaatgtattctttggcaatttcaagattctttaatgccttcttcttatcccggtctgtccattctgcatccggtgtatccacaaagagactgtaaattaaattcctcccctcaaggctccttgcacttccaagcttatagctgcttctcggatttccaggctctcccggctccggtgtcgccgatagctcctcacttacagctgctgcctgtggctgcttgccactatctgtactgctctttccatcggccagtaacggcattccaaagactgctcctgcggtaagaaccacacctaatcgaagcgctgcaattctgattcctgacataaatgttctccctaaaaaaaatgatcccttcgatcataacaaaatgccgtccggaatgcaactgataaaaaccatcggtcagctccgtgcaagctccggatcagctttgacgatttaaattttctattgtttttgtcagcgtgctcagattatttttaatcttctcactggcatccgccatatccctggcaagtctttgaacctctgttgccacaacagcaaaccccttcccctgatctcctgctcttgctgcttcaatagatgcattcaatgccaggatctgctggcgtttactataaccctcaatctgctgcgtctgctcatttgcttctacaatctgccgtgctgcagtcgctattccgtccttcagtccgaagatcatattattattctctttacctgtatagctggcacggacaaacatattaatcacatcaccaagcaggcttgccgatgcctcaatctgctctcttgttttcacgcttacctttccaagcgcgctgatatatttttcctcatcaattcccagctcctgtgctgttttacgaaacttcatttcatccggatgttccggaagcacctgaccgccgatcacactgccaagcactgtaccgtcctcaagtgtaatcggaataccgaagtctaccagccctgcatggcaggcatataccccctgcccctcacggtcacatttctcacaccgccttttgccttccgcacttcctcttgtcaatttaatacaaaattccgtaaaattatagcaatcactgatgtattctccatctgctccaaccgccacggttgcaagccctgtactctccgcccagtttttcatgatctgttcaaatttatccatatcacaaaatttctgaatcttcataaaacacatcctcctttatatttacaggccggaatgaaaacaatcttctgtatcatccggcctgctgtttatgtttatctgatggtgtgaaattctgtcttccaactcctgtatgaatctgtatcatgcatctgttttacatgatcttacgataaagctcctttaggtcttcaacgcttgtgtctctcggattgccgggacagcaggcatctgcaaaagcatcagcggcaagcacatccagatcttcctcacgaatcctgtcattctttaccgggattccgacatctgcggacagcttcttaaccgcatcgatagcagcttttcgatattcctcctgcgtcatttcatcaacgccttccactcccattgctcttgccacctcgcgcagtctctctccggtatattcctgattgtactccataacaataggaagcatcattgcgcaggcaactccatgaggcgtatcataatgcgcgcccagtgtatgtgcaatggaatgtgcaattccaagtccgacattagagaatcccattccggcaatatactgtgccattgccattccctcccggccttcaggcgtattctccactgcgccccggagattgcgggaaatcagcttaatcgcctctaagtggaacatgtccggaatctcccatgctgccttggtagtatatccttcaatcgcatgtgtgagtgcatccataccggttgctgccgttaatcccttcggcatagaggacatcatttccggatcaatcactgccacctccggaatatcattctcatccacacaaacaaatttacgctccttttcagcatccgtaatcacgtaattaatcgtaacctctgctgccgtaccagctgtggtaggaaccgcaatagtcggtactgcatggttcttagtcggtgccaccccctccagggaacgtacatcctcaaactccggattcgtaataataataccgattgctttcgccgtatccatagaagaaccgccgccaattgcaatgattgaatccgcagcacaggctttaaatgctgctacaccatcctgtacattcttaatggtgggattgggtttgatttcagaatataatgtatacggaatgccttccttctccaaaagctccgtaaccttagccgtaaccccaaactttacaagatccggatccgagcacacaaagatatgtttaaatcccttactctttacaacccccgggatctcgttaattgccccctttccatgataggaaacggtgttcaatacaattctgtttgccataaaaaagccctccttcacgatataaccggtctttccctatcgaaaaacctttacttatttccacaatcaacttgcaaatccgcacttcgtgctctccatcctgctttgcaggatatttgctcgttaatgaaccctgaaaaccaaatgtctgctttgcagccgcttgcttttctttggactaattacattatatcatagattttccattctgtgtccttatattttgacccatatgggtaaaccctgtctaccgtccatcaagccttgcagccagctcggcaacgacctcccggattatttttccttcacaattcaaggtaatatcggcatatctctcatacaacggagtgcgctcctcataaagatcccttaacgtctgtccctcttttaatgccactccacgctcctgcagatccccgagacgctctgcaaccgcctcgcaggaaagctgcagataaaccacactgccgatctccttaagatgttccattgctttcgcactatagaccacgcttccccctgttgcaatcaccgtcctgtcgcagcaaagagacgcattaatctctccttccaccgtaagaaatccctctgtgcccttttcctcaataatttcatgcagcatcttcccggttctttcctgaattaccagatcactatccataaagcgatagccaagctttttggcaatcacaacacctactgtacttttgcctgcacccggcatcccgatcaaaacaatatttttcaacgtatgtctgtcctttctctttctgttttcactttcgaacactatgttcccagtataaaccatgtggcttcccggcac

SEQ ID NO: 208 - DNA, 7977 bp, unidentified
  source 1..7977: mol_type = unassigned DNA
  misc_difference 5094: note = a, c, g, or t
  misc_difference 5095: note = a, c, g, or t
  misc_difference 5096: note = a, c, g, or t
  misc_difference 5097: note = a, c, g, or t
  misc_difference 5098: note = a, c, g, or t
  misc_difference 5099: note = a, c, g, or t
  misc_difference 5100: note = a, c, g, or t
  misc_difference 5101: note = a, c, g, or t
  misc_difference 5102: note = a, c, g, or t
  misc_difference 5103: note = a, c, g, or t
  misc_difference 5104: note = a, c, g, or t
  misc_difference 5105: note = a, c, g, or t
  misc_difference 5106: note = a, c, g, or t
  misc_difference 5107: note = a, c, g, or t
  misc_difference 5108: note = a, c, g, or t
  misc_difference 5109: note = a, c, g, or t
  misc_difference 5110: note = a, c, g, or t
  misc_difference 5111: note = a, c, g, or t
  misc_difference 5112: note = a, c, g, or t
  misc_difference 5113: note = a, c, g, or t
  misc_difference 5114: note = a, c, g, or t
  misc_difference 5115: note = a, c, g, or t
  misc_difference 5116: note = a, c, g, or t
  misc_difference 5117: note = a, c, g, or t
  misc_difference 5118: note = a, c, g, or t
  misc_difference 5119: note = a, c, g, or t
  misc_difference 5120: note = a, c, g, or t
  misc_difference 5121: note = a, c, g, or t
  misc_difference 5122: note = a, c, g, or t
  misc_difference 5123: note = a, c, g, or t
  misc_difference 5124: note = a, c, g, or t
  misc_difference 5125: note = a, c, g, or t
  misc_difference 5126: note = a, c, g, or t
  misc_difference 5127: note = a, c, g, or t
  misc_difference 5128: note = a, c, g, or t
  misc_difference 5129: note = a, c, g, or t
  misc_difference 5130: note = a, c, g, or t
  misc_difference 5131: note = a, c, g, or t
  misc_difference 5132: note = a, c, g, or t
  misc_difference 5133: note = a, c, g, or t
  misc_difference 5134: note = a, c, g, or t
  misc_difference 5135: note = a, c, g, or t
  misc_difference 5136: note = a, c, g, or t
  misc_difference 5137: note = a, c, g, or t
  misc_difference 5138: note = a, c, g, or t
  misc_difference 5139: note = a, c, g, or t
  misc_difference 5140: note = a, c, g, or t
  misc_difference 5141: note = a, c, g, or t
  misc_difference 5142: note = a, c, g, or t
  misc_difference 5143: note = a, c, g, or t
  misc_difference 5144: note = a, c, g, or t
  misc_difference 5145: note = a, c, g, or t
  misc_difference 5146: note = a, c, g, or t
  misc_difference 5147: note = a, c, g, or t
  misc_difference 5148: note = a, c, g, or t
  misc_difference 5149: note = a, c, g, or t
  misc_difference 5150: note = a, c, g, or t
  misc_difference 5151: note = a, c, g, or t
  misc_difference 5152: note = a, c, g, or t
  misc_difference 5153: note = a, c, g, or t
  misc_difference 5154: note = a, c, g, or t
  misc_difference 5155: note = a, c, g, or t
  misc_difference 5156: note = a, c, g, or t
  misc_difference 5157: note = a, c, g, or t
  misc_difference 5158: note = a, c, g, or t
  misc_difference 5159: note = a, c, g, or t
  misc_difference 5160: note = a, c, g, or t
  misc_difference 5161: note = a, c, g, or t
  misc_difference 5162: note = a, c, g, or t
  misc_difference 5163: note = a, c, g, or t
  misc_difference 5164: note = a, c, g, or t
  misc_difference 5165: note = a, c, g, or t
  misc_difference 5166: note = a, c, g, or t
  misc_difference 5167: note = a, c, g, or t
  misc_difference 5168: note = a, c, g, or t
  misc_difference 5169: note = a, c, g, or t
  misc_difference 5170: note = a, c, g, or t
  misc_difference 5171: note = a, c, g, or t
  misc_difference 5172: note = a, c, g, or t
  misc_difference 5173: note = a, c, g, or t
  misc_difference 5174: note = a, c, g, or t
  misc_difference 5175: note = a, c, g, or t
  misc_difference 5176: note = a, c, g, or t
  misc_difference 5177: note = a, c, g, or t
  misc_difference 5178: note = a, c, g, or t
  misc_difference 5179: note = a, c, g, or t
  misc_difference 5180: note = a, c, g, or t
  misc_difference 5181: note = a, c, g, or t
  misc_difference 5182: note = a, c, g, or t
  misc_difference 5183: note = a, c, g, or t
  misc_difference 5184: note = a, c, g, or t
  misc_difference 5185: note = a, c, g, or t
  misc_difference 5186: note = a, c, g, or t
  misc_difference 5187: note = a, c, g, or t
  misc_difference 5188: note = a, c, g, or t
  misc_difference 5189: note = a, c, g, or t
  misc_difference 5190: note = a, c, g, or t
  misc_difference 5191: note = a, c, g, or t
  misc_difference 5192: note = a, c, g, or t
  misc_difference 5193: note = a, c, g, or t
ttatttaccctcgtatgctgcctgaatctcttttttgaactcttcctcgcccactctctgaagagtaagtctgaaacgctcaccaccgtttgcatgcttctcgaagaaactaattgctgcatctgtcactctgaaaagagtttccttgtcgcggataatcggaactagctgctctcctttatagatgtggtttccgaaaagtcctccaaacgatactatatatccaggagttcccttccatgcatctgtcggacagctctttacgcagcgcgcacagttgttacatttgtctctgtcgatgacaatcctgccatcctccatgctaagtgcaccctcgcggcatgccttcacacatacaccacactggatacaatcgtcatggctgcactctactgtcatgccgcccttgattccgacatcgttttcctcagcctttaagcagttgttctgacagcctgtgacaccaaacttgaacttgtgaggaagctctcttccgaagtatctttcatcaagttccttagccagagtgtatgtatcgatacatccgctaggacagatttctgagccctgacacgctgtgacagtacgtactctcggtccgcagacacctgttcctacaccgccctttgccagctcctcttttaccacattgatatcctcaaccttgataaaaggaatctcaataccctgacgcgatgtcatatgaacatatccgtgtccgtatttctcagcaacctctgctactgttttgatattttctgctgtaagatttcctcctacaaccgcaattctaagcgagaaacagcccttttgcttctgtctcatgaatccgcccttttttagggccgcgtaatcaactttctccgccattttagtctccttactgtgtaaatatgttaatgttttgttttatatgtaaatgcatatgcacgctctcatttgcatacacattgataccttattatgatggcttaatcagctatatttgcaaaagcctgtgcaaaatcctccttgaggtcatctatatcctcgatacccacgctgactcttataagatcctcaaatactcctgcatcctccttctgcttatctgtgctgtgaagactgattgtggagcccggatgaatgaccagtgtctttgtatctccgatattgctgagtatgtatggaatcgtcaggctgtctataaatttaaatgccttttccttgctgccaaccctgattgtaaggattgctccatagccgtttgtgagctgtttttttgctatttcatgccatttgctgctacaaagccccggataattaacctttatgtcaggataattgttttctatccacgacgcaagatcgagtgcattagagcattctctttccattctaagaccgagtgtctcaagtcctataatatttaagtatgcattcaccggagctaaacaggcacccatatttctgaaaagactgtttctcagctttgcgacaaatgccataggtccatacttcacataatctgcaaaacccggatatctgttcttgtcccatttgaacttacctgagtctgtcagaataccactgattgcattgctgcttccattgatatatttggaagatgaattgaccacgatatcagctccatgctttaaaacctgtatcaggtacgctgtcgatgtggtattgtcaactacaagcggtatatcatgtgcgtgtgctatctctgcaagcttctcaatatctgtgacatccagacaggggttaccgatagtctctgcaaaaatcagtctggtatgctcattgatgctgtcctctatctgctgccagttgttgttctcgacatacctggttgtgatgccgaaggcctcaagatcatggaacaaatctattgtgccaccgtataggctggcgcttgagatgagctcatctccactgcttagtatatttaagaaggtattcatcagcgccgccatgcctgatgcgcatgccaccgatgctattcctccctcgagctttgttattctgttctcaaaagctgtaatcgtaggattggcaactcttgtgtaacagtagcccggagccttgttttcaaatattttttccagatctgccgcgctctcctgctcgaaggcgcttgtctgatataccggtggcagtgtagagccatttgtctcttttgtcacgccggcatgaagtaagcttgtattaaatctcattgttttcttcttctcgttaattcttacatagtctattgtgttactaggaattgatgagattattatacaaacgtgtgtgttgaaagtcaatgctatcagttatacgaattatttgtgcgtggttatatattttgtttatagccattaatgtcccttaaatactctgcggctgtcgttgcggcatttgctccgtcagatactgcggttaccacctgacgcagtgtcttggtacggacatctcccgccacatacagtccaggctggacgcttctatcatggtcaccattttttgttgcagcatatgtgatgccgtcctcacctgccactacatatcctctctcatcaagcttcaccagattctttataagctctgactgcggtactgaaccatatgccacgaataccccgtctacagccagtgtcctgccacttttaagcattatgcctgttggctttttttctccatatatttctgtcactgtttcgtttaggacaagctctacattttctttctgctttaagagctcaactgtgctctgtgcaccgcggaagctgtctcttctgtgaaccagatagaccttctcacatatatcggacagatataatgcatcatccaaagcggtatctccgccgcccagcactgcggctgtctttcctttatagaatgctccgtcacagattgcgcagtaagatactcccttaccggtatactcatcctctcccggcactcctgcctttctcggatatgctcctgcggtatagatgagcgctcttgcctctgctatcgtgtcatcatcgaatttcactctgtatatcactgattcttctttctcactgttttgcactgcttctatctgcactgcttctttttcgataaattctacatcaagagacactgcatgctccctgaatttttctcccaggtcatatccgtttatgtttggaaaccccagatagttgttcacatttccgctctcggctatctggcctgtcccctcgtattctttttctgctactgccacattcagattggctctctttgcatatattgctgcagacatccctgccggaccactgcctattattattatatcaaacatggaattggttcctttcatcgtccattgaattttttcggtaacttattatatacattatccttaaaaaatacaataataccgcctgcttttataaaacacctttataaaaacaagcggtatcaattttatctatcgtatatacatcctggcctcataaggtctgagcactgacatatcagaggtatccttataatttgaaatcaacacctccatgccctcacactcctttgcaagcggcattggtatctccttatcaaagaaattgcacacaacaatcatggttttttcttcattctttctgctgtatgcaaaaatattctcatcatcctcaagtaaaagtgtgaatttaccatcaacaaataccggataatcctttctcagctgaacaagcttcttgtagcagctaaagattgaatcagggtcatccacctgtgatttagcatttattttgtcgtaattgtcatttacctttatccaaggtgttcctgtggtgaagccggcatttgccgagtcatcccactgcataggtgtccttgcattgtcacggccctttgcgtaaatggacttcatgatttcatcctttgaatatcctttttcaaggcgctcatggtacatgtttatgatttcacagtccttataatcctcgatatcatactgtacatttgtcatgcccagctcctcgccctgatagatgtatggtgtaccctgcatgccgtgcagcaatatagcaagcatctttgcagattccactctgtactccctgtcattgccccatcttgacacgatacgcggcagatcatgattgtcccagaacagactgttccagccacagttgtagagctcattctgccagtgagccattatctttttgagctttttaaacggaagcggtgcaaggtcccatttctcgccgccctccttctggtcaagccctatgtgctcaaactggaacaccatagaaaactcgctgccatccggattgctgtaaagctttgcgcgctctgtgtctgcgccccatgcctcacctacggtaatcaggtcgcccttctggaatgtctccctgctcagttccttaaaatattcctgaagccttggtccatttatggtgattctcttgtccggctcttttgctatctggtcgattacatcaagtctgaagccgccgactcccttatccatccaccagagaatcatatcgtagattgctcttctgacctttggattctcccagtttaaatccggctgctccggtaaaaactgatggaaataatactgtccgatttccggcacatattcccatgcgcttccaccgaaacaagccttcatatcacttggcggcacgccttcatctccatctctccaaatatagtagtcatggtatggattgtccttgctctttttagcctccttgaaccacctgtgctcgtttgaagaatgatttaagacaagatccatcataatccttatattgtgcttctttgcctcgtttatgagctcctccatatcatcgagactgccaaacgtcggatcaatatccctgtaatccgaaatgtcataaccgttgtcctcctgcggtgatttgaataccggcgaaagccatattgcattgattccaagcgtctcaagataatcaagtcttttgatgataccctgtaaatcaccaaagccgtctccgttagaatcctgaaagctctttggataaatctggtaaactaccgcctttttccaccatttttcattattgtttttgctcattatgccctccttgtctcttcattatctcttttagnnnnnnnnnnnnnnnnnnnnnnnnnnnnnnnnnnnnnnnnnnnnnnnnnnnnnnnnnnnnnnnnnnnnnnnnnnnnnnnnnnnnnnnnnnnnnnnnnnnngtttctttaatgctgtatcaaattatgctattttacaagcaccaccaaaacctcacagctttcaagcttaagctcggatgctcccactgaaacagtgctcttttcagcatcatttgtgttggacaaaagcacctttttcacactgccatccagcctgatttgtgcctctttactgccaaaatttgccacaaccagcacgcgcttattttcatcctctctgtaataagccatgatgccatctgtatcctcatatgccggaacacatctgccgtaggtgaacagctccttaaattcatctgactttctgagtgccacaagccttctgtaatagttcaaaacagatgaaggatccttttcctgcgccgcaacattgatagccttatagttttcattgaccttaagccatggctttgctgtggtaaaaccggcatttgcctcatcgctccactgcataggtgtccttgcattatccctgctcatccttccacaggctgcaagtgcctgctcctttgataagcctgctgcaagtgctgccttgtactgatcctttgtgctgatatcgtcatactcatctatactgttccattttgcattttgcataccgatttcctgtccctggtatataaacggaatgcctcgaagcagtacgctgacagttcctaacatctttattccggcaggattttgagcatgccttggtaaaaatcttgaggcacctctcggctcatcatgattttctatgatattggccttaaagccgtacttttctgtctcaagctgtgaaccaagaatggtctttctccatgtgtcaaaatctattttcggtgcatcataccaaccatgctctccatcacttaagcactgtgcacaaaaatcaaatatcgttgaaaaatgcccattctcaccgataaactccggcagctcctcaggcttcatattgaatacctcgccaaccgtaaatgcatcatacttcttaaatgtattgttctttaattcctctaagagctctccgacaccttctgcactttcaaccatcttgtagcaggcagccagtccgtcctctgcatccggctcaaaatcagggaaatcgagatttttctttatattgattatcgcatctattctaaatcctgacaagcccttatcaagccaccagttaatcatctcataaagcttttgtcttagcttttcattctcccagtttaaatccggctgctccttcgcaaacatgtgcagataatacttgtccgtgcccggcaccttctcccagcagcttccgccaaaataagagcggtaattgctcggcggattgccgtttttaccttttctgaaataaaagtaatcagcatactctccatccggatccttaagtgccttttgaaaccattcgtgcttatccgagcagtgatttattaccagatccatgatgatgtgcatatcacgcttctttgcctcggcaaggagctcatcaaactcctccatagtaccgaattcttcagctatcgcatagtaatcagatatgtcatagccctgatccacaaatggcgatttatatatcggagacagccatatgatgtcaattccaagcgattttaaataatccagctttgaaatgatacctcttaaatctcctattccgtcaccgtttgtatccagaaagctctttggataaatctgatatgccaccttgtcatgccaccattttctctccataatgtgtacctcttatctaatcataaattttgcacctatttacatcttgagcactttgtcttgatgtattatactgctattatagaaagtgattagtataaattcttgcaatattttttcattttataacacaatactgctcttataatttaaagggtatagttttaaaagctatggagaaacaacaatatgaaaaataataatccgcctgccctcgggcagaaagaaaacgcaaagcacggagaagtatttttccccgttcaaaaatatataacaagacttgcagcagattaccctgtcatcactacacactggcacgatgaggcagagctcacactgattacaaagggctcatgcacctatcagattgatttgctcgaatatgaagcaaaggaaggcgatatcatctttatcccgccactgctgctgcattccatttcaataagggactgcgacgaattttactcggaaacgtatgtattccatatcaattttttaggtggaaacaataccgatatatgctcttcaagatatctgactccgctaatcaaccatgagtttgccatgccttacctgattgcaccgaagcatccggcatattcatccctttgcaaatgcttcatgcgcataacaaatctatactcccgtcaggaattcggctatgagctggctctaaaggcatttctgcttcaggcaatatttctattgctgcaatacagtgaaaaaaatgctgattttggtgtcaacacatcctccgataagctcaaaaatgtgctcgattacatcgaggtacactatgccgaaagcatccaggttgcagagcttgccggactttgctatttcagtgaataccacttcatgcgtttcttcaaaaaacacatgaacatgacctgcgtgcagtatatcaacaatgtgcgtcttgaaaaatccgtggaacagttcgagcgcggcaacacctcaattttagatgtctcactgtctgtcggatttcacaatctgagctattttcacagggcatttaaaaagaggtatcatatgacacctctttcctttatcaaaagccttgaataa

SEQ ID NO: 209 - DNA, 11062 bp, unidentified
  source 1..11062: mol_type = unassigned DNA
atgcaagacattagaaacattgcgatcatcgcccatgtggaccacggaaaaacgacactggtggacaagatgatgctggcgggacatttgttccgcaacgaccagacaaacggtgagctggtactggataataatgacttggaacgcgaaagagggataaccatcctttcaaagaacgtttcaattaactacaaaggaacaaaaatcaatattattgatactccgggacacgccgacttcggtggcgaagtagagcgtgtactcaatatggctgatggatgtatcttattggtggacgcattcgaaggcccgatgccccagacacgcttcgtattgcagaaggcgttacagatcggtttgaaacccgtcgttgtagtcaacaaggtggacaaacccaactgccgtccggatgaagtttatgaaatggtattcgacctgatgttcagtctgaatgctaccgaggatcagctggatttccccgtcatttatggctctgccaaaaacaactggatgagtaccgactggaaaaccccgaccgagaacctgattccgctgctggacgctatcatcgagcacattccggctccgaaacaactggaaggaactcctcagatgttaatcacctctctggactactcgtcatatacaggccgtatcgctgtgggacgcgtgcatcgcggcaccctgaaagaaggcatgaacattacactggcaaagcgtgacggcagcctgataaagtccaaaatcaaagaactacatacgttcgaaggtttgggacgcaaaaagacagatgccgtttcatcgggtgatatctgtgctgtggtaggtatagacggtttcgagatcggtgataccatctgcgatttcgagaatccggaaccattgccacccatcgctattgacgaaccgaccatgagcatgttgttcactatcaacgattctcctttcttcggtaaagaaggcaagtttgtgacttcacgccacattcaagaccgcctgaccaaagaactggacaagaacctggcattgcgtgtacgcaaaagcgaactggaggacggtaaatggattgtatcaggacgtggcgtgcttcatctctccgtattgatcgagaccatgcgtcgcgaaggctacgaattgcaagtgggacagcctcaagtgatcttcaaagaaatagacggcgtgaaatgcgagcctatcgaagagctgacaatcagcgtacccgaagaatattccagcaagatgattgatatggtaacccgccgcaaaggggatctggtttctatggagacacagggtgaccgcgtaaacatcgaatttgatatgccttcacgtggtattatcggtcttcgtaccaacgtactgactgcctcggcaggagaagcgatcatggcccaccgtttcaaatgctaccaaccctacaaaggtgagatagaacgccgtagcaacggttctatgattgccatggaaggcgggacagcctttgcatacgctatcgacaaattgcaggatcgcggcaagttcttcatttatccgcaagacgaggtatatgccggacaggtggtaggtgaacatgttcatgaaaatgacctggtaatcaatgttaccaaatcgaagaaactgaccaatatgcgcgcatcaggctctgatgacaaggcccgcatcattcctccggtcgtattctcattggaagaagcattggagtacattaaggaagacgaatatgtagaggttactcccaagagcatgcgtatgcgtaaagtgattcttgacgaaacagaacgcaagagagccaacaaaaactgatccatctacattcatatccataaaatcccgaaggtgttgccgcctccgggattttttatctctaatccagaaacttcactttaccaacctcccgtggtttggcagccggcgcctcatcgggatatccgaaagcgatggcgtaaagcaactcatacccttcactgaatcccagctttttcatatattccgccgcagcaggtgatttcatgaagcgcacaggccctcccaggcagcaggagccgattcccattgaccaggcggacaaaatcatattctcgcccaacaggccacaatctatcggtgacatatcatacgcgggatcattcgctataaacacgaccgtaggagcgttattgaacatattcttaaaacccgaacgctctgccgctttcgggttttcctgtttgaatatctcagtcaggccattgataaattccggattatccacgacacggatctcccatgactgtttattcatcccattaggagcattgattccgcattctatgatagtctgcatcttttcacgctccaccgcctcgggtttgtacttccgtatgctgcggcggctcatcatcgtttctactacaggatttacctgacttacggaaacactatccgcaacagcttccgtctgtcgggagccttgcggtgtgcagctgcataataccaacaagcctgcacttactaacattaatctgaatgatttcatttacttttatatttggtctgcaacaaatctagaaattttcaagcataaaaaaaagtggttcctgtatggaaccactttttatatgttaaatctgtaaaattcagattacaacttcggacctgcagcaaccaacttcttaccagcttcgttaccagtgaacttagcgaagttcttgatgaagcggccagccagatctttcgctttttcttcccactgggcagcatcagcgtatgtgtcacgcggatcaaggatcttcggatcaacattaggcaattctgtaggaacaacaaagtcgaagaaaggaataaccttagtaggagccttgtcgatagaaccgtccagaatagcatcaatgataccacgagtatcgcggatagagatacgtttgccggtaccgttccaaccagtgttaaccaagtatgccttagcaccggtcttttccatcttcttaaccaattcttcagcatacttagtggggtgcaatgacaagaaagcagcaccgaagcaagcagagaatgtcggagtcggttcagtgataccacgttctgtaccagccaatttagctgtaaatccagacaagaagtagtactgagcttgttcagggttcaagatagataccggaggcaatacaccgaatgcatcagctgacaagaaaataacttgttgagcgtgagggcctttagaaactggcttaacgatgttttcgatatgatagataggataagaaacacgcgtgttttctgttacgctcttatcagcgaaatcaatcttaccgttagcatcaaccgttacgttttcaagcaaagcgtcacgtctgatagcagcatagatatcgggttcgctttctttatccaggttgataaccttagcgtagcaaccaccttcgtagttgaatacaccttcgtcatcccatccgtgttcgtcgtcaccgatcaacttacgtttcgggtcagtagacaaagtagtcttacctgttcctgacaaaccgaagaagatagccgagctggttccttccatgtttgtattagcagagcagtgcatagaagcgataccacgaagcgggttcatgtagttcatgatagagaacatacctttcttcatttcaccaccgtaccaagtgttcaggatcacttgttctttagtcttcaagttgaaaacagtagcagtctcagagttcagacccagttccttgtagttgtcaacttttgctttagaagcattgaagcatacgaaatcaggttctccgtaagcagcaagttcttcagcagtggggcggatgaacatgttagttacgaagtgagcctgccaagctacttccatgatgaaacgtaccttcatacgagttgcagcgttagcgccacagaatgtatcaacaacgaacaaacgcttgccgctcaattctttaacagctttagccttcaagtcagcccaagcttcttcagtacaaggtttgttatcgtttttgtattcgtcagaagtccaccatactgaattttcagaagcttcattcttaacgaagaatttatctttaggagaacgacctgtgtaaacaccagtcattacgtttacagcacccagttcagtaacctgtcctttttcgaaaccttccaatcccggtttggtttcctcagcgaaaagtacatcataagaaggattgtggaaaatttccttcacgtcggtaataccgtacttgcttaaatctaaatttgccatctttaaatgatttaatttggttattgtataatgttatttttactctttatattctgaaagaagatgtttttcaacatctccttgtctaaggcgctacaaaattagtgctttattttaaaaaaaagaagctattagagaaaaaattccgtaataatcaaagatttatatttgtgtaacaaaaatgcaattcgtactttacaaatctagaaattatttgtttctttgcaggttaaagtcaacaacataacaaaagcagaaatatgaaaatcgtcaatctcagtgaaggcaattctctcctaaaccaatatgtggcggaattgcgtgatgtacatgttcaaaaagaccgtatgcgtttccgtagaaatatcgaaagaataggagaaatcatggcatacgagatgagcaaagcactaacttattccgtaaagcaggtacagactcccttgggaaccgccacagccagcacacacgatgacaaaatagtgatcgctacggtattccgtgcgggactgccgctacacaccggcttcctgaacatgttcgaccatgccgacaacgctttcgtctccgcattccgtttttacaaagatgacgagcaccacatagtagatgtgcacatcgaatacatcgccgccccttcattgaatgacagaactttgcttttagttgaccccatgcttgccaccggtgaaagcatggaactagcctggaaagctttcctgaccaaaggcagacctgcaaaactacaaatggcctgcgtcattgccagccaacaaggggtagaacacatggcagaacttttccccggcgatgatgtcacattatggtgtgccgccatagatcctgttctggacgaacacaagtatattgtcccggggttgggagatgccggcaatttgtcattcggcgagaaactttaaagctcgcgccatccggaaagccccgcttgcccgcccggataaaaagacatcccgattgtataaataacgaatggttagtaaccggcagtgattcaccgctcattactaaccattcatatttcagacagatcggcagatccgtccctgcaaggaggatgaaaatcttatttcacctcccagatatcattcgtcatcagtaattcctggaaattatgatatttcttctttgcagccacttcttcaatctgtgcgttaacggcatcgtcataagtaggagcttccacatcacgaatcacccctaatgcaaccgggaaatccggtccttccatcaatgccagcttcagctgcaaagtattgtccatacagtgagcatcgtgcaccaaaatatctttttccgtcacaccattctcaccaagctttaccactttcagtccgaaaccgtcctgcatcagtccgtattctttttccgcaccaaacaacatcggtttgccatgttccagataaatggcattcttggaacggccttctttcgtatataccgattcgtgtgttccatcattaaagatgacacagttctgaagaatctcacatacagccgcacctttgtgattggcagcagccttcagaatctccactgtaccgggaccatccgtggctaccgcacgggcaaagaaacgtccacgcgcgccaaaacataattcagccggatgaaacggatcttccacggttccgtaaggtgaggacttactgacaaatccgcgcggagaagtcggagaatactgtcccttggtcaaaccgtagatacggttgttcaacagaatcatattcaagtcgatattacgacgaacggcatgtataaagtgatttccaccaatagccagaccatcgccatcccccgaaatctgccagacagtaatcttcgggttagccaccttgcaacccgtagaaatggctgccgcacgaccgtgtatcgtctgcatggcgtatgtattcatataataaggaagacggctggaacatccgataccggaaataacggcagtatcatgaggagccactcccaattcagccatcgctttgtgcagcgaagccaagaaaaaatggtcaccgcaacccggacaccagcgaggttgtccttttttgaaatcttttgctgtatattcgctcatagtctttactttctttacggttattatttatttaagatctcggtgaaagcatcaactaactcgctgactacgaacggctggcctttgacctcattaaactgataaggaacaaatccgtccactttcatacggagatatccggcaaactgaccaagattctgctcagccacgactaccttcttatatttcctcagcacttctgccgtattttgaggcagcgggttcaaatgaacaaaatgtgccagagcaaccttcttgcccgcacggttcatttcctccatggctgaatataaatgaccgtaagttccaccgaaacctactatcagcagatccgcgtcctctacgcaaccttgcacctgaacatcaggcaccggaatcttagccaccttttcggcacgcaggcggcacatcaagtcatggttttcaggttcagtagaaatagcgcctgtatcactgtctttctccaaacctcccaggatatgcatataaccttcctgtcccggcaatgcccaataacggacacccgtttcggcattacgcttgtaaggagtataattatccttcatttccggagtgacatacggcgggttgatagccggatagtctgccagatcaggcaatttccatgcaccggagccattggctacaaagccgtcagtcagcaacaccaccggagtcatgtgttccaaggcaatcttacaagcatcataagcggcatcgaagcagtgagtcggagaagctgcggcaatgaccggcatgggagactcgccgttgcggccaaacaaagcctgcaacaaatcggtctgctcggacttcgtaggcaaaccggtagaagggccgccacgctgtacattaacaaccaccagtggcaattctgtaataacagctaggttcatagcctccgacttcagacagacacccggtcccgaagtagaagtagccgccaacgcacctgcaaatgaggcaccgacagccgtagcacagcctgaaatttcatcttcacactgaacagtagtcacgcccaatgatttatgtttagacaactcatgcaaaatatctgttgccggagtaataggataagatccgaggaacaaacgcaggcctgctttctcggcagcagcgatcaaaccgtatgccgtagccttgtttccgctgatatccatgtactttccgggtactttagatttggtttccaccttataagtatgatctacagacgcatgggtgttgtgaccataatcatatccggcgtgtatcactttaatattcgcttcggctatttgcggcttcttcgcaaatttctcgcgcaagaagttttcagcaacagtcagatcacggttaaacagccagcaaaccaatcccaaagcaaacatattacggcatttcaacattgacttgttgtccatgcccgtatctgccagacagtctttcaccatctgtgaaataggggcagcaatcacatcctgcttaatccccatctcttcaatcggattgtctgttttgaaagccgccttgtccagatctgatttctggaaacaatctgtatcaataatgatacaagctgtgggcttcgcaaatttgtattgtgttttcaatgcagcggcattcattgcgaccaatacgtcgcatttgtcgccgggggtaaaaactttacccgcaccgatatgcacctgaaaacctgacacaccggtcaacgaaccttgcggggcacgtatatccgccgggtaatcggggaatgtactgatatcatttcccactgtagccgaaatattagaaaagatatttccggccagctgcataccatcgcctgagtcgcctgagaaacggaccaccacctggtccaactccttgactatcatttcatctgccataacttattatttagggttacaaaatttcactgtttgcaaagttcggaaagttctgccaaaggacaaaatattccgctatcaaactacgttcgaatatcaaaatgcacaaaattaaaggtttatttaattacaagccaagaaaaatcagagataaatacctgtttaaaagcataatttctatcattatgataacggatagaagctgttcgtttttacaatttattatttttatccatgttttataaacaacatgaaagtccatagccggataaatccattatcaggccctcaaaagcaggcgaaaaatgacaaaacagcaaagaaaggattattttctttccacttaagacatttttcaatctttcatattgccattttaacaaaaaggagtacctttgtagccgcaaaggggccttgtagttcaacggatagaatagaagtttcctaaactttagataggggttcgattcccctcggggctacaaaaaagcagtaaacagttgttatgcaaccatttactgcttttattttatccagataatctttagagccgcttatttaatcaccccaagttccttgcccactttcataaatgcggcaatcgccttatccaaatgcgccttttcatgaccggcagacaactggacgcggatacgtgcctgtcctttcggaacaaccggataatagaaaccggtcacatatatgccttcttcctgcatcttggctgcaaaatcctgagacagtttcgcatcataaagcatcacagcacaaatcgcgctctgagttggtttgatgtcaaaaccggcagccagcatcttgtcacggaaataattcacattatccatcagcttggtatgcaaagcatcactttctttcagcatcttgaacatttccagactggcgccaatgatggcaggggctacagaattagagaacagataaggacgtgaacgctggcgcaacatatcaataatttctttctttccggtagtgaatcctcccatcgcaccaccaaacgccttgcctaatgtgccggtaaagatatccacatgaccgtacacattaaattgttcggccacaccatgtcctgtaggccctaccacaccggctgaatgagattcatccaccattaccaatgcgtcatatttttccgccagttcacaaatcttatccaagggagctacattgccatccatcgagaatacaccatctgtagcaataatgcggtgacgctgcgcctgcgcttcctgcaaacaacgttccaggtcagccatgtcggcattggcgtaacgatagcgttttgccttacacaagcgtacaccatctataatagacgcatgattcaacgcatccgaaataatagcgtcttcttctgtaaacagcggctcgaacaagccaccgttagcatcgaaacaagcagcataaagtatggtgtcttctgttttaaaataatcagagatggcagcttccagttgcttgtgcaaatcctgagttccgcagataaagcgtacggaagacataccgaagccatgcgtgtccatcgcctctttagccgcattgatcaaacgttggttatctgacaagcccaaataattgttggcacaaaagttcaacacatcttctccgtcattcaccttgatgtccgcacgctgaggtgtggtaatgatccgttcatttttatacagtccggccgctttaatatcagccagttccttcgcaaggaactccttcattttatcatacatagctttgctttttttttattaagtatattcgtttgaattaaaaaaatcagtcctgtttgacaaagttcttattttttttcgatatccggttaaattatagagaattttttgataaaatatgcagttttctctctatctttgcttccaaaaggaaatttatagcaaatagcaaactatgaaaaatgtattaattatcggctccaccggtcagatcggttcggaactaaccatgaaattaagaagtatttataatggtaacatcgtagctggatacattcccggtgccgagcctaaaggggaattaaaagagtcaggtccttctgccattgtagatatcactaatgaacaacaaatcgccgagactgtatcaaagtacaacatcgacaccatttacaatctggcagctttactgtcggcagtagcggaagccaaacctcaactggcctggaaaatcgggatgggaggattgttcaacgtattggaagtggcacgtgaaatgggatgcgccgtattcactccaagttctatcggtgtattcggaaacaacacacccaaagacaagactccacaagataccatccgtaatccgcgcaccatgtacggggtgaccaaagtatcgggagaattactgagtgactactaccatatccgtttcggcgtagatacccgctccgtccgtttccccggattaatctcgtatgtcacacctccgggcggcggaaccactgactatgcagtagatatttactactcggctgtaaaaggtgaaaaatttgaatgtcctatcgcagccaacacattcatggacatgatgtatatgcctgacggcttacgtgcagccattgaaataatggaagcgaatcccgacaaactggttcatcgcaattcgttcaacattgcgtctatgagctttgatccggaaatcatctataacaatataaagaagtatatgcccgatttccaaatggaatacaaggtagatccgctacgtcaggctatcgccgaatcatggccgaactcactggatgacacttgtgcccgtgaggaatggggatggaaaccggaatatgacctggacagtatgacacaggatatgcttgccaaattgaaagtacggttcaataaataa

SEQ ID NO: 210 - DNA, 11827 bp, unidentified
  source 1..11827: mol_type = unassigned DNA
ttatttcagattgtttttttctaaataataacactgatgatcatatattttgccgtcatagcttgcttcggcctgatggagaatgccttcgtatgcaaatcccattttctccaaaacacgttgtgaacgtttgttttgaggataacagttcgcactgatcaaggttaatcccagcttgttgaaaccatagtccaaaacagcagagacggcttcagacatatatccttttccccactgggcttcgtctagccagtaaccgatcattccggcatttgaattctctcttttagggtctggcagaattcctatagctcctatcagaagctggtcttcctgtctggtgatggcccatgtgtctttttgtggtataaatattgtttgaagaattttcaaagattcctccggtgtgtcatgaggcttccatccagcattatttcctaggttaggatttcggcaacagttaaagactgcttccgtatcattttctgtaaaaggacgtaaaataagtcggtccgtttctattacatggtttttcacaggggtgttttcctgctcttttttataaacacactctatccggttcccgtctggatctagtaccacactttcaaaataaccatctccggaaatgcgaggttcacttacgatatggtatccttcagcacgtagtagttccgtcaatgataaaacagcttcttggttttcaaaagaaaaagctagatgagtcaatcccagtctgttttcttttatcggaacattttgcacgtcagtcctgctcatcagctctaatgtagcaccactttcaaatgaaatgaagtaagattcaaaccctttttggacattaatatatttttcattactcgttccgttaaaataacggatatagaattctcttagcctttccaactgaaatgtccaaatggcgatatgatgtatgttcatgggtgattgtttatctgttgtatatattttttacagttcgtttttattctagataaatcatctttttggtcattccaccgtcgatgatgatattttgtccattgatgaaatcgttttcttcttgacataaaaataaacacatgcgtgctatgtcttccggttttcctactcgttttgatggatgttgggcatgatcctcagggcgtagttgttcgtaattattagtttgaatccatcccggcgaaatacagtttacggtgatatggaagtcggcaagggataaagcaagcgcatgagtcagtgaatagattcctcctttggaagccgcataactttcactacccggttcgctcattaaataacgggtggagcagatattgataattctgccatacggatgattttctgcctggaatttgcgatgcaaagctaatgtgcgtgaggtgataaatacaggtcgcagattgatggatagaattttgtcaaaatcttccacactggtttctgtgatgggggagaattcgcttattccggcgttgttgataatgatgtccacatccccccacttttcaaaaaggtcgcgcatacactcctcaagggactctttatcacttacgtcgacatgatagaaaattgctccggtctctttggccgtcagtgttcccaactcctcatttttgtcacaaaaggcgacttggtattgtgagttgcggaaagctttcactatatttttcccgataccatcggcacctcctgtgatgaatgcttttctaggaggtctgatagcgttgtctgtcagctcctttggttgaggcttgacggagatcgttttcttctttccatgtttgcggcttttttcccatgcagcctttcgggcttcatattgctcatattgtctttctatataattgtctgccataagttttgaaatatatttatcggaatgttattctattgttcaccataaaattaacagctccatagattattattccaatgaattgtgctgtaaattctttgaggcctattgcttcgatcatcagtatcacaaaaagaagttgtatgccataggcaataccgaaagcggtacaaaagagcattatttgttgcccaagactgttttggggattgctggaaggaaagatccaatatttgctccatataaaattatgagtctgagcgatgaggtatgccataatatttgctactatataatttcctttgaatgagaagtaactcattacaatccatatcactaacatggtaataagataatttaaggttcctatcgtagcaaaacgaactaaacgtactgatgctttcatcctctttctttattggtttattttacatggtgaattttcgtgcaaacttactaaaaatctgtgattttaatgcttgtgcaataaaaaagaagcccacttttctcagttcctgtttaaattttcctcaatcgtaatcttatagtagcccatttaaccatttcctctgtcggagcgaatatcagttcatcgtttcggctgatccttctatgatgatccatccatgagaatgatatacgtatccggagcattccgtgcacacgggatgctttatccacctacaacagagtttggtaaaactgctgccactgctaccaccttttccactggaaccacgatgaacaggtcgtttcggagggtggtggcagcacctttttctatgcggtaaaaaggtgtgctgccaccacttttacctttttttatcccaaaacggacggaggaaggggaagatacatgagatgattgccacacgccgggaaaaggagatgggaatggatccacagaatgctgaagccggactgacagaatggaacccaccggcggacaaaacactgactgtagcctgatgttgaaagagtcaactgatattataactaagtattaactccgtcaaccatccttacaagtaagaagaaggagtagtcaacctaaagcgttaaactacaatgggaatctgattgcatcctgccagaactacagttgcctacagtcaaaaccacagtaacaattcagtggaactctggttgcatcttgatggaactaaagtttcaacctgacggaactggttgaaacttgtagcccgtgtacacgttcatacggatgaacaaggcgagccatacgtatcaacaggtgcgccccggcaggatagccgcgaggtatctcactgtcggaaagaatagagaaaggtggtggcagcagcctttttaccgcataaaaaaaggtgctgccaccaccctctggaacgtcctgttcatcgtggttccagtgggaaaggtggtagcagtggcagcacttttgtaaaactccggaagtaaggcacttttatatcatgcaaaataatagtatatcgcaaatgtaccttataaactgtccgattgcaactattcagaatctgtgattaatgaatctcgatgatcctgttcactttggctttttcttcaggagtgcgtttaggcaaatcaatagtcagaacgccgttgctggcattggcactgattttttccttaaccacatcttcgggaagaatcaaagcttgttcgaacttagagtaagagaattcacgacgtaaatatcttctgttgtgatggtcatcctcttttgtttcattctttttctccattgagatcactagttcgttgttttcgctgatgtggatattgaaatcttctttagtcatacccggagcagcaacctctactttataatctttgtcactttcaatgacattaattgcaggggcggtagcgttcgctcttgtcaaccattcattatcaaagaaatcattgaaaatacttggtaaccaattctgattgttatactttctagtcggcatcataattataatctcctatattttaaattgttactagattgattttttaaatctttttatcttgtcgcttttggcgatacactgatgttcttgcaaagtatatgcctgatggcaaaatgtcagccggaagtgaaatgaatttaaatctgtgaagataattttaataaatatcgagatgcttttaaacctttgcagaatttgtttgcagttgagatgcgaggcaaagtgacaatgaaagccattttgtcagcaaatggtggctgttatttatgtcagtatattatctttgcattgttttataaaagtaaccgttaaaaaagaaaaggaaattccatgttggcatatacttatattaagcaggggaaatttgaattgatagagaaaccgaagcctgagttgaaagactcgagtgatgctattgtgcgcgtcactctcggaagtatttgtaccagtgacttgcatatcaaacatggtggtgtaccacgtgccgttcccggaataacagtggggcatgaaatggtgggtattgtagagcagacgggaagtgatgttgaattagtcaagccgggcgatcgggttaccgtcaacgtggaaaccttttgtggggaatgttttttctgccggcatggatatgtgaataattgcaccgatcctaatgggggatgggccttgggatgccggattgatggtgggcagacggagtatgttcgcgtaccttacgctgatcaaggtttgaatcgtattcccgattccgtgactgacgagcaggctttgtttgtaggagatatccttgctacaggattctgggctgctcgcatttcggagattaccgaagaggacacggtgcttgtcattggtgcgggacctacgggaatctgtactttgctttgcgtgatgctgaggaagccgcggcgcattgttgtttgtgaacaatcccccgaaagaatccggtttgttagggaacattatccgcaagtggaagttgtcactccggataaatgtaaggaatttatattgcaaagtagcacacacggtggtgcggatgtagtttttgaagtagcaggaggggaggatacattccgcttggcatgggaatgtgcgcgccctaatgctgtcgttgttttggtggctctttatgaccgtcctcagattcttcctctgccggacatgtatggaaagaatttgattttcaaaaccggtggcgtagatggttgtgattgtgctgagatactccgcttgatagaggtgggaaaaatagataccactccattaattacacatcgtttcccgctggatcagatagagacggcttaccggatttttgagaaccgacaggatggagtgataaaggtagctgtaacaatggagactggaatgtaaattgaaaatagtaaaatataagcgtgtatgcctgttattgaaatatcatcgttgacacattccggagtggatgttttctgcacgttgacggaagctcagttacgtcagcgtatggaatctggaaaaggattgtttatagccgaaagccccaatgtcattagtagggctttggatgcaggatatgaacctcttgctcttatgtgtgagcgcaagcatatctctggtagtgctgcccacattatcgagcgttgtggtgatgtgcccgtttatacgggagacagagagttgttggctacgctgactggctatgttctgacacgtggtgtactatgtgctatgcgtcgtccggtgttgccctctatggaggagatctgccgggatgcccggcggattgtagtcattgacggtgtggtggacactaccaatatcggggcgatattccgttcggcggctgctcttgggatagatgcagtattgttgacacacaattcttgcgacccgttaaatcgccgtgcggtaagggtgtctatgggttcggtgtttttagtcccatggacatggttggatggtacgattggcgatttgaacaagttcggtttccgtactgctgccatggcgttgactgacgattctgtctctatagatcatcccatgttggcggcagaacctcggttggctattgtgatgggaacggagggggaggggcttcctcacaaaacaatcgctgaagccgattatgtggtccgtatccctatggcgcatggggtggattcgctcaatgtggctgctgcggctgctgtagccttttggcaactccggattacggatccttgaaaaaaattgatatatgattcagcttgtttgtaagctcccgataaaatacccgttgtctttattctcttgatctttatgcaaaaaagattatgagaaaaatgaataaagaagaattcttagaaattcgattccgtcagcaacgaagcggtttgaacaaaatgatccattacgagcaaaactcctcccttatgattttgcaggtgagcttatttattcctatatttgccggaaataatcacatattactttatgaaaacaaaatattggatcatctgcttatcaattttctttgtggcttgctcgcgtaatatgaatgatatatacacgggtggaggggaagaagaggagaaaaaaatcaacaaagacgacttttttgattttatcactacacgtaattgccaacttgtcattgactatggcatgaaagtacagactgctttttatctgtatgatgaatatcctatggaattggttggaaatacgtgggagttcaaagatataaatcccatttatgctgcttcgactgatgtgaatggtaaatttatctccaaagtatctttgccggcatacttgaaaaaggtatggctggtaacggatcatgtattggtcgtatcacctgttgagttggaattgctagcagacggactaacctttaattatgctgattataaagcgcaattgtctgccggagggcgttctagagcaataatgggaggagtgggataccctgatggatatgatgtgctggggcattgggatgaaaatggagttcctgattatttattgtctgagaagttggatattcctggtgcttttttagaaagatgcagcagcttgagccgttctatactggtggataatcgtaatctgttggaaagatttccggaactacgtacatcaggaaataatgatatggtaatcactaaagctaccggtctggtagctacttattttgatttctcctctaccgcttgggagaatatggtcgcttattatacgtataaagagggggagactgtagatatagctactataaagaagactatattgatacctcgttccggtaagaatgcccctaaatctttagtcggtgaacaaataagattaaaatattggaataaagaaaatggcaactatgaggatgagttccctaaaggaacgcatattggatgggtcttattaggaatgggattcggaaaagagaaaggtgcattgcttcgttattctaatcccgcgtataatgacaataaagagcaacgttcagttctgttaagcgatcctgaacttgacaattgtttctttatggctatggaggataatgtggatatgcgctttaatgatgtgcagtttgctattatggcatctattccttcttctgtggagtctactcccagtataccggatgaagtaaataaagatgaaatttcgtatgtagtcaaaggggctttggcttatgaggacaattggcctgataagaatgattatgacatgaatgatgttgtgatatattattccagtacggtagtgaaagataaatcttctaacgccttggtacgcaccactacaacttttactccgatgaatgatggcgccacttataccaatggatttggcttccagttggatgatgtggggaaagaacatatagatttggtgcgggtgagtcaagatggcaatgtgattgccgatcattttgatccggacacggaaaagcctgtattagttctttttcccaatataaagcccgttctcaaaaagcctgtgactgtagtgatcgggtttaagaaatatgataaagtaagtgacatggatgcttatcctccttacaatccttttgtctttgtaaatgaacgttcccatgaagtacatttgtcaggatataaaccgacaagtgtggccgatgagagtttacgtggcacaggtagtgatttgagtcaggattccaatggtaatccaatgtactatattgcagaagacaacatgccttttgccataaatatcagtaacattgaattcaagtggcctcctgagaaagtatctattaccacctactatcccaagtttaaacaatggagggattcttttggcaaggattataaagattggtttttatatcctgaggggcagtagagtgctgaaaagtcctgtgaatactgatcattcagtttgacaggactttttatgctctcttctttattttctttcctgcctttcaagtctcttgtccggtctctgtggctatttcttttctccgatcgtccactctttggtccggttatacgtttcccacatacgggcatacaagcctccgagagaaagcagttccttgtgagttccctgttcggccacagctcccttgtccacataaagaatgcagtctgcatccgtaattgtacccagacggtgtgcgatgaccagtacagtctttcccatgatgagataagagaacgcttccagtatcttgccttcgttttcaggatcggaaaaagcggtggcttcgtccagcaggatgataggggcgtctttcagtatggcacgggccagggcgatgcgttgcgcctccccgccggagagatacgtgcctccttcgcccaccaatgtctgatagccattgggcagagcctcgatgaactcatgacattgagcggcacaggctgcctgtgccacttcttcaaaggttgctgtcttgtttcccatgcgtatattctcttcgatagtatcgaagaagagcatattgtcctgaaagacaaaagccacattattcatcagcaccgcggtgggaatctctttgacgggtgctcctcctatcagaatttctccgccttgaacatcccagaaacgggcggcaagcatggctacggtacttttcccggctcccgaaggaccgaccaaggctgttaccgtgccggggagggcgatgaaagatacctctttgagtatcggtgtggtgtcgtaggcaaaagatacgttgcgaaactccaccgaggcatcccgggggtatcggggagtggcagactcttctatctcatccatataaaggatatcgtctatcttccgcacgcccatgttattctgattcaagaagctgcctatccacaagagtttaaggacggggaagaaaacagtcacgccgaaaagcaggaacatcagcaccactggtacaaaagccgcatacgaggcactcccgacaagcagccatacagctacagggatgataaagagcagcgccgaagagagtatggtgaggaatcccacataggtaggttcgtactgcaagttcacctcatttgaaaaattgcggtactccttgatatcgtcattcagttttcggtaggcatcggttgattctgtaaaggtttttaccacttgtattcctcggatatattccacgatgccggcattcatcttgcccaggctctccacatactgttcggacacctcccggattttttttccggtgtacatcttccccatcacatagaatgctgccgccagtactgccaaaactacggtagccaaccgccagtctacgacaaacatgtagccgataagaatcagcgggaaaagtacggcggttacgatgtcggggatgtgatgggcgataaacaattcgatgcgttccacatcatcgctcattattttcttcagctcgcccgaagccctgcgggtaaagaaccctaacggcagacggaccatcttttgtgccagctgcatccgtatttcgtacaggatattgaaagcggcaatgtgtgagagcatcagtgaggcgaaggtgagcgctccaaaaacgaagaaagctcccaatgcggcataactccattgccagatgtatgctttgtcaatcaatgagggggcaagcgcatgttccgccagttcgatgaggatattgtacaccgcaataatcggtacaaactgtacgatggcggtgatgacggccagcagcatcgatccgatgagcagccaacgtttagtgccggcaatttctatcaaccgtgccagcccggtcttacgtttatctgtattcatggtcttgctgtttagttgattgctggaatttccatcctttcacccgttgttgttcctgccagaggcttcgatacagtccttccttttcaagaagcgtttggtggcttccttgttgcaccacctgtcctttatctatcaccacaatgttgtcggcgttaacgacagttcccagccgatgggcgatgatgaccacggttttttctttcaccagatcgttgatggcctcttggatatgcgcctcgttttcggggtcgagcgaagcggtcgcctcgtccagcaatacaataggtgcgtctttcaagatggcgcgggcgatggatatgcgttgcttttccccgccggagagtgtgtttccaccttcgcccaccatcgtgccgtagcctccgggcatggctgtgatgaagtcatggcaccgggctttgcgtgcggcggcttctatttcttcacgggtggcggtctcacgtcccacgcggatgttattatagatggtgtcgttaaagagatacacatcctggaagacgatggaaatttgctgcatcagtgtatgtacggtgtagtctttgatattttgtccgcctagcaggatttcccccttgtccacatcccaaaagcgggcgatgaggcgtgtcagtgttgtcttgcctgatcctgacgggccgacaaaggcggtcagtcctttttccggaatggtgagcgacacatcgcggagtacggggatattggcattgtaactgaaggttacgtgacggaactctatggtaggggccggagtgcgctctatcgttccttccggaagtacaggtgttttgcagagagtgttgatgcgttcggctcccaacttcatgtagttgatgatggctataaaggccagcgcgttaatgagtggggcataaatgaccgatcctgccagcaggaacatgatatatacgggcatggagattttagtgtccagcagcatcgggaatcccagcaacatcagcagcaccaggccaccgttcagcagcgtggaagccagtgtgatggtcggtgcgggcgcagcttccaggcggatgctttcctgcttaaggttgcggaaggagcgttccaggcgttcaaacttgttgccgctcagattgaatgcctttatcagtcggataccttgtatatattcaatcatacgcgaagcggcatctgtctttattttctgatgtttcttgcccaatgtcgccacaaaatggttggtgagcagcatcatggggtatgccagtggaatgacggccgcagctgccagcgccaattgccagttgaagaacgcgagcgatatcaaagcggcaacgggcatggccagaccgccgaagaactggccgatgaggtgtgtggtgagcatctccacattgttgtagtcgctgacaatgtatgcaccgatgtctccggggtctcggctgttgaaaaagctcatcggcagacggcgcaggtggctgactacagccagacggccgtcgcagcatatttcgtagccgtcgcgataggctaccagataggctttctttccgatgagccaaaggcagatgagagagaggaggaggaatgcgcacgcccctgctatattcatgagattgattgtggttccggggtgctggagaggcttgaacacttcccataccacaagaagcatgcttccgtaaggtgcgccacggaataaatattccgcaatggtccagcatatcagcggacgcaatcgacgggggtgtcccattgtggcggaattaagaatctgagagagattgttcat

SEQ ID NO: 211 - DNA, 7222 bp, unidentified
  source 1..7222: mol_type = unassigned DNA
  misc_difference 1890: note = a, c, g, or t
  misc_difference 1891: note = a, c, g, or t
  misc_difference 1892: note = a, c, g, or t
  misc_difference 1893: note = a, c, g, or t
  misc_difference 1894: note = a, c, g, or t
  misc_difference 1895: note = a, c, g, or t
  misc_difference 1896: note = a, c, g, or t
  misc_difference 1897: note = a, c, g, or t
  misc_difference 1898: note = a, c, g, or t
  misc_difference 1899: note = a, c, g, or t
  misc_difference 1900: note = a, c, g, or t
  misc_difference 1901: note = a, c, g, or t
  misc_difference 1902: note = a, c, g, or t
  misc_difference 1903: note = a, c, g, or t
  misc_difference 1904: note = a, c, g, or t
  misc_difference 1905: note = a, c, g, or t
  misc_difference 1906: note = a, c, g, or t
  misc_difference 1907: note = a, c, g, or t
  misc_difference 1908: note = a, c, g, or t
  misc_difference 1909: note = a, c, g, or t
  misc_difference 1910: note = a, c, g, or t
  misc_difference 1911: note = a, c, g, or t
  misc_difference 1912: note = a, c, g, or t
  misc_difference 1913: note = a, c, g, or t
  misc_difference 1914: note = a, c, g, or t
  misc_difference 1915: note = a, c, g, or t
  misc_difference 1916: note = a, c, g, or t
  misc_difference 1917: note = a, c, g, or t
  misc_difference 1918: note = a, c, g, or t
  misc_difference 1919: note = a, c, g, or t
  misc_difference 1920: note = a, c, g, or t
  misc_difference 1921: note = a, c, g, or t
  misc_difference 1922: note = a, c, g, or t
  misc_difference 1923: note = a, c, g, or t
  misc_difference 1924: note = a, c, g, or t
  misc_difference 1925: note = a, c, g, or t
  misc_difference 1926: note = a, c, g, or t
  misc_difference 1927: note = a, c, g, or t
  misc_difference 1928: note = a, c, g, or t
  misc_difference 1929: note = a, c, g, or t
  misc_difference 1930: note = a, c, g, or t
  misc_difference 1931: note = a, c, g, or t
  misc_difference 1932: note = a, c, g, or t
  misc_difference 1933: note = a, c, g, or t
  misc_difference 1934: note = a, c, g, or t
  misc_difference 1935: note = a, c, g, or t
  misc_difference 1936: note = a, c, g, or t
  misc_difference 1937: note = a, c, g, or t
  misc_difference 1938: note = a, c, g, or t
  misc_difference 1939: note = a, c, g, or t
  misc_difference 1940: note = a, c, g, or t
  misc_difference 1941: note = a, c, g, or t
  misc_difference 1942: note = a, c, g, or t
  misc_difference 1943: note = a, c, g, or t
  misc_difference 1944: note = a, c, g, or t
  misc_difference 1945: note = a, c, g, or t
  misc_difference 1946: note = a, c, g, or t
  misc_difference 1947: note = a, c, g, or t
  misc_difference 1948: note = a, c, g, or t
  misc_difference 1949: note = a, c, g, or t
  misc_difference 1950: note = a, c, g, or t
  misc_difference 1951: note = a, c, g, or t
  misc_difference 1952: note = a, c, g, or t
  misc_difference 1953: note = a, c, g, or t
  misc_difference 1954: note = a, c, g, or t
  misc_difference 1955: note = a, c, g, or t
  misc_difference 1956: note = a, c, g, or t
  misc_difference 1957: note = a, c, g, or t
  misc_difference 1958: note = a, c, g, or t
  misc_difference 1959: note = a, c, g, or t
  misc_difference 1960: note = a, c, g, or t
  misc_difference 1961: note = a, c, g, or t
  misc_difference 1962: note = a, c, g, or t
  misc_difference 1963: note = a, c, g, or t
  misc_difference 1964: note = a, c, g, or t
  misc_difference 1965: note = a, c, g, or t
  misc_difference 1966: note = a, c, g, or t
  misc_difference 1967: note = a, c, g, or t
  misc_difference 1968: note = a, c, g, or t
  misc_difference 1969: note = a, c, g, or t
  misc_difference 1970: note = a, c, g, or t
  misc_difference 1971: note = a, c, g, or t
  misc_difference 1972: note = a, c, g, or t
  misc_difference 1973: note = a, c, g, or t
  misc_difference 1974: note = a, c, g, or t
  misc_difference 1975: note = a, c, g, or t
  misc_difference 1976: note = a, c, g, or t
  misc_difference 1977: note = a, c, g, or t
  misc_difference 1978: note = a, c, g, or t
  misc_difference 1979: note = a, c, g, or t
  misc_difference 1980: note = a, c, g, or t
  misc_difference 1981: note = a, c, g, or t
  misc_difference 1982: note = a, c, g, or t
  misc_difference 1983: note = a, c, g, or t
  misc_difference 1984: note = a, c, g, or t
  misc_difference 1985: note = a, c, g, or t
  misc_difference 1986: note = a, c, g, or t
  misc_difference 1987: note = a, c, g, or t
  misc_difference 1988: note = a, c, g, or t
  misc_difference 1989: note = a, c, g, or t
atggacactcaacaaatagatgttatggtagccgacgcctcacatgaggtttacgttgacactattttggaaactatcagaaatgctgctgccgtacgaggaaccggaatcgcagagcgcacacacgaatacgtagcgactaaaatgaaagagggcaaagcaataatcgcgctctgtggcgacacattcgcaggtttcacctatatcgaatcatggggaaacaagcaatacgtagcaacctccggtctgattgtacatcccgattttcgcggattaggattggcaaagcgcatcaaacaagcatctttccaactggcacgtctccgatggccgaaagctaagattttcagtctgacatccggagccgcagtgatgaaaatgaacaccgaactaggatatgtccccgtcactttcaatgaactgacagacgacgaggctttctggaaaggatgcgaaggctgcaccaaccacgatatactggtggctaaaaaccgtaagttctgcatctgcacagccatgctgtacgatccgacagacccgcggaacataaaaaaagaacaagaaagaaataacatttaatatatacagcactatggaagaaaagaagaaaaaagtagtggtggcattcagcggcggactggacacatcgttcaccgtcatgtacctcgctaaagaaaaaggttacgaagtatatgcagcttgtgccaatacgggcggtttcagcgaagaacagctgaagacaaacgaagaaaacgcctacaaactgggagcagtgaaatatgtaacattggacgttactcaggaatactacgaaaagagtctgaaatatatggttttcggaaatgtgctgcgtaatggtacttacccgatctccgtcagctcggaacgtatcttccaggcgttggccatcgcacgttatgccaacgaaatcggtgcggatgccattgcccacggttctaccggagcaggtaacgaccagattcgttttgacatgactttccttgtactggctccgaatgtagaaatcatcacgctgacccgtgatatggcattgagccgtcaggaagaaatcgactatctgaacaaacatggtttcagtgcagactttaccaagctgaaatactcttataacgtaggtttgtggggtacatccatctgtggtggcgaaatcctcgactccgcacagggattaccggaaacagcctatctgaaacatgtggaaaaagaaggcagcgaacaactccgtctcactttcgaaaagggagaactgaaagctgtcaacgacgaaacattcgacgatccgatcaaagcgatacaaaaagtagaagaaatcggtgcggcatacggtatcggacgcgatatgcacgtaggcgatacgattatcggtatcaaaggccgtgtaggtttcgaagcagcagctccgatgttgattatcggtgcccaccgcttcctcgagaaatacacattgagcaaatggcagcaatactggaaagatcaggtagccaactggtacggaatgttcctccacgaaagccagtatctcgaaccggtaatgcgtgatatcgaagctatgcttcaggaaagccaacgtaacgttaacggtacggcaatcctcgaactccgtccgctttctttctctaccgttggcgtagaatcggaagatgacctcgtgaaaacgaagtttggcgaatatggcgagatgcagaaaggctggacagccgaagatgcgaaaggctttattaaggtgacttctactccgctacgtgtttactacaataaccataaagacgaagagatatgattaaagcaggaatcattggtggcgcaggatatacagcaggcgaattaatccgtctgctgctcaaccatccggaaactgaaatcgtattnnnnnnnnnnnnnnnnnnnnnnnnnnnnnnnnnnnnnnnnnnnnnnnnnnnnnnnnnnnnnnnnnnnnnnnnnnnnnnnnnnnnnnnnnnnnnnnnnnnncagcaggcgaattaatccgtctgctgctcaaccatccggaaactgaaatcgtatttatcaacagcagcagtaatgccggaaacaaaattaccgacgtacacgaaggactatacggagaaacagacctgagatttaccgaccagttacccctggacgctatcgacgtgcttttcttctgtactgcccacggcgacacgaagaaatttatggaaagccacaacgtgccggaagatttgaagatcatcgacctctcgatggattatcgtatcaagagtgacgatcatgatttcatctatggtctgccggaactgaaccgccgtgctacctgtacggcgaagcatgtagccaatcccggttgttttgccacctgcatccagctaggtttgcttccgctggccaagaatctgatgttgacagacgatgtttcagttaatgctatcaccggaagtaccggtgccggcgtgaaacccggtgctaccagtcatttcagctggcgtaacaataacatcagcatctacaaggcattcgatcatcagcatgtgccggaaatcaagcaatcactgaaacagctgcaaaacagcttcgattcagagatcgactttatcccttatcggggcgatttcccacgcggcatctttgccactcttgtcgtgaaaaccaaagtagcactcgaagagatcattcgcatgtacgaagaatattatgccaaagactccttcgttcatatcgtagataagaatatagacttgaaacaagtcgtaaatacaaataaatgtctgatacacctggagaaacatggtgacaaactattgattatctcctgcatcgacaacttgctgaagggcgccagcggacaggcagttcataacatgaacctgatgttcaacctggaagaaaccgtaggattacggctgaaaccttccgctttctaaaaacagaagaattatgaaattattcgacgtatatcctttatataacatcaatatagtcaaaggacaaggctgtaaggtatgggatgagaatggtacggaatatctggacctttacggaggtcatgccgtcatttccatcggacatgcgcatccccactatgtggagatgatcagcaatcaggtagcaacccttggtttctattcaaattcggtgatcaataagctgcaacaacaggtagcggaacgactgggaaaaatctccggttacgaagactattccctgtttctgatcaacagcggagccgaagccaatgagaatgcgctgaagctggcttctttctataacggacgtaccaaagtagtgtccttcagcaaggctttccacggacgtacttcgttggcagtagaggctacgaacaatccttccatcattgctccgatcaataacaacggacatgtgacctatcttcccttgaatgatatcgaggcgatgaaacaggaactggcaaaaggagacgtatgcgctgttatcatcgaaggaatacaaggagtgggcggtatcaaaataccgactaccgaattcatgcaggaacttcgcaacgcttgtaccgaaaccggaacgatcctgattctggacgaaatacagagcggatacggtcgcagcggtaaattctttgctcaccaatacaatcatatccagccggatattatcactgtagccaaaggtatcggtaacggattcccgatggcaggtgtactgatcagtccgatgttcaaacccgtctacggacaattgggaactacattcggaggaaatcacctggcatgctcggcagctcttgccgtaatggatgtgattgaacaggaccatctggtggaaaatgccgctaaagtcggtaattacctgctggaagaactcaagaaatttccgcaaatcaaagaagtacgcggacgcgggttgatgatcggactcgaatttgaagaaccgatcaaagaactgcgcagccgactcatctatgatgagcatgtatttacgggagcaagcggtacaaacgtacttcgtctgttaccccctctctgcctcagcatggaggaagcggacgaattccttgcccgtttcaagagagtactctgatcgctcatttgattaataaacagccgacaaaaaagcagcctcatacagaaatatttttcttatccgggctgctttttgttttttcgcaatttaccgttacctttgtctgtaagaatccataaaaaataagcgcatatgaaaatagctattatcggtgcaggaaacatgggtggttctatagcccgcggcctggcaaaaggaagtctgatagcagactcagatatcattgtatccaatcccagcgcaggcaaactggaaaagctgaaagaagaatttccgggcatctccacaactcagaataacgcagaagctgctgcaggagcagatattgtcattttggcggtcaagccatggttcatggaaccggtgatgcgtgagctgaagctaaagagcaaacaaactctcgtctctgtagcagccggcattagctttgaagagcttgcacactttgtgatagcccccgaaatgccgatgttccgcctcatccccaacactgccatcagcgaactggaaagcatgacacttatcgcagcacgcaacacaaacgatgagcaaaaccagttcatgctccggctgttcaatgaaatgggaatgtctatgctcatccccgaagaaaagatagcagctaccacggcactgacttcctgcggcatcgcttatgtattgaaatacatccaggctgccatgcaagccggtatcgaaatgggcatccgtcctaaagatgccatggagatggtagcccagtctgtcaaaggagccgccgcattaattctgaataatgatactcatcccagcgtggaaatagacaaggtgaccactccgggcggaatcaccatcaaaggaatcaacgaactggaacacaacggatttacttccgccgttatcaaggcgatgaaggcatccaaataataccgcaaaattattaattataaaaaaataaccacttgtatgaatgatcaaattaaacaaatcgcagagcgtcttcgcggattgcgtgacgtactggaactaacgtctgaagacatcgcccgcgactgtgacatatctgccgaggaataccggctcgcagagacaggagattacgacatttccgtcagcatgttacaaaagatagcccgcacctataacattgcactggatgcactgatgtttggcgaagaaccgaaaatgagcagttactttgtcacccgtgccggcaaaggcacgagcatcgaacgcaccagagcctacaaataccaatcactggcagccggttttatgaatcgcacagccgatccgttcatcgttactgtcgaacccaaaggagacgacgagcctattcattacaaccaccacaacggacaagagtttaatcttgtgctcgaagggcgtatgcttatcaacattgaaggtaaggaaatcatcctgaaccaaggtgacagtatctatttcaactcaaaacttccacatggcatgaaagcgctcgatggcaaaacggtacgttttctggcagtaattatgtaataacattatggtagaaagatttttagcaaagactaactttgcctcacaagaggattttatcaagaacctgaaaataaatgttccggagaacttcaacttcggttacgatgtagtagatgcctgggcagccgaacaacccgacaagaatgccttactctggaccaatgaccggggcgaaagccgccagttctctttcgccgacatgaaacgctatacggacatgacggcttcttacttccagagcctcggcatcggtcgcggagatatggtgatgctgattctgaaacgccgctacgagttctggtacagcaccatcgccttgcataagctgggagccacagttattcctgcaacccacctgctgacaaagaaagatatcatctaccgctgcaacgccgccgacatcaaaatgattgtagctgccggtgaaggaatcgtattgcaacacatcaaagatgctcttcctgagtgtccgagcgtagaaaagttagtcagtgtaggtccggaagttccggaaggattcgaagatttccatcagggcatcgagaacgctgctccgttcgtccgtccgagacatgccaatacgaatgatgacatctcactgatgtacttcacctccggtactaccggtgaacctaaaatggtagcgcatgactttacctatccgttaggtcatatcgttaccggtagcttctggcacaatctggacgagaacagtctccatctcaccattgccgataccggttggggaaaagcagtatggggcaaactctacggacagtggattgccggagcaaacatcttcgtttacgaccatgagaagttcacccccgcagctattctggaaaagatacaagagtatcaggtgacttcactctgtgcacctcctactatcttccgtttccttattcatgaagatctgaccaaatatgatctgtcctcattgcggtattgcaccatcgccggagaagctctgaaccctgccgtattcgagactttcaagaaactgacaggcatcaagctgatggaaggcttcggacagactgagacgacattgacagtagctaccatgccttggatggaaccgaaaccgggaagtatgggattgcccaatccacaatatgacgtggacctgatagacaacgaaggccgctctgtagaagcgggagaacaaggtcagatcgtaatccgcaccagcaaaggcaaacctctcggactcttcaaagaatactatcgcgacgcggaacgtacacacgaagcctggcatgacggcatttactacacaggtgacgttgcatggaaagacgaagacggctatttgtggtttgtaggacgcgcagacgatgtaatcaagagttccggttaccgcatcggtcctttcgaagtagaaagtgctttgatgacacaccctgccgtgatagaatgtgctattaccggagtgcccgacgagattcgcggacaggtagtgaaagcaaccatcgtattgtctaaagactataaggcacgcgccggagaagaattgatcaaagaattgcagaaccatgttaagaaagtcactgcaccttataaatatccgcgtgtgattgagttcgttgacgaactgccaaagacgatcagcggtaagattcgccgtgtggagattcgcaagaacgatgagaaataa

SEQ ID NO: 212 - DNA, 16544 bp, unidentified
  source 1..16544: mol_type = unassigned DNA
atgggaaaaatcagacattattatgtaggggcctgcctgttagtgagtagtgcggcattcgcccaagttccatcgcattcgatgtatgtgaacgaaagtagtaagagtgtgcctttttatgaagcttattctaattggcaaccgggaactcctttattttcagatgcagcagctgaagatgaagaattctttatttctcgtgtgaagcctaaagaacgtttcaccaattcggctacacaagttgatccggaaatgactccggatagaaaactgatctggtggtgtccaatcggtactgctgatggtggggggtggaaatcacttccttcttacttttttgattccgaagtgtttagtatgtggagctatgtggatatttatggtaattggactgctcctatgattcgtatggccggtgcttttactgatatttgccataagaatggcgtaagaacatcgacgctggcttccgtgccttgggcttcaacagttaccgctactgatggtggccatggacaaacaatgaaagctatgatcgatggtggtgcagataaattattgaaatttctgcgttattatggtattgatggaataggttataattcagagtttagtattggtagtggtttaagtgctgatggattgaagacattgttgtctcagtgttttgccaagcgtgaagcagcaaagtggccgtattttacgaatgcatggtactctttgatgacgagcgggggaaccgtagggggaggtgatgcccttagttcttcaaatcaagattggttccactggaatggaaatcctacatccgatgcatattttatgaattataactggggtgcaagtggtttgtctacttctcagagtacagcaaaaagttttgcgggacgttcctcttatgatgtatatggtggtatggactttcaaggcagatctgtggccgattggattgctttgaagaatgctgaaatatctgtaggtatttggggagcacacaatatgaatatgatttttgaaggaagaggtgagttgggatctagtccgttgactaaacaaaaaacgtatcagttgattagtgagaatgtatttacagggtctacttataatcccgtaaatgatttgaaaatccaaaatatattgagacattctaccactgctacagatttccatggattctctaaattcattacggcacgtagtgtattagcttccgatgatttggctgcagagccttttgttacttattttaatttgggtaacggtactttctttaatgtgaaaggtgaaacaacattcaaaaatgaatggtacaatattggtatgcaggattatttacctacatggagatggtggtttactgccaattttatgggaagagatgtgacagatgtgccgagcaaaggtttgaaagcagaatttacttgggacgatgcttggtttggtggttcttgtctttctatagcaggccaaacagatagagaatatcttcatctgtttaaaacacaatattcgctgaaaagtggtgatgtgctgactattcgttataaagttgtcagcggtacaggttctgtagctgttgcatgttctgcagaaggtaaggaaggtacagaagtttcggctactgttggaaataatattacttcaagcaaggaatgggttgcaaagacaattaaagtaggtacgcttcccggtactttgagattgaacaaagagacgcttgctatgctcggtttaagatttgaaaagacatctgcggattttaaagtgttgattggagaaatttcattaacacgttctgatgctctaactccgaatcagccgataattaccaatcagaagttgttggctaccaattataagggattggatttcaaagtgttctttaagatgaaagatcgtgatgctgctcatccggaagatcctatttataatgaagatgtcaatacttggtattataagatttatatccaacaagaaggtggtgaacctgttatgtgtacggctactacttcatgggctgcttatgtagtgagtgctccgtttgatgtaaatggtgataaaaaggttaagttaggagtatcggctgttgctttggacggtaagagtgaatcagaaattgcatggacaggatggttggatacaccggataattcaactgtagaaggtattgaaatcgataaaccggtgattaagagtggtgagacatttgcgattaaatatattgatccgactcatgcaccggctgataagtgggaaattctgaatgcgcagacaggtgttgttgtaaaagacttcccgagttctgtatcacttgaaacagctcttagtgaaattggtatttatgatcttcgtattacttctggggaaaacatagaattacatcaagccttgattcagatttcttctgaagaagtaggggctatgccggaaataaaaacgctgacggccaatgacagcgatagtcccatttcaatagaaaagggtgataaggtaacatataaatatatcggacgtaatgcagatggatatgtttcgcgtggcttaagattaaatgaaattgcttttggagttccagccgatcaattgaattttaatagccagtctccttttaccattgctttttggttcaaaccggctgtatttaatcacataagcgatggtacgcatcttttaaatatacgtgctgctgaagatcgttggcccgatagcgattggggatggctttggactcatatccaagcttcggataataagttatcgtttaatttgaagaaaaaagaatctggagcaggttcggaaactaaaattatagcagaggactttacttttgttcctaatcaatggtatcatttggcagttgttgttgattatcaaaatggacgtaatgtatcgttatatgttaatggtaagctgattaattccggaggtggtataacgaatgtaaaggactggaagaattcttatacgattatggtaggtggtattgctgccaatagagcaggctttgatggatatttagatgaattccaattatataataaagggctgactgctgaagaagtgaaaaagtcaatggagcatcaaactgtaataccggagtcgttgattggctactgggattttgaaactgaaccgaatgagaataatgaaattctcagtacaggaagtaataagactttaaaaggttatatgaccgaaattaagacagtttcccagggtgtgaaccaatatgttccggtagatatcacttatggaacaggtgcaccatttatttctggtagtatctttaaagttgaaactaaaccatcttggaaattagaagaggctcaaattcaaggtgatattacaggaacgggtgaagccggtagtgtagtagcagcttatccttcagaaggtgaattcaacgctattttgacattggagaacggttggggatcagtatccaaaacttatcgttcggtaacagtgacagatggtggagtcggttttgctgataacgaattggaaattgcttataatgcttacccgaatccgtttgtagatgaattgaatattcgttttgcaaacgagggtacatacgctattgaagtatttgatgctgcaggaaaaatgattgatgcaaaagaaactacggtagccgatggcgaaaatatccatttaagtgtaaatggtgctgctggtatttattttattaatataaaacaggatactaagattctaaaagcattgaaagtaataaagaagtaatattaggtattaacctcaatattatatctatattttgatagaaggggagctgttattgttatataatgtaaataataacatatagcagctccttttgttttatcgttttctaaacgtataatttttttgttaaactaaaaaatctattattgaaaatgaaacattacatttctttgatttctattttggttctgatgagtattctaccgctttggggacaatcgggacaatcattggtactgaatggtacggatcaattaatgaaaatcgcttctcatgatgactttaacgtctcggcagaggagagttttaccgttgcgtgttgggtcaaggtaaatcggtggttagatggtcaacggttcgttgcaaaacggagtatgaccggtactcccaaaagtggatatgaattatggggtggacaaagttcaagtaaattttatgcgaataatgctccaaatactgctgggaatcatgataattctatgagtgtatggtctacagaatttggcagtttggatacttgggcgcatgttgcttttgtagtggatagagtaaatggaaaaatgtatctatatcataacggaaagcaggttggaaattccggtataaaagatattggcccgtggtatgtggaaaatgactatgatgttactgtaggaaccggacgagcttctgcaatggaatatgcatattatttgaaaggtgaaattgataatctccgtttttggaaaagagcgttgtcattggaggaaatcaatgcagataaggtagatgaaatgcctgcatcggaaggattggtcgctgcctatgattttgaaaatattgacggattgactgttccggatgtcagtggaaacgggcacaacggagtacttgtgaattatccggttgatggtccttgtaaagtagcttcagcttctgttgtgcaggattctaattttactgggcgtggtaatgaggatgaagtggtgctaaaggcggtgttggatatggaaggaacggatccggttcagtgcaataaacttaccttgaacatggatggaactacaaatgtacaggatgtgaaaagcattaaggtgtattctactggaaatataaatagttttgatgctcgctatgctgctgttaccgctactttattaggcagttgtaagcctgcttccggagagataaattgtgaacttacaggtgaattgacttcgggaaccaattatttatggattacatatgatatagctgataatgcaacagaagggaacaaagttgatgcaaatatagtttctatcactactgcagatgaaacatatgcttttacggaaggttcagttgaaggggaacgtactatcttattgaagcgtaaactgttatttgcacctggggatgccggttcaaagaactatagaattccagcgattattactgctgcagatggttctttggttgttgcaacagacaagcgtaaaaataatcaaggtgacttgcctgaagatattgacgtggttataagaagaagtgaggatggaggtatcacatggtccgaaccgcaaactattgctgaaggaacaggagcacgtagaggatttggcgatgccggtttagtacatacgacggaagaaaatggccttctttgtatttttgtaggtggtgaaggtatttttaataattcatctccttcgaatcctactcgtacttatgtttgtaaaagtacggataatggtaaaacttggagcgcacctcgtgatatcactgagcagctttatggaacggcatgtactgttaccgagagacaggggtggtatgcttctttctgtgcttcgggaaatggattattgacaaaaaatggacggattatgtttgtagctgctgtccgtgagaattcagcaagcactttgtctaattttgtttactattcagatgataatggagagacgtggaatgtttccaaacgagctaaattaggcggtgacgaatctaaagttgtagagttaagtgatggtacaatcctaatgagtattcgtcgtcagagtaaaggtccccgttactatacgaaatcgactgatggaggtattacatggggagaagtatctgagtggactgaaatgcttgaaccgaattgcaatggtgatataattcgatatacttctgttaatgatggctatgagaagaatcgtttattacacagtatacccaatgacgctgctaacagacggaatgtctcagtttttgtgagttatgatgaagggcaaacttggccggttaagaagtcaatttgtcctaccggatcggcatattcttcattgacaattcttcctgacggtactattggagcgtatgtagaagaaaattatgatacagataatatgtctctctatttcaataatttttctttagactggttgactgacggcgcagatatttattatgcagctggagaaacggaagttgttaagtctcctactttttcggctccggaaggggaatatgaaaattctgtagcgattgaattgactactgctactgatggagcatctatctattatacattagatgggaacactccaaacgaacgatctattttgtatgaaggattgattacgattgaagagacaactactgtgaaagcaattgcagtaaaagatggtttggctaacagtgagattgcaaccgctacatatactattactcatccgggagagtattgtatctgggatgaagatgcttatccaagaacaaatacggatcgtgttgttcagtcattgagtgtaagtggggcttcacagggtggcatagctcaagattttactacagtagtggccggaataggtgctaaaactcaaagtaaaataaattttgataatacggcagatgttttaaatgccactatcggtaatgaactgttcttaacggttgctgattttaatctatattggacacattattacgtgtatgtggattataatcagaatggtgtttttgaatcgaacgaggtggtgtcgtatacacattatagtgaagatgatgggacttatcatgatagtaaaggagatgttgttgatgcaggaaaagtacagagagatcttcccagttttataatacccgataatgctaaattaggggaaacgcgtattagatttaaagccgattggaacagtttggatccatgtggagatgcaagtttggctagtaatagaggtacaatctgtgacttcaccattaatattcatgaggctgtgatgggggttgtttcttttgaacaaacagaaggagccacattgcaaataatgaatggagaagaggaagttactaatggtactcgtttgcctttaggtacagtcctttcagtgaatgctgaagtaacttctgatgattatataatacgtgcaattttggtgaatggtgaagaacttgaaagcaatacatttgtgttggcagaagatgccactgtttcattggatattataaaaggtaaacttgtaaattatcaggtggaaggaaatggaatactttctgtatcagataattcatcaaatgagattgcgagtggagcaattgtgtacaaagggtcggttgtagtaataaaagtgactccggatgagaattatcatgtagagagcgttttgataaatggtgatgacaagacagaggaatgtgtatctgatgttggctattctttggtagtaaatgagcatttggatattattgcgaaatttgcaattgattcttattcattgaattattcttgtaatgaagagtttggaaagatgattgtgcaaaaatcgaatggagatgatgtaatttccggagacttaataccttataatgaaaaggtgacatttacacttcaaccggctgttagatgttatgttgcaagtgtaatgattgatggtgaagaaaagatggatgagatattaactaataaatcattctcactgaatattacaaaagagactactgttcaagtggtatatgaagccgagaaatattccttgactttggcaaacgatacgccaaagaaaggtaaactaatggttaaaagactaagtgacgacatcgaattggaggatcagagtgaaattatttatgatgaggaattgcttattgcttggttgcctgaagagggttgtgaattggccgaattatggataaaagaaggtgaagatgatgaatatgatttaattgaggctgggctgctggaagaattaggtgatagtaaagaattttcttatcaagtattcgcaaatgttgctcttcgtgcagtattcagtggtacggtttctattactaatacggaaatagctaatacgacggtctatacaaaagatggaaaattaattgttaaagatggaaaagttggttgtgaagtatttgtctatgatgttttaggtcaggttgtgaaatctttcatcattgagaatgcgttagagacagttcaactgggaacaacatcctctttatatctggtcaagattgttgatggagcagattgtattgtaaaaaaagtaggtaatatgtaaatgtctttttgatgattgtgaagaatatctgctaatacagttggggataactgtagcagattcctgatgatgcattcagttaatcactgcagggtaaatcttgtagtgattttcttttataatagcttaggaatatccctgttcagatgaataaagccggttttgatttggtaatcgaaaccggcttcaatgtagggtatgtgggtttatgaaccttttctgttgtttatgacgcgcatagctgcggtataaaattcgcagggtacggataataaaataccgttagttcctttgtctttcattgaaacttcaatgtaggctgcattgagaaggttttttacgctggttgcttcccacggactaccggtgaaaacgtctacttgggaaatttttctacttgtgatcatctgtttctggtttttgttgtattctgtttgcaaatatagagcatgttttcaagtccaatgacgaatattcgttcaatctttagaagaattgttgcaaacgttagcaatttaggatatgaattgctccaaatttgtctttttcggtgactgttgatattatgagaaaacaaatatccttaaaaaggaaccggttgcagaaatgtagcgattttcattgattcaaagcgcatgtcattcttgcaaccggtttcctgatatttgaaaagtgaagtttaaggtatacttttatttttcatcgtttttccggatttccacacgacgtattttaccactgattgttttcggaagttcatcaacgaattcaatgacacgtggatatttgtatggtgcggtcacttttttcacatggttttgaagttcctttattaggccttcccctgcttgtgctttatattccttggacaaaacgatggtggcttttactacttgtccacgaatttcgtcgggtactccggtaatggcacactccacaacagccggatgggtcattaacgcactttccacttcgaacggaccgatgcgatagccggaacttttaatgacatcgtcggcacggcctacaaaccatagataaccgtcctcgtctttccaggccacatcaccggtataataaataccgttgttccacgcttcatgggtacgggcagcgtcacgataatactccttgaaaagtcctaatggctttcctctgtttgtacggataacgatttgcccttgctcgccggcttctaccgaacgtccgtcgtggtcgatcagatccacatcatattgcgggttagggactcccatgcttcccggtttcggttccatccaaggaaaagtagctacggtcagtgttgtttctgtctgtccgaatccttccattagtttgatgcctgtcagcttcttgaaagtgtcgaatacggcgggattcagtgcttcaccggcaattgtacaatattgcaatgaagaaagatcatatttggtcagatcttcatgaataagaaagcggaagatggtaggtggtgcacagagagacgtgacgtggtaatcttgtatctttgttaggatgtcacccggggtgaatttttcatgatcgtatacaaatatgttagctccggcaatccattgtccatataactttccccatacggctttcccccaacctgtatcggctatggtgaggtggagactttttggggtaaggttgtgccagaaactacctgtaacgatatggcctaacggataagtaaaatcatgtgctaccattttaggctcgccggtagtgccggaagtgaaatacatcagtgaaatgtcatcgttcgtattcggatgttcaggttttacgaacggggctgctccttggatacctttatggaaatcttcaaatccttcagggatctcgggccctacgctgacaagtttatgtacagtcgggcaatcgggcatagcttcgatgatatgtttggtgatcacttcttcgccggcggcaacgatcattttaatatctgcggcattgcagcgatatacgatatcttttttagttaataggtgagttgcggggattaccgtagctcccagtttgtgtaacgctatgatactgaaccaaaattcataccggcgttttagaatcaacattaccatatcgccgcgtccaattcccaatgactggaaataagaggccgttatgtctgtataatgcttcatatcggcaaatgtgaactgcacatgctcgcctttatcgttcgtccacagtaatgcagacttatttggctcttcggcagcccaagcatctactatatcatatccgaagttaaagttttcgggtacgttaatcttaagatttttgataaaatcctcctgtgaggagaatgttgtttgtgataagaatctttctaccataattaatattacatgatgacggcaaggaaacgtactgtttttccatcgagtgctttcatgccgtgtgggagttttgagttgaaataaagactgtcaccttcgttcagtatcagttctttgccttcgatattaatcagcatacgtccttcaagtaccaagttgaattcttggccggtatggctgttgtaatgtatcggttcgttatccggtttcggttcaacggttacgatgaacggatcagcgctccgattgataaatcctgctgctaatgattggtatttgtatgctctggtacgttcgatacttgttcctttcccggcgcgggttaaaaaataactgctcattttgggctcttcaccaaacatgagtgcatccagggcgataccatacttacgtgctatcttttgcagcatacttactgaaatatcatattctcctgtttctgccaaacggtattcttcggcagagatatcacaatcgcgggcaatgtcttctgctgtaagttccagtacatcacgcaatccgcgtagtcgttcggctatttgcttaattttatcatccatgtatttaatgaattaatgtgtaaatgttaatagtttgttggggtgttttcatgctcgtaataattcttaatggagtttgagttctcatttttattcttggcattatttagaggccttcattgcttttattattgccgaggtaaatccggcatgttccaattcgttgatacctttaattgtgattccaccgggtgttgtcactttgtcgatctcaacactgggatgcgtatctttgtttaacaacaattcagccccgcctattagtgtttgtgcaaccattttcataccgtccttaggtgcgattcccatttcgatacctgcctgcatggcggcctgtacatatttcagcacataggcaataccacatgaagtcagcgcagttgctgctgctattttactttccgatatcatcatggtcagtcccatctcgtcgaacatatcagttaataatttcttttgtttatctgaagcattgcgagcggctataagagtcatgctggcacgttcggcaatggcggtattgggaataacacggaaaatcggcatttccggctcaccacaaaaatgcgctaaatcgtcgaaacaaataccggcggctaaagacacgagtatctgtgtgcgtttcaaacggagtggttcgagtacctcctctattaaccaaggttttacagcagcgattacaatgtcggcattgcttgctgcatccatattgttgttcgttgttttaatgttgggaaagtcggcttttagtttctccaatttcccattcgttgggttggacacaacaatttcatgtccttgaaccaaatatccctgggctaaaccgcgtgcaatggcagagcccatatttcctgcaccaatgatagctactttcataatttgatgttatttagtacgttggagacaaaggtaaatgtaaaaagtgaaaattcgaataattgtggcaggtatttttcttgtggaaaattgattttatgaatttatatgctaattttgttcggtaattataggaataccagtgacttataagataagagtgtatgcttttcctacataagagtctatactttattttgagaggtcgtttcgtttgaaaggacagtaggaaggttgtttttccggatataaaataaatgccggtataatctctgaatagaagacgatataccggcatttttattgttaaagtactttcttgaatctgatgaggaattcatctgcttctgctttgctgaggcagagagggggtaatagtcggataacatttgttccactggctccggtgaatactttctgttcatggatgagacggctgcgaatttcttttaccggctgttcgaactccatgccaatcataagtccgcatccgcgtacttctttgatttgtgggaattttttcaattcttccaataagtaagcaccgatgttggctgcattttcgatcagacgatcttgctcaatgacgtccataactgctaatgccgcagcacaggccaagtgatttcctccgaaagtcgttcctaacataccgtaaaccggtttgaacatcgggctgatgagtacaccggccattggaaaaccattggcgatacctttggctactgtgataatgtcgggtttgatccctgcatattggtgcgcaaaaaatctaccgctacgtccgtagccactttgaatttcatcaaggataaatacggtcccattctctgtacatgccttacgtagctcttgcaagaattctgcagtcggtattttaatacctcctactccctgaataccttcgatgataacagcacagacatctcctttggccagttcggctttcattgcttccgtatcgttcagaggaagataagtgatatgtccgttcgcattgatgggagcgataattttaggattatcggtcgcttctacagccagtgaagtacgtccgtggaaagctttggagaaagaaatcactttggtccgtccggtatggaaagaggccagtttcaaggcattttcgtttgcttccgcaccactgttgatcaggaatagtgagtaatcgtcataaccggaaatctttcccaagcgtgcagccacttcctgttgcagcttgttgataaccgagttggaataaaagccgagttttgccacttggctgctaatcatctctatatagtgcggatgggcatgtccgatggagataacggcatggcctccgtagaggtcgagatattctgttccgttttcatcccatacatggcaaccttttccttttactatgtttatgtcgaataaaggatatacatcgaataggttcatgatgatatttacgattttatgatttacaattagacgattggagttactactattaattttacgatttacaattgaagtaactccaatcgtctaattgtaaatcgtccaatcgtcaatctaaaaagccgatggctttaaccggagacctaccgtctcttccagattgaacatcaggttcatattgtgtactgcttgtccgctggcacctttcaacaggttgtcgatgcatgagataataagcagcttatctccgtgtttctccagatgtatcaggcatttgttggtgttgaccacttgtttgagatcgatgtttttgtctacgatgtgtacaaatgagtcttttgcgtaatattcctcatacatgcgtacgatttcttccaatgctactttggtttttaccactaatgtggcaaagataccccgtggaaaatcaccccggtaagggataaaatcaatctcagagtcgaaactgttttgaagttgtttcagcgattgtttgatttcgggtacatgttggtggtcaaaggctttgtacacactcatgttgttattacgccaactgaaatgactggtggcactaggttttactcccgctcccgtgcttcctgtgatagcatttaccatgatgtcgtcattcagtatcaagtgtttggccaatggaagaagtcctaattggatgcaggttgcaaaacatcccggattggctacatgcttggccgtacaggtggcacgacggttcaattctggcaatccgtagatgaagtcatgatccggtgatgcgatacgataatccattgaaagatcgataattttcagatcttccggtatattatggctttcgataaatttctttgtatcgccgtgggcggtacaaaagaaaagtacgtcgatttcttccagaggaagtgcatcggtaaaagtcagatcacattctccgtagagtccttcgtgtacatcggtaatcttattaccggcattactgctgctgttgataaatactatttctgtctcggggtgattgataagtaggcggataagttcacccgccgtatatcctgctccaccaataattcctgcttttatcataatagttgaaagcttatttagttgaaagttgaaagttgagaattgaaaattgggagttgaaagctggcttgcactattgaactgcatagtagctttcaactctcaactttcaactaaacctcgtggtttgcataataaacgcgtagcggagtggaagttactttgataaatcctttcgcgtcttccgcagtccagcctttctgcatttcgccatattcgccaaatttagtttttactaaatcatcttcagattctacgcctacggtagagaaagacaatgggcggagttcaagaattgccgtaccgtttacattgcgctgcgactcctgcagcatggcttcgatgtcgcgcattacaggttccaggtactggctttcgtggaggaacataccataccagttggctacttgatctttccagtattgttgccatttgctcagcgtatatttttcgaggaagcggtgtgcaccgataatcaacatcggagcggctgcttcaaaacctacgcgacctttaataccgatgattgtatcgcccacatgcatgtcgcgtccaataccgtaaggagcgccaatcttttctaccttctggatggcggcaattttgtcttcaaaaacttctccgtttacggcatgaagttctccctgtttaaattcaagacgtaactgttcgcttccttccttctgcacctgtttcaagtatgctgtttcgggtagcccctgtgccgagtcgagaatttcgccgccacagatggaagtaccccacaatccgacattataggaatatttcagtttggtaaagtctgcactgaaaccgtttttattcaagtagtctatttcttcctgacggctcaatgccatgtcacgggtcaatgtgatgatttccacacccggagccagtacaaggaaagtcatgtcaaaacgaatctgatcgttgccggcaccggtggaaccatgggcgatggcatccgcaccgatttcgttggcataacgtgcgatagccaatgcttggaatatacgttccgaactgacggaaataggataagtaccgttacgcagtacgtttccgaatatcatgtatttcaagcttttctcgtagtattcttgggtcacgtccagtgtaacgtatttcacagctcctaacttgtatgcgttttcttcattctgtttcaactgttcatcgctgaaaccacccgtgttggcacaagccgcatacacctcataacctttctccttagccagatacattacggtaaacgaggtatctaatcccccgctgaatgcaactaccactttctttttctgttccatgatcttaataattagttaatgccccgattgttctattgacgatgcggtacattatattattttaattcttttctttctctattaattggcatattggcacattgaccaatcggcacattattcttcttctttatgtttctccggatcgtaaagcattgccgtacaaatacagaatttccggtttttggctaccaatatatcatggttgatacaaccttcgcagccgcgccagaatgcttcgtcatccgtcagttcgttgaacgtgacgggtacataaccgagttccgtattcattttcataacggcggcaccactggtcagactgaatattttggcccatggccaacgcaggcgggcgagtttgaaagaagcttgtttgatacgttttgccagtcccaaaccgcgatagtctgggtgtacgatcaatcccgatgtcgctacatattgtttattaccccacgattctatataagtgaagcctgcaaatttatctccctccagggcgataatggctttcccttctttcatcttggttgcaacatattcgtgtgtacgttctgcaattcctgtcccgcgtactttcgctgcatttctgattgtctccaaaatagtgtcaacgtaaacctcatgtgaggcgtcggctaccatcacatctattttttgagtctccat

SEQ ID NO: 213 - DNA, 12504 bp, unidentified
  source 1..12504: mol_type = unassigned DNA
atgagcaaaaagaattatgtggtcatggacggcaataccgccgccgcccattctgcctatgcctttaccgaggtggcggcgatctatcccatcacgccgtcctcccccatggcggagaaggtggatgagtggtccgccaaggggaaaaagaacctgttcggcacgccggtggacgtgatccagatgcagtccgaggccggcgctgccggcacctgccacggctccctgcaggcgggtgccctgaccaccacctttacctcctcacagggcttgatgctgatgatcccggctatgtacgccatgggcggacagttcctccccagcgtgatgcacatcgcatcccgtgttgtcaccagcaaccatcactccattttcggcgaccatacggactttatgacctgccgcaccaccggctacgccatgctgatgtccgcctccccccaggaggccatggatctggcggcggtggcgcacctgtccgccatcaaagcgaagtacgccttcatgcactgctttgacggcttccgcacctcccacgagatgcagcgcatcgaggcgctggactatgaggagctgcggggtctgatcgactacgaggcgctgaaggccttccgccgggatgctctgaatccggagcatcccaccaaccgcggcaacaacgtcaaccccgacgtgtacttccagtgcaaggaaggcgctaacgtcaagagtgccatcgtgcccggtaccgtgcagcactacatggacgagatcaataaaatcaccggccgggactacaagctgttcaattactacggcgcgcccgacgccgaggaggtcgtggtggccatgtgctccgtcaccgaggcactgcgggagacagtggactacctcaacgcctgcggacgcaaggtgggcatggtgcagatccatctgtaccgccccttctccgtgcccgatttctccgccgccatccccgccagctgcaagcgcatcgccgtgctggatcgcagcaaggagaccggctccgtgggtgaacctgtgtatctggacgtggtcacggcgctgaatcagaccggacgcggcgacatccgcgtggtgggcggccgctacggtctgtccagcaaggacaccactcccggccagctgatcgccgtatatgacaacctgcggcaggagacaccaaaaaacaactttaccatcggcatcaacgacgatgtgacccacacctctctgacctatgagaacgtggagttcccccatcccggcgagatctcctgcaagatctggggtctgggcggcgacggcaccgtgggcgccaacaagaacgccatttccaccatcggcctggtggctgacaagtatgcccaggcgtatttctcctacgactccatgaaatccggcggcctgacccagagccatctgcgcttcggcgacatgcccatccgcagcacctatctggtgtcctccgccgactttgtggcctgccacgcgccgacatatgtcaagaagtacgacctgaccgaggatctgaaggacggcggcacgttcctgctgaactgcccgtggacgacggaggaactggaggagcacctccccgccaagatgaaacgggatctggcgcggaagcacgcgcagttctatatcattgacgcggcgaagctggcggcggagatcggcctgggcaagcacaccaacaatatcctgcagggcgcgttcttcgccctgaccaaggtcatccccatggatgtggctgtggcggatatgaagaagaacaactacgccacctatttcaagaaggccgggcagaagatcgtggacctgaacgacaaggccgtggatgtgggcgtaaacgccgccgtgaaggtggacattcccgcggcgtgggcggacgcgcaggacgcacctgccgccgagatcagcgccacgccctttgtccgcgacatcgtactgcccatggatcggcagcagggcgacaagctgcccgtgtccgtgttccagaagcacggcgtgctggacggcacgtgggagaacggcacctccgcctattccaagcgcggtgtggccaccgctgtacccaagtgggacgccgcggcctgcatccagtgcaaccgctgcgccatgagctgtccccacgcggccatccgcccggtgctgctgaccgaggaggaaaaggcacaggtgcccgccggatttgtcaccgcgcccgccaagggtctgggcaaggacgctccggcgtatgccttccggatgcagatatcgccctacgattgcctgggctgcggcgtgtgcctgacagcctgccccgccaagggcgcgctgaccatggctcccttcgaggagatgaaggccgagcagccgctgttcgatcaggtggctatggacgagaagtacctgaagaaggatgtcatcagcgacaagagcgtgaagagcgcccagttcgccaagccctacttccagttctccgccgcctgcgctggctgcgcggagacgacatatatcaagcttttgagccagctgttcggcgaccacatgtatgtgggcaacgccgcgggctgctcctccgccatcagcggcggcgcgcctatcctgccctattgcaaggactgccggggtcacggccccgcgtgggagcactccctgtttgaggacaacgccgagtttgcctacggcttcttccacgcgcaggacgccatccgtaaggagctgctgctccgtctggacgccatcaagtccgcgggtattgcctcggaagcggcggaggcctaccagaacgggtggaataagcacgagagctcccgtgccgtcacagacgcgctgctggccgcgctggaaaaggcccagcagacggaggacgtgaaatacatccttgagaacagagcctatctgtccaagaagtccatctgggctgtgggcggcgacggctgggcgtatgacatcggcttcggcggcatcgaccatgtgatggcgcagaaccgtgacgtgaacctgctggtgctggacaccgaggtgtactccaacaccggcggacaggcatccaaggccacgcccaccagtgccaccgccaaatttgccgccggcggcaagcaggtggcaaagaaggatctgggcggcatcctgatgcagtacggctatgtgtatgtggcgcaggtggccatgggcgccgatcaggcccaaacactgaaagccctgcgggaggccgagtcctatgacggcccctccatcgtcatctgctactgcccctgcctggagcagcacatcaaggctggcatgagcaattcgcagctggaaatgaagaaggccgtggagtgcggctactggcacctgtaccgctatgatccccgccggatcgcggagggcaagaaccccttccagctggattccccggagcctgacacggacaagctcatggacttcctcatgggcgagaaccgcttcgcctccctgaagaacaacttcccggagaaggccgacgccctctacgccaaggagatcgccgacgtaaaggcgcgctacgccaagtacaagaagatggcgcaggactgagcgccgcctggcgctgatatctcatgcgctgcgggggaaccgcctgaccgcaggcggctcccccttttcaacgattcccttccctgcacagaaaggagacatgtacgatgtaccaaacgatacgctgcgaaaagcaagatggcatcgccatcgtgaccattgaccggcctgaggcgctgaatgccctgaacagcaccgtcatcgcggagctggagcaggtggtgacggcactggagagcgaccgcgacgtccgctgcatgatcctcaccggcgagggccgctccttcgtggccggcgccgacatcggcgcccagtatccgctggatctggacggcggccgccgctggggtcagcggggcagcgcccttatgcgccgcatcgaaaagctggagttccccaccatcgccgcggtcaacggcttcgctctgggcggcggctgtgagctggccctcagctgcgacatcattctggcctccgagaaggccaagttcggccagcctgaggtaggtctgggcattacccccggcttctccggcacccagcgcctgccccgccgtgtaggtgtggccaaggccaaggagctgatcttctccggcaagatgatcaaggccgacgaggccaaggagatcggccttgtcaacgccgtctacgcccccgaagccctgatggacagtgcgctggagatggccaagtccttcaccaagaacgcccccatcgctgtgaagtacgccaaggcctgcatcgaccggggtatgcagatggacattgacgacggcatcgccgtagagaacgagctgttcgccatgtgcttcgccaccgccgaccagaaggagggcatgggcgcgttcctggagaagcgtcccgccaactttcagaacgggtaaattgcgttatgaagctgaatcaagatgagatcaaaacgatcctgccgcaccgtgagccgatgcttctggtgacatcggtagaagatttgatccccggagaggatatccgcgccgcctttttcgcggatcctaaaatggacatctttctcggacacttcccggaagagccgatactgccgggcgtatactctatagaatgtatggcgcaggcggtggatatcctgctgatgtcaacactgcgctacgctggaaaaacgccgctccttttaggcgttgacaaggtgagtttccgaaaaaagatcctgccgggagacacccttgaaatccatgcaaatattatttccgagaaaagagaaaaagccatcgtcacttgcgctgctgaagtgtatgttcatcaggaatgggcagccaacggcgatataacaatagctatgcggtaaatttaaggaggaaacgaaaatggcattgatgaccgcgaaggagtacatcgactccctgcgtaagctgaacacccgtgtctacatgtttggcgagaagatcgacaactgggtggatcaccccatgatccgcccctccatcaactgcgtggccatgacctacgcgctagcccaggatccccagtatgaggatctgatgaccgccacctccagcctaaccggccacaaaatcaaccgctttacccacctccaccagtccagcgaggatctggtgaaaaaggtaaagatgcagcgactgctgggtcagaagacggctagctgcttccagcgctgcgtgggcatggacgccttcaacgccgtctattcctccacctacgagatcgatgagaagtacggcacccactaccacgagaatttcaagaagttcctcatctacgtgcaggacaacgacctgacggtggacggcgccatgaccgaccccaagggcgaccgcagcaaggctccccatgagcaggccgatcccgatatgtacgtccacgtggtggagcgtcgccccgacggcatcgtggtctgcggcgccaagtgccaccagaccggctccatcaactcccactggcatatctttatgcccaccatcgccatgggcgaggcggacaaggactatgccgtgtccttcgcctgccccaccgacgccgagggcctgtatatgatctacggccgccagtcctgcgacacccgcaagatggaggagggctgcatcgacgtgggcaacgccaagttcggcggacaggaggctctggtggttctggatcacgtctttatccccaacgagtacatcttcctcaacggcgaatatgagttcgccggcaccatcgtggagcgcttcgccggttatcaccgccagagctacggcggctgcaaggtaggcgtaggcgacgtggtcatcggcgcggcggcgctggctgccgagtacaacggcgtggagaaggccagcgctgtcaaggacaagctcatcgagatgacccacctcaacgagaccctgtactcctgcggcatcgcctgctcctgcgagggctgccccaccaaggcgggcaactatcagatcgacctgctgctggccaacgtctgcaagcagaacgtcacccgcttcccctatgagatcgtgcgtcttgctgaggacatcgcgggcggcctgatggtcaccatgcccagcgagacggacttcaagtccgacaccgtggtgggtaacaacggcgagaccatcggcgagatctgcaacaagtacttcgccgcccgcgagggcgtcagcactgaggatcgccagcggatcatgcgcttcctggaaaatatgtgtctgggtgctgccgctgtgggctaccgcacggagtctatgcacggcgcaggctctccccaggcgcagcgcatcatgatcgcccgtcaggggaatattcaggagaagaaaaagctggcaaagaacattgccggtatccagaagtgagagggcggcatggataagaagcaagcatggctccagctggtgcgggagaagtccgagcactatctgaatctgcacgacggcggctttgacgagaaaatgcgggcgcgtctggtgggctgcgattacgaggcgcagactgtcacctacgccttccccacccaggactggcagatcaacgagaagggcggcatccacggcggcgctatcgccgggatgttcgatacggccttcggcgtggtagccaacttcaccgccggagacaacgaggccaccaccacggacatgacggtgtccttcctgcggggcgtggatttcggcatggagctgcacctgacggtgttcatcgtcaaggcggggcgcagccttatccgccagcgggcggagctgaccgatgccgccaccggcaaactgctggccaccgccagcggcagttggatgccgctgtgaccacattatacttaggacaaaacaaggagaacaaatatggatttcaatctcagccgtgagcatcagctgatccgcaagatgatggcggagtttacggaaaaggaagtcaagcccattacggcggagaccgaccgcacctgcgagtatccccgcgagaacatcgagaagctgtttaatctgggcgtcatgggtatgtgcgtccccaaggagtacggcggcgcgggcgccgatccgctggccagtgccatctgcatcgaggagctgagcaagcagtgcgcctccaccggcgacatcgtggccacccacaacggcctgtgctgcgatcctatcatgacctacggcaccgctgagcagaaggccaagtatctgcccatgctgaccaagggtcaccatgtgggcgccttcgccctgacggagcccaacgccggcagcgacgcctccaagggtcagaccgaggccaagctggagggcgaccactatgtgatgaacggcagcaagatattcatcaccaacggctatgtggccgacgtgttcgtggtgttcgccatgaccgacaagagtcgcggtaccaagggcatctctgcctttattgtggagagcagcttccccggtttctccgtgggtaagcacgaggaaaagctgggtctccacggcagccccaccgccgagatcgtgttccaggactgcatcgttcccaaggagaatctgctgggcgtagagggcaagggcttctccatcgccatggcgaccctggacggcggccgtatcggcatcgctgcccagtccctaggcatcgccgagggcgcgctggccgaggccatcaactacaccaaggggcgtgtccagttcggcaagcccatcagcaagttccagaacacccagttcacgctggctgacatggagctgggctgcgaggcgggccgcctgctgacgtatcaggccgccgtggccaagggcgagggcaagcgctacaccaagctggccgccatggccaagctgttcacctccgagcacgccatgaagaccaccaccaaggtggtgcagctcttcggcggctatggctacaccaaggattacccggtagagcgtatgatgcgggatgccaagatcacggaaatttacgagggcacctccgaggtgcagcgcatcgtgatctccgccaacatgggtctgtaagaggagggaatagacaatgaagattctggttaccgtaaaacaagttcccgacacctccggcaaagtcgccgtaaatcccgatggtactcttgaccgtgcgtccatgcagaccatcatcaaccccgatgacctgaacgctgtcgaggccgctctggctctgaaggacgagctgggctgcaaggtcgtggcgttcaccatgggtcctcctcccgccgagggcatgctgcgtgagctgatggccatgggcgtggacgaaggcgttctggtcaccgcccgtgagttcggcggctccgacacctacgctacctcccagatcattgccgccgctatcgatacctacggcatcgagaaggacgacatcatcctggctggccgtcaggccatcgacggtgataccgctcaggtgggtccgcagatcgctgagaagctgcatctgccccaggtcacctatgccggcgagatcaccaaggacggcgacaccctgaccgtgaagcgcatgctggaggacggctacatgaccatcaaggtcaagaccccctgcatgatcacctgcatcaaggagctgaacaccccgcgttacctgtccgtgggcggcgcgttcgagtgctacagcaagcctctggtcaccatgacctatgagaccctgaaggatcaccccctgatcgacaagagcaccatcggtctggccggttctcccaccaacattctgacctccttcacgcctcctcagaagggcgcgggcatgatgctcgagggcgctgacaaggctaccaccgacaagctggcaggcatcctggccgccaagcacatcatctaaggaaggagaaaagaaaatggcttttaatagtgctgataccgctgccttcaagaacgtatgggtgttctgcgagcagcgtcagggcgtgatgatgcccaccaccttcgaactgatctccgagggccggaagctggccaatgagctgggtgtcgagctgtgcggcatcctgctgggcgacaacgttgacggcatcgccgccgagctgggcgagtacggcgccgacaaggtgtacgtgtacaactcccccctgctgaaggactttaccaccgatgcctacaccaaggtgatcgtggaggccgttgaggagctgaagcccgaggtgctgctgttcggcgcctccaacatcggccgtgacctggccccccgctgcgcggctcgcctgcacaccggtctgtgcgcggactgcacccacctggacatcgacatgcccaactacaagggcttcctgcgcgaagcttctaccctgcccgaggagcgcatcgagaagctgggcaccgtgatgatcaaccgtgagccccacgatgtgtcccgcgacctgaagatgacccgtcccgctttcggcggtcacctgatggcctccatcatctgcccccgcttccgccccgctatggcgaccgttcgccccggcgttatgaagaagcgcgagtgcaagaagaacgtggagatcctgcatcccgcttttgagctggctgccgctgacatcaagaccgaggtcgtggataccgtcaaggccgccaagaagctggttgacctgatcggcgctgacttcatcgtgtccgttggccgtggtatctccaaggacgtggagggcggcatcaagctggccgaggagctggctgaggtcctgggcggcgtcgtgggttcctcccgcgcctgcgtggacgccggctggatctccgctgaccatcaggtcggccagaccggtaagaccgtccatcccaaggtctacatcgcactgggcatctccggcgccatccagcacaaggccggcatgcaggattccgagtgcatcatcgccgtgaacaagaacgacaccgctcccatcttcgaggtggctgactacggtatcgtgggcgacctgttcaaggtcgttcccgagctgatcgagtccatcaaggctgccaaggccgccaagtaactacgcttttttccttctctccttacattgcggattcactccaagacccgcgggcaggcccctcctacatcacatccaatacatcccatctttcatctcggcgaaccatggtttatggaaagcttgctcatctctacctgtaccaattttagcgactttcagcctgctccgggtctggagcatctgcaaccggcagtatgctttgagtagaaaaattttattagtgcttcgaggcgaagcataatctctatgagtttgatgtaggcaatgagtccggatggatgtacaaggtcaacggctggttccccaactacggctgttcccgctatcaggtagaagacggcgacgtgatctgctgggtctacacctgcgatttgggtgcggacgtaggtgataactctatgaacggttgagatcgtcagatgcggcttgctttagaaaaagagggagatgggactttggcactgataaccaaagccccatctccctctttgcaaagcagttttgacagcctcaacagaaagcgaatggttatttttcggtggcatgcaagtttaccactgaatgcatagaccttccctacgcggcattaattagatttaccagatattggatggtgttatgtgtcgggcttttttaggctgtaaagagctgctccagagtacagcttgagaacttgtagtggggcaaacggccagtgactatgcggaatgcagcggctatgactgcctgcgccggacattacgcagttcttcacacgcaggaggtcactggttcgagtccagcagtctccaccaaaaagttcctgatttcgcaagaaatcagggacttttttgcatttatgccctcaaataatgacgcggcattttggcgtttttcgcatgacccaaaccgtgacccaaaagccgagaggtcaggaaagcgccggagaggggcggatggcatcatccgtccctctctgtctgttttttgtgggctacatggtctggctgatgacgctgccgatggccttcaggatcttctcatgggtgtgccggaaggagtccggatcgaacatggtgccggtcttgggcgacacaaacaggtagggactgtgtggatgctttgcgtgttcctccaccggcaagaataccggcagcctgaccgacatccaaaaaccaagctgtgatccacctaagaccagtaaccaccaagggagggacttccgtccctcccttggtggttgtccagcagtttgccgcaatcggggcgggcttatgccggcaggttgatatgaccgattttatccagcgcagagagatcaacgctttccacatacgctttgatctcgtcatcgccgagagagtcacccggctgagaaaccaggctgataaatgcgttctcgccgttgtaaaggacaataaactgatggttgccggagtaaacagacactgtctcgccacgcgcggtggtatacgaccattcatggtattcatgggcatcatccagagaaaggcagtcgatgctcatgctccccttcacccgacggtttatggcgatggtgcagaagcgttcctcctcgccgcccgtacgccaatcatccccgaaggagaaggagccgtcgttccatacccgataatcggggacgccctgccgtgacgggctttccagcgtcaaaaagccatcgctgccgatgatctcgcaaaagctcgtatatccggagccttcgtatagagcgtcccacggcttgagatcgtatttctcgctgatctcaaggaacttgttgaccagtgtttcggtgtaaagaccgttgtagacccttcgatgggcttcgccccagtcgcccagaggctggtgcagcgcatctccgttatagccgtttgcttcgtaggcgctgaggaaggcgttgaactcgcgggaggcctcgtattcgggggagccgatgcagccctgcatgctgatggtcattccgtcagccagctttttgcctgcatattcaccgttcacatagttgtcggaaacgatctggctgcccatcacagcgtctctgataccaaacagattcaccgcgtaggcccctgcgcacatggcgcacaaaagcgctatgacagccgccaccagtaccgatcttctgacagttctctttttgtgaatcgtatagttttccatgttcataatctccttttcggcatcagatgcctcaaccgtctgcatcaggtcgatggcatccagtataaacttcggatcaatattgttgaacccggacagaaagtcaaacgatgtcatagcaatccctccttagataaatatagccgtaatttctgcctggttcggaaaagtgaggtttttactttgctttgtgaacacttgaacctcaaggcaatgtccgctatggaagcaaagaaccagtagcgacacacaaagatatttcggtcgtctgctgagagtgtgcaaagaaattgattgaccgccgcggcaaactccttcctctcgcattccgcttccacggaatcaccggaagcgatggtgtccttcagctcgtccaatacaagatcaaactcaccgccgccgcgtttccgggcgtactgctcccgcaacttcat

SEQ ID NO: 214 - DNA, 7831 bp, unidentified
  source 1..7831: mol_type = unassigned DNA
tcagccattgtatgcctccttaatcactttttcaaatttatcttcgcctacgcgctcgatcgtaaattggaaacgctcgcttggatttgcattgtcatcaaagaactggatcgctgcatccgttacgcggaacaatgtctcttcgtccttgatcaccggcacgacttcttctcctttgtgaatgcggtttccgaaaagtccaccgaaggatacgagatatcctgtcgtcacatcccaggcatcggttggacacgctttggcgcatcttccgcagtagttacacttactttcttccactttgatctttccgtcttccagtttgatcgcatcggtgcggcacgcttttacacacacaccacactggatacaggcatcctctttccattttacgatagaggcacctttcactccgacatcgttttcctcggacttcaaacagttattctggcatccggtgacaccaaatttgaatttatgaggaagctctcttgcaaaatatctctcgtccagtttctgagcgatatcgtaggaatcaatgtttccacttggacagatctgatttccctgacaggctgtgacagtacgtacacgtgggccgcagacacccggcttacaatcgcctttctccagttctgctttcacttcatcgatctgatccagtttgataaatgggatctctacgccctgtctggatgtcagatgtacatgtccgtctccatatttttctgccacttccgcaatcttagccagctgctttgctgtcagatttcctcctaccactgccagtcgcagggaaaagttatttttttgtttctggcgcatgaatccgccttttttcagtgtagcataatctactgccataattcacttcctccttatttcttctcaatcgcgtatttaaaatcttcgatgatatcctgaatatcttcaatgccgacgctgattcggatcaggtcgtcaaatactccggcatcttctttctctttttccgtgctgtgcgcattcagcgtcgattcgggatgaatgatcagggactttgtatctccgatattggagacaatttttggtaattttaaatcattcataatctggaaagcacgttctttgcttccgacccggatcgtaagtatcgcgccatagccatgttccagagttttttctgcagtctcgtgccatgggctgtctggcaatgccggataatttactttgatgtccggatactgcgtcaaaaactcggctaacttttcggcattgaaacaggcacgctccatgcggagtccgagtgtttcaagccccagcatattgtaaaatgctgtctgtggtgccatgcaggcaccggtatttcgaaacaagccatttctgagtttcgcggtaaatgcaaattttccaaattttgcatattctttcatgccgggatatttttctttatcccatttgaagtttccgctgtcggtgatcacaccgctgatggcatcgctgtttccatttacatatttcgatgtcgaattgacgacgatgtcggcaccaagttcgagtgggcggacaagatacgcggttgcgaccgtgttgtccatcacaagcggaagtccgttctcatgtgccatctccgccagctcgcggatgtctacgacatccagtttcggatttccaatcgtctcggcaaagatcactcttgtcttgtcattgatcgctgctttgactgcctcttcgtcatgaatatcgacaaatacggttttgatcccaaatgcctcaaaatcatgaaagacatcgatggaacctccgtataaactcgtgcttgccagaatttcctctccggcattcacgatattaagtaaggcattgaagatggctgccattccggaagcacaggcgatcgaagaaagtccattctccaatgctgtcatccggttttcaaaggctgtgatcgtcggattattcaatcttgtatacgaaaatccgtttgccttattatgaaacaatttttcatgctgttctgcagacgtctgatagaaggcgctggattggtagattggcgtgagcgtcgctccggtcgcctcatctcccatttttccactgtgcaaaagtgctgtgttgaatctcatacgttccctccattttcgtctcttcaaatgtagttgccattgcgtacggatgcttctccataaaccgactgtttgcggatataggctgccacttcttctacctccgtaccattttcactccaattcgtgatataattttcatttttatttgtaatgctgtctgcctgttttttgtcaacaagaagcaggacaacgattcctgcgcggtgcaggtgtttgagtaccagagaaatgtcctcgccctgtgccggtgcatacagatacgtatgtctgccatcgatgtgaagaactttttccacatcttccacaaacgcacgattgactttatcggatttgataaattctaccgtaactgccgtctgtcctttgactgctgcgcggactttgcggtccacacgtccttcatacagaccatgctcttcagcatttacattttctaccactccacaggcagatgtcatattagttacacggtcaatgagaataaattcacccattgtcttatgtttcttaaattcatctacgacgatcttgtctgccagtgagatcttacataccgcgatctcgtttttgctgagcgtttccaccggtttctgctcgccggtattgacatcaatcgcatattcaatcttggtaaccgctcccgggatggtctttgtacccagtttaaagaagaagttctttccactgatgagttcatcgtcgtccatccaaaggagtgtcgttgtcaaggtcgatgcgattttcacctgagaatccacagaaagcacgcagcctcttgatacatctacttcgcggtcaagctggatcgttaccggctggcctttcaccgctttgtcgctctgcttgtcgccgacataaatactctttactttcgctgtctcattgctaggcagggttgtcagttcgtcgccgacatgaatctcgccatcttccacctgaccctgaaagcctcggaatgtgtggtccgggcggcatacacgctgtaccggcatatagaaacctatttcgtggtcgtcttcagaaatgtcaatgttttccaagtatgtcaggagtgcctcaccgtcataccatttgatattgtcggattttgtcgtaacattgtcgccttctgtcgccgaaaccggaataatcttgacattagcaaggctgagttcttcggaaagttccttgatctgtgcttcgatctcgtggaatctctcttcgctgtaatccacaaggtccattttgttgacggcaaatacaaaatatttgattcccatcagctcacagattcttgcgtggcgtcttgtctgtacgagcacgccctgttttgcgtcgatcaaaatgactgcgaggtcagcaaaggaagctcctactgccatgtttcttgtgtattcttcatgtcccggtgtgtctgcaacgatgaagcttcttttctctgtcgtaaagtaacggtacgcaacgtcgatcgtgattccctgctcgcgctctgccatcaatccgtcgagaagcagtgagtagtcaatctcgccgccgcggcttccgactttactgtctaattccagtgctttttcctggtcggtatacaatagctttgaatcgtataaaatatgtccaattaaggttgattttccgtcatccacgcttccgcatgtaataaatttcaataatccgctcatattagaaatacccttctctctttcttcgttccatactgccagctgcttcattgtcgatcactcgtgtcgttctctcggaagatacggcgctcagtgtctcgtcgataatttcgtccagtgtcgtcgcagtggactcgcatccaccggtaagtggataacatcccagggtgcggaatcgtacactcttgtactcgatcttttcccccggacgaagtctcatacggtcatcgtctaccatgataatgttgccgtcgcggtaaacgaccggacgtacttttgcaaaatacagagacgggatctcgatattttcacggcgaatgtactgccagatatccgtctcggtccagtttgacaatgggaatactcgtacttcctgatgtttctgaatcttggaattgtacaatttccacatctcgggacgctggtttttcggatcccacgcatgatgttcgtttcggaaagagaatattctctcttttgctcttgatttctcctcgtctcggcgtccaccaccaaacgcagcggtaaatccgtatttgtcgagggcctgtttcaatgcctgtgttttcatgatatcggtataagcagaaccgtggtcaaatggattgattccgtcttttaccccttgttcgttaatgtactcgatcatatcgatgccgagttttttggccgttttgtcacggaactcgatcatttctttaaatttccatgttgtattgacatgtaaaaacgggaacggcggtttctccggataaaaagctttcattgccaaatgcagcattaccgagctgtcttttccgatggaataaagcattaccggtttttcacattctgcagccacttcacggatgatgtagattgcttctgcctccaatttgtcaagatgtgaaaactcactcatatctgtgtccttcctttcgctagtacttatttgattcttttttgttgataataacctgttctttgctgccatcttttcgtaatatgttccagtataactgattttcttccgaaagtacagtcatcttgcttcccatacctccaatatctgctcccaggtaaagagcaatcgcgccaaaccggcactctttgatacaggatgagcatccccagcagtctttcgggtacttgatataggcttttttgtcgtcgtccatcttgatcaaacttcccggacaaactttcgcgcaggcggtacagcctttgcacaatgccttgttaattgctatgctcataatgctcctcccttccaaccaggtctcggaagcggatgatgatctcgccatcttccattctggaatttacatattttaaccatttctggtcttttttaggataatctaaattttcggcaaaactgtgccatcttgtctcttttcttgcttccaaatgtgcaataacgacaaggcacacggtaagccgttctctcaactcatagacaaacatcaattcatgcatatcctccgctgcaacatcctcgctgagttcgatcagctgtttgatcttgtctttcgcaagtgccagctgcttttcattgaactggtaatgcgtcgaaattcctccggcgtaattgtccatgactttctgcatcgcctcttccaaggcttcgacggtaaacatatcgttggttcctgtcaaataatggttatattcttttatcttctcttccaatgccgtttcttcttctgcctcatttaccggcagttcctgcccggcatccagttcttttaccatatgaagtgccgcgatctcgccttcgaccattgccccggtcacgtatttctgcggacatcctccggcgacatctcctgccgcatacagtccgtggatcgtcgtctggcggtccgtgtccacccaatatccgctggcggtgtgtccacccacgatataaggttcggttccctcgatttccacattctgctcgctcggtttcttgccggattcaatccatttgagtgtctggcttggtgccatattgaggtaagcttttttcaatgactcatcctgctcgtcggaaattccttcggtccgcagataacaaggacctcttccctccagattttccatcaccgttccatacactcgttccgaagtcgtcagaccgtatttatcttcgtaaacttcgccttttgcattgacctgttttgcgccgacgccctgtgcgatggttccggtcggtgcaatcgtatctttgcaccggagagcgataaagcgcatctcaaaggttgtcatctcggctccgctccgaatccccatcgcatatcctgcgccggtattaaatggcggataccacattttatgtcttgaaaatcccggattgttcggacggtaaagccctgccgctccaccggtcgcacaaagcactttctttgcgcggatctcgtacgcagtgttttcttccatcgaaaatccaaacgctccgcggatcgtattattctccacaatgtaatcggttatattaatccggtttaatacggtcacattcggaaggcactcaactgccgaagccagcaacggcttcatattttcgccgttgatctttatatttcgatttccgcgtgcgacgtattctccattttcatctttcaaaatgacaagtccgagtttttccattttttccgttacccggttgaggccctctgacattgtcataagcagatcttctctcacgatgccatccgcatcttttttcgcatattccacataatcttccggctttctgccttttacgatatatgcattgatcgcgttgacaccggcagccaggcagccactccgcttaatatttgctttttccgcaataatgatcgaataatcggatttttcgcggatcgtcaatgcggcgtaacatcctgccgttccaccaccgacgatcaaaatgtccgtatgaagtatttttttattttcaatctgcatcgcagctcctccttgaatttcctgttctttttgtgttggcaatttgcctgtttgccagctgccctacgggatgcttcgcagcttacgctgctagatataaaacacgtcttgttcctgcatctctttattttcgagcagatacgtctgcgcctcgtcaaacacatacaatcggtagatcaacacatgtactgtctcgccgacggacaccagatctttttccagcgaccgctcgccgacaacctcaattccgtttatatccacggtaatgtcgatgcggtttccgcggaataccacgtcttttacgacgccggtctctgccgcgctgatgtactgatcgagttttccactctttgatatttttataaattccggtcggatgacggctctgtctgccccctcgacctggtcaaacccttttaatttcccatattcttccaccaccgaagaccggccgatgaatttggcgacaaatggggttcccggtgatttgtaaatttctaccggcattcccatctgctcgatggttccgtggttggtaatgatgatctcatcggctacctctacggcctcatcctgatcgtgggtaacgaaaatactcgtaattcccagtttttctaccatttctttaagccagctccgtagctcggttcttactttggcatcgatcgccgcaaatggttcatccagcaaaagtacctgtggattcggcgccaatgctctggcaaatgccactctctggcgctgaccgccggacagctgattcggatatcgtttttccatccccgaaagtccggttaattcgagaagttctttgactctctctttaatctgttttttcggcatcttctgcaattccaggccaaacgccacattgtcaaaaactgtcatatatcggaacaacgcataattttgaaatacaaagccgatgccccgctttgatgccggaatgtcattgacccgctttccgtcgatgaagatatctccggaatttggattttccagccctgcgatcattcgcaaaagtgtcgtttttccgcttccggaaggtccgagaagcgcgaccagttttcctttttcaatcccgaaactcacattgtcggaggcaaggaaatcgccgtatcgcttgtatatgttcttcatttctacgtacat

SEQ ID NO: 215 - DNA, 6767 bp, unidentified
  source 1..6767: mol_type = unassigned DNA
ttaaactttcagttttattttgcctttcaccagcagtcctgtcaactgtacgatgatgatggagaagacaagcgatttgagcagtcccggtacaccgcttcccaatgcttccggataagcccagccggctaattgctggacggagtaccatatatagggaagaatgtagcaagtgagcgttgccgttcctgcgggtttgattatatcgaaccggttggttttgccctttacatcggtcagccaatagaaaaagccgaataacgggaagaaggcggcaagacaataaaacagccaggacggggtagcctgtatcttggagataatccagtatggatgcgaaaccagtgcaagaatcaacatgccggcaccaaggatgcagagcataccgatgaatttgccggggtgttcgcgattggcgtagcgttgcatgagcaaggaggtcagcagacccgacattccgaatgcgtgcagcgtccagtcactgggaatgaaaggcaacaacaggatacggcttccgtactcttccgggataaggccggaatggctgattacagcgagcgttatcactgcaaaccatgcaaccgcgtttttacgcaggctttcgcgggtgaacagatagatgccggcacatacggcatatgtccagcctataagaccgaggattccccaccaacttgtatggaacggtttcccgttgaggtctttataaataaccagcgttgcaagcaataccacgcctgccactttcattacggtgaaaagggctttttttgtaccttcagcctttggatatactccccatgtcaggaagaaaccgattaccataaggatagtaaaccaggaatgggaaagaccgccttcaatgccgccgctgttaagcgagaacagccccatggcaatgagcgccaccgtacgccagaatatatgtgcaatgacctgtgtggttgtatcaccctttttataacggttctgtatggcaaaggatactgacatgcccatgcagaacagaaaggccggaaagatggtatcggaaaatcccagcatatcctcatcggcagcggcgtgcatcagccagtgaggaacattcttcaaaccgggaatgtcgtttacgaagagcataaggaacatggtgagtgcgcggaatacatctaccgcagccactcgttggagtgttaagtttttcatgataaatctgttttgggggttcaaggggcaaatataggaaagaatttctcaatatggggtatcaggttataaaaaagccattcaatcgcagtatcattgcagttgaatggcttttagcacgtttttaaaggaattccttattcaaacaaggatttggcgattcccatttccagtcctctcagctctgccaatcctctcagacggccgatgcaggagtaccccgggttggttttcttcttcaagtcatccaccatctgatgaccatggtcgggacgcatcgggatggaaaccttacggcgctgctgcagctcgaggaaagccttcatcacatggtacatatcgacgttgccttccagatggttggcttcgtagaagttgccttcctcatcgcgttgcgtgctgcgcaggtgcacgaagttgatgcggtcgccgaactgctccatcagggcggcacagtcattggtgctgcttacgcccaaagaaccggtgcacaggcacagaccgttgctcttgttgggaacagcgtcaatcagagcctggaaatcggcgccgcagctcatgatacgcggcaggcccaggattgaacagggcgggtcgtccggatggatcaccagctcgatgccggcctcgtcggcaacgggacagatttcgctgaggaaatatatcaggttggagcgcagcttttcgggggtgatatccctgtagcggtcaagctctttctggaactgctccaaggtaaagctctcttccgaaccgggcaggccggcaatcatgttgcgtaccagcaactgcttgtcgtcttccgtcatctgctcgaagcgggctttggccctggccttttccgcgtcggtgtaatcggcttccgcaccggggcgcttcagcaggaagaggtcgaaagcgatgaaggccgcgcgttcgaagcgcagggcgcggctgccgtcgggaagctcgtaggcaaggtcggtacgcgtccagtccagtacgggcatgaagttgtacgtcacgatgttcacaccgcatttgccgaggttgcgcaggctttccttgtagttgtcgatataccgttggaaatctccggtctgcgtcttgatgtgctcgtgtacgggtacgctttcaacgaccgaccagcggagccctgcggcttcaatcatctccttgcgtttcatgatttcttccaccgtccacacctcaccgttggggatgtggtgcagggcgttcacgatgccggtggctccggcctgtctgatgtcccataggctgacggggtcgttaggaccgtaccagcgccaggtttgttcacaaagtatcatattgtaatggtataagtttataaagtatatgtctgtctattatgaatgaggatgtgccaaaatacacttgatgatttctttttaggtacggattacacggattccacggaaaaagggataaaataaatccgtgtctatccgtgtaatccgtacctaaaaagaaacagatagcaagtgagttttattttggcatactctcacggatttcatcagatggagaatgcgtcgaaaccgccgtccaccaccgagagtgccccggtcacgaagctggaagcatcactgatgaggtagtggatggttccgaacagttcttccggttcggcaaagcgtccgcacggagtgtgggcgatgatggtctttgcacggtctgtgtacgaaccgtcggggttggtgagcagcgcacggttctggttggtgagcaggaatcccggaacaatggcgttcacgcggagttcggggctgaatttggttgccagttcggtcgccatatagcgtgtataattgccgatggccgctttggcggaaccgtaacctaccacgcgcgtcagcggacgaagggcggattcggagcagaaattaacgatggcgcctttcttgttctttgccatgacgtctacgaacaccatggtgggaagcaccgtaccgaagaggttcaggtctaccactttgcggaatgcgtccacatcgaggtcgagcacggtcttgtccggagcgatggtagcgcccggcatgttgccgcctgcggcgttcagcagcacatcgatagtgccgaagcgttcgaggatggctttcttattttcttccagcacttccttgttcagtacgtcggttacgagaaacagggcttcggactttcggttaagctcggcttccagttccctgcctgcctcttccacacggtccagaattacgattttagctccttgttcggccagatagttggcgatgttttttcctaaaatgccacaaccgcctgttatgacgattactttgtctttaatgtcgaataagtttttcatgatttatgtatttagttatacagatgtgtattctttaggtttgtatggcgaagttatgaaaaaggtctaagatattgaaaatgagcataggttattcgctcattatggtaataggttacgaataagagagttatctccttaaatatacttctgcgcgttgcgtaaccttcaaagaactcttcaagtacaaaagtacaaataaaacgggagattacgacagaatctccctacttttttcactctaatttggcttttccgtaaaagcgatttaactccgtcggtacaccatagccaaaacaagttttgacaaccatgtcccgactatccgcataagcgaagaaaagggctttgcctcatgcctaaacaacaagtttagactgatgaagcaaggcccatttcttttgggcttatgccacaaaggtgcttttacggattttctgagatttttttctttttgctgtttttttgagccggtagcggaaagctgcatgtgaccgcccacccataaatgggacaagccgtcacccacagcaggcaaatcgggaagaatggtttatttgcccgaccaaacgggtttggccagacggataaaccacacttccttgcaggtagtttgcccggtttcacgcttccggcagtatttcctttctctttgtcttttcttctttttgtggatttttccctgaagttttctctcgaatctgcctctacttccgtttacctccatttttacgcctttcagtagccgcatcagtcagtcattttcgttctgggcgcaaaggtaattccgggattttacggggatgcaaggtcgagcctcctgttttctggaaaaatctccagccctgcgggtagtatttttccgaaaaaccttgcatcccctaatccctacctttttgagcacccgaaacgaaaacgaccgatgcgacagaaagacgcattaaaaaaaatgtcggataaacgagaggcagataagatagtttgaaactcaactccctcagctcttgaatccgcattaaaaacaaaaaaatcaaaaacaacgtagatatgacagcaacggcaaatttcagacaagtggcgcagaacataggacttgcagtatgcggtttaatcgtgcgcaccgcctttgggatgttcggcatcctcttgggcatcatttcagagattgtaaacggattgttccgagtggcaataggtataatcgtggctatcctttccaccattgccttcttcggtcttatcctttggttattcaccctttaatacttaccgatatggcaaagagaaacagcaagacagcagcacagcagtgcagatactatgaggtggacaacatcttcgagtatatggtggaaacatacatcaacggcaatatatctgtgttccgtgaactctaccacgaactgaacaaggacacccgaaaggattttaccgacttcctattgagcgaagtggagccgacctattggagagagatactgaaagaaacaatctaaaacaacagcgatatgaaaggaactgaccattttaagaaaacgatactgatgtacttggagcaacgtgcagaggaagaccaactctttgccaaaagtttcagcaaccctgccaagaacatagacgactgcgtgacctacattctgaactatgtgaagaacagcggttgcaacggcttcacggacggagagatattcgggcaagccatccactactatgaagaaaacgagatagaagtgggcaaaccgatgaactgccaagtggcggtgaaccatattgtggaactcacggcagaggaaaaggcggaagcacggcagaaggctatccaaaaatatcaagaagaggaagtccgcaagttgcaaaaccgcaacagaccggcagcgaaaaaagaaactattgtacaaccctccctatttgacttttgattatgaaacccaagacacgcatacaaaaagaggtggcaagactttccgccaaccttcaccccatatccgcaacacaaattgattgggcataccgccattgtgttgaacatttcggctaccgcaccaagaaaggaaacatcacttgttccgactgcggtcacgagtggcacagcaacagcggattatgtgatagccttgatggttgtacctgcccccaatgccgtgcagaactcaaagtgcgagacacccgaaagcgcacccacaaggaaacgcggtatttcagcgtgataaccacctgcaaaggctatcagttaatccgtgtggcacaggtcagatgcgagagcaggaaaggcgagccgatgaaattctactgccacgaggttgtgcagcgttggatttcacccaaaggcatcatcactgacatggctctgcttcgtggcttcgctttctgctattgcgatgtatgggctttggatagtaatatggaggtcagaccacacaacagcctttatgatgatgttgtggcgtgggggaatgtgtatcccaatatgaagatattgccccaactcagacgcaatggtttcaagggcgattttcacggcatcgcccccgtgcgtcttttcaaggctttgctttcagacccaagaattgaaacccttatgaaaggcggtgagattgaggatatgaaatactttcttttcaatccaatgatagccgatgaatgttgggcgtcatatctgattgccaaacgtcataaatatcagatacacaatctctccatgtggtgcgactatctacgtatgctcaaaaaactcggtcaagacctccgtaacccgaagaacatctgtcccgaagatttcatggcggcacacgacaacgcaacccgaaaaattgaagccatacacgagaaggaaagagccgcagagcaacgccgttgggagattgaaaggcgtgagcgtgagcaacagcgacaactccaacgaaagaaagatgcggaggatttcatcgccaacaaatccaaattcttcggcttggtaatcacggacgaggaaataatcgtcaaggtgcttgaaagcatagacgagtattacaacgagggcaagacgcagaacatctgcgtgttcggcagtgaatactataagaaagccgacaccctcatactctcggcaaggattggcggtgagataattgaaaccgttgaggtggacttgcgcaccttcaaagttgtgcagtgtcacggcaagtacaaccaagacaccgaatatcacgagcgtatcatagaccttgtgaacaagaacgccaaccttatccgtgaacggatgaaagcggcataa

SEQ ID NO: 216 - DNA, 14736 bp, unidentified
  source 1..14736: mol_type = unassigned DNA
ttatggtgtgatttccacaccggtgaagtacatcgtgtctacatctccggcatatccggtctgcatatactcataaaaatgagtgggctcatcgtaatcatagaacaggaaacgtcgttctctggcatctccttccttgtaatcaaagatggcatccccctgtttgccatccagaagtcgtgtgtaggcttccagataatcagattgggaaatgggagcagaggaaatctgtagctcatcataatgctcaccgacaccctttacgaacagaataggatgctgccgtttctcggaactgtcatcatcctcaatgttgtatccgtggtccgacaggatcataatggccgtattatcatagacaccgctgtctttcagtttttgcagatacgtagccacgattgtcatgctggcttcaatgctttgttcgtaggtgccgttttcaatctcgttcatctgtgcatcctgatgccagggactgtgggcgcctaccagatggatgaatctgaagcatttgtcatcggtcagtgttaccggtgtctttttcaggtaggtatagaagacctgattgtcggaagaaaagagttcgtaatcactgatatcatcggtcttctccagtgaattgaattccgccgggatggtgaggcagaagcgtttgagatcaaaaggcatgtatttgaatccgaccagcttgatttccagtttcataaattgtgcaatggaagagatcgtgggggtcgtgtcgatcatattttcaaatcggaacatgctttcttccagacggtaagcgtcctcctcatacattcccatgcggtatcctctggcttccagatcatcaaagaaaggagcttcccgatagactctctttgcatattcgataaattcttcctgatcctcataccattcgccggagaagaggtaaggaattgaatatacggtgaatggataggccgacatcgtattattataataagtaaaatcagaaagagtttccttatattcgggatggtgttcgatcacctgtgacatgatgtctccgtctactgtgtccagaaccagaagtacaaggttttgatcggtagacatttccagttccccataggtggtgttgatcatagaaaatttgtgttccaggccctgttttgtaaaccctagcgttacaagagtcaccaacagaaccagactgatcagcccgctgacagcacctgctgcatctgccacctttgtaagcgacagctttttcaccgtcagtatcaccagaaccgcgactgccacccagagagcaacggagccgatacgcaatccggaatactgtgcccaatccaccgtacttccatccagatgaggcagattgcctatcatgaaattgccctgaatataagtgcagaggaacgcaatcagataaactgtgagaaatccatgatatagcctggtatttatcttcgaaacgatgaaagccagcaggaagctgacacccgtaaataccgcaaacatcaacagacagagcgggatcagatcataaaaatcaaaccagaattcatatttgttattaaaataaatttccaatggagcataaagaaacaacataaatcctgccgcaacagaaagtaaaccggcggaacgcagccggagctttgactctttcacaaaaaaaacctcccgtatgttcaaaatggatacttgcaaagtacaactattatattttgaaacaaaataattgtcaaatagcggcttaattgtcaggatgcataacccctcagatactttcatacactgtaaaaaagtatcctgaggggttttcctttgaaagactatattgaagaacgagctatagggatagcgggctatatcatcgaccacaacgccacggtgcggcagactgccaaggccttcggcatcagcaaaagcacggtacataaggacgtgacggagcggctggcccaggtgaatccggcgttggcaaagcaggcgcggaaggtattggatgtgaataaatccgagcgtcatatccgcggcggactggctaccagagagaagtatctgcaccagcactagatattcgatgaggcaaatcattctatacgggaaagtgtcttgaaataccgggtaccaacttatataatggatacatagctatatgggacaaagtagttgggacataagatacaaaagatatcaggacctttgcgcagcaggatcacttatgaggagagaaaaaacgaaatggcaacagagtttctgaatgatgcacggaaagagatcgagggacggacagaagacttctgtggggaattaaaagcattctatcagggcaacggggaagcggaacagaacctgatggagcagacaacccagcctttctggcaaagtctgcgcctgagcagaaaaagactgcggcagcgggaactgacggtggatatggagatgcaggagccggcacgactggcggactatgatggtccctggaaggatggctatgattatagctgccgccgtacccagccggtaaaaatgagacggacttattaccgcaagggaaaaaagattgcgttcctaaagacaccggagattgcagcggcaagctttttgaaagcggatgtgcagggagatatggttatctgccctaactgtggacatgagggaaaactgaccagctatatcgatggctgtgatgcctgcggggcaaagtttctcgtcagtgattttgagacaaaggtatccggattttctctggaggaggacgcaagacagaaaagtatttccaactttatgaaagccggtgcggtggtgggaattacagcgatttctcttgcggtactggccatctgtgcgggcggcattatgtttttgctgttggcgttgggcaggaacggatacaatgcggtaaaggcagccgcagccatgatgctgggaattggtctggctccggtatttttccggtcgttgttttacatgctcattatatttattgtaatgttgatcgtgatggagactcgcagaaagccgagaattcaagacgaatcgaaagtaaaggccgcaatcccggaattctccacgggtaattttcttcagaatctggaataccagctgcgaatgatccatctggcggatacggcagagcaggtacgctttttcgcatcctgtgatctggatacggtggtggcacggtatcagaatgtggtggactgttgcatttgcggtgtgcgttttctggaggcggagacacggggagagtcttacagaatcagcgtggaagtgaggacccgattgacactggatacaggaaagaagatccggaaccgttatgaggagatccggctggaactggaaggcagacaggatgtggtaacgcagcacagcagggcactccgggaatacaaatgccccaactgcggaggcagtgtggacattttgggcggcggagtctgcgaatactgtaataccgcggtggactaccgaaattttggctggatcatcacttcttatacaaatctggggcagccagagaatccttttgcgaaaatactggcgggagcactgggaagttatctgctcattttgtttttgagtctggtactcatggcgcattccgaggatggaaaagatacttttgagatcttacagagtgtccggatgtcaacggaatatctgaaagcggtgcagcaggatattatctatcccgatgctgtgatttcagattgtacggagacagacagcgaagatggaacttttacttcaataaaggtgtactcctgtggggaccgggatgcagtaaaagaagcctacaaaactgcactgctggaaaagggatttctggagatgcagcagtacccggagggattttctgtctttttgccggaggatccgtcagaatatgccgtggattcggaagaaggaatgttctatcttgtgatctgcgcagaaaatgcaccggagggaattacagtaactgcgaccttgatggacgaaaattggaacccggtgcaggaataaaatagaatacatacatacgacaagggacccgggcaaaagcttccgggtcctttttagagggaaagtgttggtagctgactgattactattgggtgagaggaattctgtgaactactctgcgatagagcttccacaggagcacagcagggaaactgactgccagatatgctgtggataaaagtccggtaacaccgcctacgattgcaatgattaaaattccaatattcataatgaattcctcaactttctgtcattctgtacaacattcgatgaagtccttaaaaacttcacataccgtattatagtaaacagatacccccgggtgaatagttttgagcgacccttaacaccattttgtcgggatatttacaaaatctttgcaacacgtttacagaatcttaacggcaggacttacgggcgggaacgatcccgggagtaaggtttgcaatcacaggaaatatcaagtataatagagaaaattgactgttacccggggtggaatagtcggagaaaataaaacggaggtaggaatatgagtatgacactggaacaggctaaggagaagcttgcaaagtatggtcaggaacatgttctgaagtattacggggagctcaacgaggaagagaagcaggggattctgaatcagatcgaaactacggatatgagcattctggaagcttgcaagcataaagaagatctggcaaaaaaaggagtgatcacaccgttggctgccatgcagttagacgaaatcgaagcaaacagggaggaatttaccgcaaccggtatcgaagcgatccgacagggcaaggtagcagctgttcttcttgccggaggcatgggtaccagactgggttccgataatcccaagggcatgtacaatgtgggtctgacccgtgaactgtacatctttgaatgcctgatcaataacctgatggaagtcgtgcatcaggcagacagctggatccacctgtttgtgatgaccagcgataagaacaatgacgcaacgatcgcatttttaaaagagcatgatttcttcggatacaacgcggattatgtccacttcttcaaacaggagatggctgcggcaaccgattatgaaggcaagatctatctggaggaaaagggcaagctgtccacttcccccaatggtaacggcggctggttcatttccatgaaaaacaatggcatgctggacattgtacacagagaaggcattgagtggatcaatgtatttgccgtggataatgtattgcagcgaatcgcagatccctgcttcatgggagctactattcagaaaaattgtgtggtaggctccaaggtggtccgcaagaatgcaccggatgagaaggtaggcgttatgtgcttagaggatggcagaccttctatcgtagaatattatgaactgaccgatgaactgatgaatgctaaggatgagaagggagaacccgcgtataattatggtgtgatcctgaattatctgttcaaggtacaggatctggaaaagatcatggcagagaagatgcccctgcatatcgtagagaagaagatcccgtatctggatgagaacggagaaccggtgaagccggaggctcccaacggctacaaattcgagagtctggtactggatatgatccaccagatggacagctgtctgcccttcgaggtagtcagaagaaaagaatttgcgccgatcaagaacaagaccggtgtggactctgtggaaagtgccagagaactgctcaccgagaatggtgtggtgctgtaaacatttcgacagattttcacaacataaggttattgaggaatcgatagaattacagtaatctgatactgtaagaaacgaagaaaaaatttcatccggctctgacagatgagagattgtgcagccgccatagtgaacaaatagtattgtcctatgcacggcggataggagagagtgtatgagaattttggtaacaggtggtgccggattcatcggcagtcataccgtagtggaattacagcaggcaggctatgatgtagtcgtattggataatctctgcaatgcaagtgagaaagtgatccccagagtagaagccatcacaggcaagaaggttcctttctataaggcagacattctggaccgtgaagctctggaagagatcttcagcaaggaacagattgacgcagtcattcattttgcaggactgaaggcagtcggtgagtccgtacagaagccctgggaatattatgagaacaatattgccggtaccctgaccctggtagatgtcatgagaaaacatggtgtgaagagcattatcttctcttccagcgctaccgtatacggcaaccccgcatttgttcccattacggaggaatgccccaagggacagtgcaccaacccttacggctggacgaaatctatgctggagcagatcctgacggatatccagaaggcagatcccgaatggaatgtgatcctgcttcgttacttcaacccgatcggagctcacaagagcggtaccattggcgagaatcccaacggtatccccaacaacctgatgccttatatcacacaggtagcagtcggcaagctgaaagagctgggtgtcttcggtgatgattacgatacccccgacggaaccggtgtacgtgactacatccatgtcgttgatctggcaaagggccacgtaaaggctctgaagaagattgaggagaatgcaggactgaagatctacaatctgggaactggtgtgggctacagtgttctggacatcgtgaagaacttcgaagcagctaccggcgtgaagattccttacgtgatcaaaccccgccgtgcaggcgatatcgccacctgctattccgatgcttctctggcagagaaggaacttggctggaaggctgagaacggcatcaaagagatgtgcgaagactcctggagatggcagaagaacaatccaaacggatacgaagaataatctatagtttagtcaatggaaagttagcatagctacgagccatgcagaaatagagtggaacacgtcgtgggagcttgcgcacaagcgatgctgtttcgctctttttttgcatggttcgtagcgtagggctgtcatgcaagggagcctgccgcaaacatcctgttcattccatcctgtctttcaatgctttgcgagaaaaaatcaccaccttccgacaatcattcttggaaggacattccatctgacgtgggcgttttgtgctttctcataatatctgtacactataggcatttctattgctttggtgcaaatcgcatcaaaatagcaaaatcagtacaaaaaaacttctaaatccaacattttttgtactgattttattatttttcccattttagcgaaaataagctctaataaaaggccaaaatctcctgcttttgtatttttttagcaaaaaatggcattttcaatacaaacagaacttccggagtggtggcagcccatactacagctggttgttgacattttcttgaaaagtgttagaaggcaggggcagtgcggacacgatgtcatccggagattttaagctgtggtatgggatacttgagtatacagtgcaggagcaaatttgagtgtgaaaaatcttcgctttacatttagaaactttttacgttgataagcttatcattaagagaaaaactgtaaagttcattatttgcagacggaggaaaatgtctgtatggtccggaatacctgctctactgtatccgtcatattggtcatggcattgtcggtatgcatagcctcatccagggataccacgttccgcagaatcgggaaaaaggcatcaatgccctctgcgttgcaggcaacggcctctttggccacgcagccggaaaaagcaagtaccggtttttcatattttttggcaatcttggcaacaccgatgggagcttttcccataaccgtctgaccgtcaaggcggccttccccggtgatcacgacatctgcatcccggatatatttttccagatgggtttcttccagaatgatcttaataccggattccagtgtggcattgcagaaggtaagaaaagcaaatcccataccgccggcagcaccggcaccgggatatttggcatcggcatgaggaaactgttctctggccagagcggcataataagccagccatttgtccatctgcaggatcatagtggaagtagcgcccttttgcggtccgtagatggcggaacatccctgctttccgcagagcgggttggagacatcgcaggctatgcggaaagtacattccttgagttcgggaagcacatgatccgtagcgatggattccagatcctccagtcctttggctccgaagcggatctgatttctgtttttatccagaaagccaaagccaagtgcctgcagcattccgacaccgccgtcattggtggcactgccaccgataccgacaataaaatgccggcagccgttctggattgcatctttgatgacttcgcctacaccgtaagtggtggtgttcagaggattcttttcctctccgctgacctgggtaatcccggcggcaccggacatttcaatgattgcggtatgggtctcgtcgacgatgccgtaaggacagacaacggggtgaccggaaggacctgtgacctgcacctgtgtcatacggccgtcacagccgtttaccagagcatcgacggtgccctccccgccgtccgccagaggacggacggtaatatgtgcatctttataaacacgtttgatccccgtggcggcgctcaaacctgcctgcatggaggtcatacttcccttgaaggaatcgatagctattactacattcataaggttcctttccgctgccgccggaattcggccgacaactgtcgttttcgtatagattttcggaaaatggcataatttctgaggatattatagcaacaccggaacaaaagaggaatggttcccggagaaaaataaaatttagcgtggtacagtggcaaaaacatcctataagatcattgcatctgagaaaacaatccagtataatgaaaggagtgcacatttagatgcacattacgcataagaagtggaataacaggaggacgagcatgattcagttaacacagggcggcgcttacctggtaaacggtacggacatcgtagcggataccccggaagcagccagtcagatacaggcgaagaccggcattacgatctccaaagaagaagcagcgaaaaacaccatggcatatggtattctgcaggagcataatacctccggcaatatggacaagctgaagatccgtttcgacaagcttaccagccatgatattacctttgtaggtattatccagaccgcgagagcatccggactgcagaagttccccatgccctatgtactgaccaactgtcataactccctgtgtgccgtaggcggcaccatcaacgaggatgaccacatgtttggtctgacctgtgcgaaaaaatacggcggagtctatgtaccccctcatcaggcagttatccatcagtttgccagagagatgttagccggcggtggcaagatgatcctgggttccgattcccatacccgttacggtgcactgggtaccatggctatgggcgagggtggtcccgagctggtaaaacagctgttgaaccagacctatgatatcaatatgcccggcgtggtagctgtatacttaaagggtgctcccgtgaagggtgtaggtcctcaggacgtggcactggctatcattggcgcagtattcaagaatggctatgtaaaaaataaagtaatggaattcgtaggtcccggcgtggcttccctgagtgctgatttccgtatcggcattgacgtaatgaccacagagaccacctgtctgtcctccatctggaagaccgatgaccagatccgtgagttctatgagatccacggacgtaccgaagactataaggaactgaatcccggccaggtggcatactatgatggattgatcgaggtggatctggacaagatccgtcctatgattgccatgccgttccatcccagcaatacttacaccatcgaagagctgaatgcgaacctgatggatattctggatgagacggaaaagcgtgcgaaagtaagtctggacggtgcggtagacttcactctgaaaaataaagtaaagaacggcaagttcattgtagatcagggtatcatcgcaggctgtgccggcggcggattcgagaatatctgtgcggctgccgacattctgaagggcagatacatcggtgcggatgagtttactttaagcgtatatcccgcatccatgcccatatacatggagctgatccgcaacggctgtgcggctaccatcttagagaccggtgcagtgatgaagactgcgttctgtggtccctgcttcggtgccggtgacacacctgccaataacgcattcagtatccgtcactctaccagaaatttcccgaaccgagaaggctccaaactgcagaacggccagatcgcttccgtagctctgatggatgcccgttccatcgcagccaccgcagccaacaagggtgtgctgacttccgcaacggacttcgatggagatttcggaaaatacaaatatcatttcgatagcaatatttacaagaaccgtgtcttcgattcccacggtgtggcagatgagagcgtagagatccagttcggccccaatatcaaggactggcccgctatgggtgccctacctgagaatctggtactgcaggtagtatccgagatccacgatcccgtaactactaccgatgagctgattccatccggtgagacctcttcctaccgctccaatcctctgggactggcagagttcactttaagccgtaaggatccgcagtatgtaggacgtgccaaggagatccagaaggcagagaaagagcgtatgaacggcggacatccctgtcaggcagttccggtactgaaggatgttatgggtgaagtaaagaaacagtatcccgatgcaagtcgtgagaacaccggattcggttccactattttcgcagtgaagcccggagacggttctgcccgtgagcaggctgcttcctgccagaaggtattaggcggctgggcaaatattgccaacgagtatgccaccaagcgttatcgttccaacctgatcaactggggcatgcttcctttcctgatccagcccggagacctgcctttcaagaatctggattacctgttcattcctggtattaagaaagccgtggaagacaaggccgaggaaattaaggcatatgtggtaacaaccggagaaggcatgaaggaattcaccctgaagctgggagagctgaccgacgaagaacgtcagatcatcctgaagggatgcctgatcaactataaccgagtgtaactattcagagacatgtgactaaccatcgcagatgcgtttcgcgaagagaggctgaatagttacaatgagaagtaaggagaaaaaatatggaatttaacaaaccggtatccaaccccatgatggtgggatccattgaattattaaaagcagaggacaccccggaacacagacagatgttcctggatgaactgcagaaagcaaagttcctgtctccggtcgtgatcgatccggtgcctgtgcccgatgaaaacggccgggtgaccatcgcaagagatgccaaagtacagttcccgatgctgtccaccgaggacggtcggaagttcttcatggcgttcactgactggacagagctaaaaaggtggagagatgaggagaatcagcagactttcgccatgaactttgacgattatgcgggaatgctgctgcgcaaagatgcacagggcaatatcagcccggcgctgggattcgtgatcaatcccttcggtggcaacatcgtggtgaccagagaaatggtagccagcatgatcgcagcaaagctgaaagcagccggcagaccggtgcctcccgcacccggaacccctggcgctcccactcagcccaaacagcagtaaattaacactaaataaaatgtccatagcggacgatataagtagtagggaggtgacaaggccagtcacttcctgctacttattttttacagtttgataatgacaccacggatggtaaccagacagaggcatattatatgtattctgtttctttaccatctttttttagtttaacagttcagccatgcaatatcatatgttctgcgtgggtgctggcacacaaagcagaacatatgatattgcatgagcggagcgccgcatgtatgaaataaaagatgagccgcttagcggcgtcgactgcggagcaggcgcttttatgaatacatgcggcggtgaactgttaagcgttacaggaagcgcgccctgttggttcgtggtgaggtcggggaaaggagaaaattacagatttgagaattgattccgcaagcataggaatggattccgccagaagctatcacgcttctaagacaagcgtcagacgatttgagataacggattatcaggcaggtctgacagatgtatccactaagggacagaagacaccgaatggtgaggataccacacagaacacggaggaacaggagaacactgcagagaacaccacgatgacagccaaagactggcagagtcgtttgctggtatcttctgccagatgggatatgcgaagcagtgccagtgaacagacattgtctaccatccgggaatatacggtgcgttatatttttgatttattattcccgtccaggaacagcactttgcgggactggatgcaggaaaacggatggagcagcggtaatcagaccggaaacagctggaatacagggaatagcgtaaataatacccagacgaattccggcagcacacagggaaccgcaacacctgcgtcagacgtgttcaatctggtcacgtcccgtgtgaaaatattgaactatgtgagcgagacctggaacatagaacaggaggataccagtttttccaccgtgggaagcgtacggaccaaggatggcagagagatcaattttaatgtaaatgtaaatatgagccgcagatgcgaggaatactacaaagagcaactcaatgtagcagaattcacgctccatgatccgctggtgatcaacctggatactgatgtggcagaagtgtcggatcagaccttttattttgatctggatgccgatggcaaggaagaagagatctccgtgctgaatggcagcggctatctggcactggacaagaacggtgacggcactatcaacgacggcagtgagctgttcggcacccggaatggggatggctttgcagatctggcgcagtatgatgaggatggcaacggctggatcgatgagaacgattccatctggtcaaaattaaaaatctggtgcaaggatgaaaacggcaacgacgtactgtacaaactttctgacaagggtgtcggtgctatctgtctgcaaaacgcttctacggattttaccctgcagggagaccgtaaggctcaggacggcactaccaatgccaatgcgaccaatgctgtggtccgcaagaccggtattttcttatacgaaaacggaaatgtgggtacggtacagcacgtggatatggctgcctatgccgcacaggcatagaataaatataactattcagttacttcgccctataaatagcatcaaatgttcttacgaatgcaaacattcgacgctatttacatggctctgaatagttccaaataaatgcaaatttcatatcgaagacattctgaataaaacccatgaatcgggcaagactataggataaaccagggaaagtggttgaaacgattgtatagcaggcagttgactcagggaacaggaaggatgcggataggatatgagaagaaataaaaagagcggtattaacaaagaacgtattataatgttagcctcttcagcctttgtactggcagcattgaccatgacaggggtctatatgaaggggcagaatgtggagtccagggatgatggttataccttggacttcactgcgcttcccaacaatgcggatgacaaattacaggagatcacggagaataacgacgaacatcttctgaaggaggacgagaacatccccggactgacggcaaataatacagcgggaaatgagatcgcgggaactcctgtcaccgaggatgatctggactatatgccccaggaggtaggctccggcaacgtagagattccggggctgacggatcaggagaccctgctggaggccgcacagaaagagcagcagaattccgatgccgaccgacaaaaggaagagaccgggggaaagcagacagcaggcggggatgtggtcgttgagaagacactgcactttgcagaaagcgacggattacagcaaccggtgcagagtgatattctgatgcattactctatggacaagagcacttattttgctacactggatcagtataaatacaatcccgccaccattttttccgcggaagaaggtacggcagtgaccgcttgtgcacagggaaaagtgacttcaatcttcgaaaatgaggagatcggcaaggcggtgaccctggatctgggtgacggctatgaggccacttatggacagctgacggagatcacagtgaaagagaattcctatgtgaatcccggcgacaccatcggcagtgtggcagcgcccacgaaatactacagcaccgaaggaagcaacgtatactttgctctgacccacaacggggaaccggtgaacggggaggcattgttccgctga

SEQ ID NO: 217 - DNA, 5274 bp, unidentified
  source 1..5274: mol_type = unassigned DNA
tcagatcggcacatcctgccactgcccgccgatcagttcgcgggtggatttgaacccgttttttttcagcagctcgaatgcttccgcacgtccgtcgttcaccaggtccgggtagtggcagtcggagtttaccatcaccggaatattcaactcgcggaggcggtgcagatagtcggtatgcggatagacctcctgttttttcacgaggttttttgtgttgacttcgaccatcaggcccttttctgcgatcaggtgcaggcagtcgttgagcggtttttgataccagtctgcttgcaggtcgaagccttcgcatttgtggccgttcatgtatatcttgtccatgtggccgacaatgtcgattccgcctgcctcgatcatttgctgtgtggagctgaaataatgggcgaccaacttgcggatatctccgtcgtagtaggtgtcgacagacttctggtattcccggaaagagccgtcgatgcacaccatattctcttctgcaagcggctgtgcgattggcagaaagtggatggagccgatgcggtaatcgagcggcaagttacggaagtaggggatggatgcgttgtagctcttgtctaagaaatcgatttccagtcccacgtatatttccaaccggtcgttgtatttctttttcagccgttctatttctgtcagatattcgggcatatcatctttcgacatgttccagaatgtttcgaacggcaatggtgaatgggatgaaaaaccgtaggcgcggaacccgtgcgcaacagcgaatttaacgaagtcttccggcgtactccgcccgtcacaaaatgtacaatggctatggtagttactgagttgcataaaattttacttgtaaaaagacaaagataatttttttatcccgaaagacaacctgtttgataaaaaaaggcttgattgctgccgagggattagcggcggaatcaagccttgaaaacacttaaaggatgaaaaaattgtatgttttattttattacattcagttctttacccaccttgataaatgcttcgatagctttatccagatgttctgtttcgtggccagcggacaactgtacgcggatacgggcctggtctttcggcactaccggataatagaaaccggttacataaatgccttcttcttgcatcttagctgcgaaatcctgagataatttggcatcatacagcataacggcgcagatagcggactgagtcggcttgatatcgaaaccggcagctaacatcttttcgcggaaatagctgacattgttcatcagtttcgtatgcaatgcgtcgctttctttcagcatcttgaacatttccaggctggcacctacgatagcgggagcgacagagttggagaacagataaggacgggagcgctgacgcagcatgtcgatgatctctttctttccggttgtgaatccgcccatagcgccaccgaatgctttacctaatgtacctgtgaagatatcgactcttccgtatacattatattgttcagccacaccgtgtcctgtcgggcctacgacaccggcagagtgggattcgtcgaccattaccaatgcgtcgtatttttctgccagttcgcagatcttgtccatcggagccacgtttccgtccatagagaacacaccgtctgttgcgatgatgcggtgacgttgtgcctgggcttcttgcaggcaacgttccaggtcggccatgtctgcattggcataacggtagcgttttgccttgcaaagacgtacgccgtcgatgatggaggcatggttcaaagcgtcggagatgatcgcatcctcttcagtgaacaacggttcgaacagaccaccgttggcatcgaaacaagcagcgtacaggattgtatcttcggttttgaaataatcggagatagcagcttccagttgtttgtgaagatcctgtgtcccgcagatgaaacggacggatgacatgccgtatccgtgtgtgtccatagcttctttggctgccttgatcagacgttggttgtcggacaggcccaggtagttgtttgcgcagaagttcaaaacgtcgcttcctgcgtttactttgatgtcggctctttgaggagtggtgatgatacgctcgttcttatacaatccggcagctttgatgtttgccaattcctgagtaaggaaatctttcagtttaccgtacataactttgttttttgttagtatttctaattaagttgacaattatatctcttttatcgcagacaagtggcaaaatatcttttcgaaacctttttctttgtctctgatttgtctgccgatgcggcaaaggtcatattttttttgaatatataggctaaaaaaatacaagaaattcataccggaatgtttttattctctatacctttgccgcagaaaaacttaaaagaacatcaaacgcaatgaagaatgtattagtaattggttctaccggtcagattggatcagagttaaccatgaagttgagaggtatctacggtggaaacattgtagcaggttacatccccggacaggaacctaaaggtgaactgttggaatcaggaccttctgcaattgtcgacattacaaacgaacagcagattgctgaaactgtatctaaatataaagtagatacgatttataacctggcagccttgctgtcggctgttgcagaagcaaaaccgcagctggcttggaaaatcggtatgggcggtttgtttaatgtattggaagtggcacgtgaaatgaattgtgcagtattcactccgagttccattggtgtattcggcaataacacaccgaaagacaagactccgcaggatacaatccgtaacccgcgtaccatgtacggtgttacgaaggtttcaggcgagttgttgagtgactactataatatccgtttcggtgtcgacactcgttccgtacgttttccgggtcttatctcttatgtaacacctccgggtggtggtacgaccgactacgcagttgatatctattattcggctgccaaaggcgagaagttcgtatgtccgatcaagcagggtacattcatggatatgatgtatatgccggatggtctgcgtgcagctattgaaattatggaagccgattcgacgaaattcgttcatcgtaactctttcaacattgcctctatgagctttgatcctgaaattatctacaacaatatcaaaaagtatgttcctgatttccagatggaatatgatgtagatccgttgcgtcaggctatcgcagaatcgtggccgaactctctggacgacacgtgtgcccgtcaggaatggggctggaaaccggaattcgacctggatgccatgactcaggatatgttggcaaaattgaaagaacgttttaacaaataagaattaattccccggtcattaactgatcaataggagaaaaaggcgactgtccatccggatcgtcgcctttttgtttgtatcgtttttattcagtattgtaggcagtttcaataacaatgtgactgtttcttgtgtaggaaacgattaagttaaaagtgcatgaaaaattatgttgtaaaacatgaaatagttaaatcaggttaaggaaaagtactttttcggtgaaatattatgctgtataacataaactccctatatttgcatcgtgtttttcatggtattagatttaaggttaacaatgaagattggctgtccgtgatggatggccttttttattttatgccagtcccgattctttccggttaattctaaaacacgtcttgtcttttttcaatcccttattgtaatatctttcaaaaatgcattggttcaaatcgaaactattaccgcatctattttagttttctaccccgtttaaatcaaattacatgcaagggtaatcttttttaacaaacatctattttagcatattattgtatatcagatttttatgtgatatttgacttttaagggggatactgttgttttttggaggtgagaattggtgtggatggtggcaaaatgggttccgatttactgtaaatgatgccgattaattatgttatatagcatgttttcgttaaatagatttaaataaatgagatttccaagtgaaaatgtatgcttcataacataaaatgcctatatttgcactgtgtttttcatggtattagatttaaggttaacaatgaagattggctgtccgtgacggatagcctttttttgtttttatccggatcatccattcttttggtattcttgattatatttgtatctctgaaaaggattcattgtaactaaaatatcatagtatggaaatgtacaaagcaaatgataaccggtatgccgatatggcgtacaggcgttgcggacggagcgggttgttgttgccggccatctctttaggattgtggcataattttggtagtgtggatgcgttcagtaactttattcagattgcgcatgctgctttcgacaatgggattacacattttgatcttgccaataactacggtcctgtatatggatcggcagaggaaaacttcggtcgtatcttgaagaaaggtttggggctgtacagggatgagcttgttatttctacaaaagccggatatgatatgtggcccggtccgtatggtaactggggaagtcgcaagtatctgatggcaagcttggatcagagcttgaaacggatgggtctggaatatgttgatatcttctattcgcatcgtccggacccgcagacaccgattgaagaaacgatgggagcgttggcagatatcgttcgacagggaaaagctttgtatatcggaatttcgaactataatgccgaacagacagaaaaggcgcttgctgtcttgggggaacatcgtgtgccttgtctgattcatcaagcgcgctattcgatgttggatcgctggaccgaaccggacctcttgcctctactgaagcaggaaggggtgggaatgatcgctttttcgcccttggcacagggtatgctgacggacaaatatctgaacggtatccctgaaaattcacgcgcagccaaatctacaggccatctgcaacgcgagcaggtaacggaagaaaagataagtagagttcgccaattgaataaacttgcaaaacaacgtggacaaacgcttgcagaaatggcactcgcctggttgttgaaggacgaacgggtaacgagtgtcttagtgggggccagttcggttgcacagttgacggataatttgaaggcgttacaaaacaaggttttttcaacggaagagttacaggcaatagagagtatattacaataa

SEQ ID NO: 218 - DNA, 11618 bp, unidentified
  source 1..11618: mol_type = unassigned DNA
atgggaaacgagcagcttatgaaccaagaactattcaacccacaatcttcttccgtaagttcctcccgaatcatttacaccccatcaacctttgcccggacatccttgctccatctgcaggaggtcggctctttgcaggctgttcacccgcatatatctcagagagagaatctggtgtcgtttctttgctttatcgttctgtctggcgaaggtgaactttcctacgaggggcagacctatcaattgcacgcaggcgattgtgtgttcatagactgccgaaaagcctacagtcattctacctcggatgacctctggtcgctccaatggtgtcacttctatgccccatcccttccggctgtgtatgagaaatacaaggagcgcggcggtcggccggtgttccacccggcggatatcaagccatttacggatttacttacagagctttataacttagcttcctcatccgattacatccgggatatgcggatcaatgagaagctggggacgctgttgacgctcctgatggagcagtcttggcatccagagagtgcgacaataagccggaagagaatggaactggcagccgtgaaggagtatttagacgatcactttacagagaaaatcatgttggaagagttggcagaaaagttctttatcaataagttctatctgtccaaaatcttcaaagagacttacggaacgacggttaataactatctgatctcaaagcggattaccagagcaaagcagctgcttcgcttcacagatatgactgtggatgaagttggtgttgcggttggcatggaagatgcaaactacttcagccgaatgttccgcaaagtagaaggaatcagtccaagagaatatcggaaacagtggtgacattgaggcacagcgagaaatcgctgtgctttttttgaagtatgtcgtgagaatgaaactatctgtatctgtttcttctccggggcggcgtatacaaaaaatatgacagaaaaagctaaatgggggaggtatctggctatgaaggacttattttttcatgattctcaggatgactcccccattgttttttcagaccgcgttctttacaccccgacatcttttgcaaagactgcccttttatatctgcaggagatcggaagcctgcaggcaaagaagccgcatacttcctcccgcacccgtctgtcatcatatctgtttttctgtgttaattccggctccggtgagctggaatatcaggggaggcggtataagctgggtaagggggactgcgtattcattgactgtcagctgccgtactcacacagtaccaatacagacctgtggtctctgtcgtggatccatttttccggtgtgaccatgcagactgtttatcagaaatatcaggagcgcggaggacggccggtattccgatcggataactttgccgatttccagtcactccacaggtcgctgtttgatcttgcagcttcagatgactatatccgggatatgcggatcaacagtggcttgaatgaactgctggtactgctcgtgaatgagtcgtggcacccggcagagcatccggaccgggcactgaaaaagcagaatctgttgccggttcggaactacctggaagcgcactatacggataagaagctggaggacatcggctaccggtgcggtcttggcgcaccacattatttcagccgcatcttcaaacaggtcgagggcatcacaccgtcggagttccgtgagaagtggggcgaggcggggcactgagacaaaagaaaaaggaaagacacagaaaccggccggatggctggaaattctgagaaaagaggagagaaagaaatatgaagagcttgtattcaatgtttttatcccaggcctatcaggactgctgggatgattacaaccgttccgtgaaactgaaaaatttccccagatgggattatgtgatcctgacggcatccaatgaccagcaggcagagggattccgcaggcagatcgaggagcggaaggagtatcttccggcagggacaaggtttgcagcggtcccggaccggggtggcgagcgtgtgggttccggcggtgcgacgctggaggtgttaaagtatctccatgagcaggagggagatttccggaagctgcgggttctggtcatccattccggtggtgacagcaagcgtgtgccgcagtattccgcactggggaaactgttctcgccggtaccccatcagctgccggatggacgcagctctacactttttgatgaattcatgatctgcatgagttcagtcccgtcccggatccgtgaggggatggtgctgctgtccggggatgtgctgcttatgtttaatccgctgcagatcgactataacaatgtcggtgcggcggcaatctcctttaaggagcgcgtggaagtcggaaagaaccatggtgtgtatgtgaacggggaagacggcaacgtgaaatgctgcctccagaagaagtcagaggaggaactgcgaaaggccggtgcggtgaatgaggcaggctgtgtggacattgacaccggtgcgctgatcttcagcaccgccatgatggattcgctgtattccctgatcgggacagaggaagggtatgaccggtatgtcaacgggacggtgcgtctgtccctgtatgcggattttctctatccgttagcggagaattctacgctggagcagttttatctggaaaagccagaaggggaattctgtgaggaactgacagaagcgagggaacaggtgtggaaggtgctccgtccttaccggatgaagctgctgcgtctggccccggcgaagttcatccactttggcacgacaaaggagattctggcactgatgtgcggcggcgtggaggagtatgccagccttggctggagcagccgtgtggcaagcagcatcagcggcagcacggccgggtataacagcgtgctgagcagccatgcctccattgggaaagactgctatctggaggtatcctatgtccacagccatgcaaaggtgggaaacaactgtgtcctttcttttgtggacatccacgatgaggtgatcccggacggggtggttctgcatgggctgaaacagcgtgacgggaagttcgtcgtgcgtatctttggcgtgcaggataatccgaaggagaaccggctgtttggcagggatctggatgaggtggcagaaaagctcggcacggctctctgggatggcggaaaccataccctctggacggcagaactttatccggagaaggacaccgtgagggaagcggtggcagcggcgctgaacctgtatgcgcttgtgaccggggaaggcaggctggaggactggaaagagagtccgcgcaagtcgctgtgttccggcttcaatgcggctgacccggatgccatcatcgcatggaatcgccgcatggcagaccttgtgatgatggatgaactggcaaaagcaatccgcggacaggtaccggcacagacgcttccgaagcgtaaggcactgacgaagatccagagacactggctggaaaaacgccttgcaagggcagatttcagtgagaagctccgcctgcattattatcttggtgtggtgctggaggatgagaacgagatacagaagtgctttgggaccatccagtcggaagtgctggaggctacggtgcgcagtctcagctataatgagaaggcacacatcgtgaaggatgcccataccgtggaactgccgctgcgtgtgaactggggcggcggatggagcgatacccctccgtactgcaatgagcatggcggtacggtgctgaatgcggcgatcctgctgaacggtgagaagccggtggtggtgaagctggaacgcatggatgaactgaaggtagtctttgacagccgtgacatggatgtacacggggagtttgaggagatcggtgagttacagcgcaccggagatccgtttgatccttttgctctgcagaaggcatgtctgcttgcctgcggcatcatcccgatgaaagggaataatctgaaagagatactggagcgtctgggcggcggttttgtcatgcattcagaggtgacaaatgtaccgaagggttccggccttggaacttcatcgatcctttccgctgcctgtgtgaaggcggtgtttgagttcatggggatcggatatacagaggaagatctgtattcccatgtactggccatggagcagatcatgtccaccggaggcggctggcaggatcaggtgggcggtgtcacaccggggctgaagtacatcacttccatgccggggattgaccagaagctgaaggtagtacatgtggaaatcccggaggaagcaaagaaggaactggacgagcgtttctgcctgatctacaccggtcagcgcaggctggcaagaaacctgctccgtgacgtgatcggacggtatgccggcaatgagccggatagcgtgtttgcgctggaggagatccagaaggtggcggcgctgatgcggtttgaactggagcgcggcaacgtggatggctttgcgaagctgctggattaccactgggagctgagtaagaaggtggatgccggaagcagcaacacgttgatcgagcagatcttcagcagcattgaggagctgattgatggccggctggtctgcggcgcaggcggcggtggatttttgcaggtcgtgctgaagaaaggcgtgacgaagaagcaggtggcagagcgtctgcatgaggtgtttatggacagccttgtggatgtggcggactgtgagctgttgtgggaataagagatatattgtgtgttcgagacaggtcgagactttcgcaaaactgcatggatacagttgcgtatatttcgtaggcactaaaaaaccaatattatgctaataaagcactactttaacacttaagagaatgtgccttaatttataaaatacaagtgtgcgacaaaatgaagcacaatccatcaaacgtcagagaggaataaaatacatgaaaaaggcacttatcacgggtatcactgggcaggatggttcctatctggcagagtttctgctggagaagggctatgaagtccacggcatcgtccgccgtgcttccatctccaacacggctcgtattgaccatctgattgagaagaacgcgattaccctgcacgacggagacctgaccgattcttctggtctgatccgtctggtgggcgaaattaaacctgatgaaatctacaatctggctgcgcagagccatgtccaggtttccttcgatgcgcctgaatattccggcgatgtagacgcgctgggcgttctgcgtgtgctggaggctgtccgcgtctgcgggctgacgaagacctgcaaggtgtatcaggcttctacctctgagctgtacggcaaagtcgaggagattccccagcgtgagaccaccccgttccatccctactctccgtacgctgtcgcaaagcagtatggtttctggatggtcaaggagtaccgcgatgcttacggcatgtttgccgtcaacggcatcctgttcaaccatgagtctgagcgccgcggcgagaacttcgtcacccgtaagatcacgctggcagccggtcgtatcgccgagggtttgcaggatcatctggaactgggcaacatggattctctgcgtgactggggctacgcgaaggactacgttgagtgcatgtggctgattatgcagcaggataagccggaagacttcgttattgctaccggtgtgcagcacactgtccgtgactttaccgagaaggctttcgcagccaatggcatcaccatccgctgggagggtactggcatcgacgagaagggctatgatgcagcgactggcaagatgctggtctgcgtgaatccgcagtggttccgccccaccgatgtggacaacctgtggggcgaccccaccaaggcaaagaccgtgctgggctggaatccgcagtccacgacttacgagcagctggtggagatcatggccaagcacgaccgtgagcgtgcaaagcgcgaaaaggcgctgaaggcagttctgtaatttggaaagaaggcaattctgttatgatggaaaagaatgcgaaaatttatgtcgcaggtcatcgcggcatggtgggctctgcaatcgtccgtgaactgcagcgtcagggttacaccaatatcatcacccgtacgcacaaggagctggatctgacccgtcaggatgctgtggaagcgttcttcgcacaggagaagccggagtatgtgttccttgctgctgctaaagtcggcggcatcgtggcaaatcaggaagctttggctgattttatgtatgacaatatgacgctggagatgaacgtcatccacgctgcatggaagaatggctgcaagaagctggagttcctcggctcctcctgcatctatccccgcatggcaccgcagcccatgaaggaaagctgcctgctgaccagtgagctggaaaagaccaacgaggcttatgcgctggcgaagatctccggtttgaagtactgcgagttcctgaaccgccagtacggcaccgactacatcagcgtcatgcccaccaacctctatggccccaacgacaactatcaccccacccacagccatgtggttccggcactgatccgccgcttccacgaggcaaaggtcaacggtgtagagagcgttacctgctggggcgatggctctccgctgcgtgagttcctgtatgtggatgatctggcaaacctgtgtgttttcctgatgaacaactactccggtaacgaaaccgtcaatgccggtaccggcaaggagctgaccatcaaggagctgaccgagctggtcgccaaggtcgtgggctacaccggcgagatcaagtgggataccaccaagcccaacggtactccccgcaagctgctggatgtgtctaaggctaccaatctgggctggacgtacaagacggaactggaagacggtctgcgcctgtcctacgaggacttcctgaacaacccgatgcgtgcagagcgctaaaaataaacaaacgatttgaaaaggtcgtgtgtttgtgcagaaccacgacttttttgatagaggcaggaggaaaattatgaatctggtgttattgtctggaggctccggtcagcgcctatggccgctttccaacgatatccgttccaagcagttcatcaagatcttccatcgcgaagacggcgagctggaatccatggtgcagcgcgtctaccgtcaaatcaaggcagtcgatacggatgcaacggtcaccattgccacctccaagtctcaggtctcggccatccacaatcagctgggtgagaatgttggcatcagcgtggaaccttgccgccgtgataccttcccggccatcgcactggcagctgcttacctgaaggacgtgcagggcgtcggcgagaaagaatccgttgtcgtctgcccggtagacccctatgcggagaatgattactttgagacattgaaagcgctgagcgaccgtgctgccgtcagcagtgcaaatctggtcctgatgggcattgaaccgacctatcccagcgagaaatacggctatatcatccccatcggcaaagagcaggtcagcaaggtgtccatgttcaaggaaaagcccacgcaggaagtggcaaaggactacattgcaaagggagcgctctggaacggcggcgtgtttgcgttcaagctgggctatgtgctgaaacgtgcccatgagctgatcgattttgtggactataaggacctgttcaacaaatatgacaccttgaacaaaatcagttttgactatgccgtggtggagcacgagccggagatcgaagtcatgcgtttcgcaggcacttggaaagatctcggcacatggaacaccctgaccgaagcaatggacagccaagcagtaggcgaggcgctgtttaatgagaagtgcgagaacgtccatgtggtcaatgagctggatgtgcctatcctctgcatgggtctgaaggacgtggtgatctctgccagcccggagggcattctggtctcagataaggagcagtccagttacatcaagcccttcgtcaacacgctcgaccaccgagtcatgttcgctgaaaaatcgtggggaagctttaaggtcatcgacatcgacaaggcttccatgaccatcaaagtaaccctgaatgcaggccaccagatgaactatcacagccaccagcaccgggacgaggtgtggacggtcattgcgggcgagggcaagaccgttgtggacggcatagagcagaacgtgaaggtaggcgacgtgatcaccatggccgcaggctgccgccatactgttattgccaaaacaaaactgaagctgatcgaagtacagctgggtgaagcaatcgacgtccacgacaagcagaagtttgcactggaagattgagatacaacaggagactgttgggaaggatacttttccctgatgcatacattcaactgctaaattgtggagtgtatatcatttatgcattaaagagccgctcatatagcgatagcaatcggaagaatttttccagcgcctgatttctctccccgcgcaatggggcagtccgctttgcgcgtgttgatgttttttcaacttgcatacagccatccgcttctctataataataggtaactgtgatcaaacgatcgcggaaagcgaaaaggagcgttggcttatgaagattgttttgctggaatcacttgctgtcagcgatgaagtcctccagaaatacacgcgcgatttggagcagaaagggcacaccttttgcgcgtattcccgctgtgaggatgaagcagccctttgcgaacgcgcgaaggatgcggatattctcctgctggcaaacatgccgctgaagggcagcatcatccgccaatgcacgcatctgcaattcattgatgtggcgttcacaggcgtggatcatgtggatttgcaggctgccgaggagatgcatgtggctgtcagcaatgcatccggctattccaatgagtccgttgcggaacttgcgctgggcatggcgattgactgcctgcgcaacgtggaggcggtctccgcgcgctgccgtcagcaggggacgaaggaggggcttgtcggccgtgaactcggcggaaaaacggtcggcatcatcggtttcggcaaaattggcaggcgtgcggcggaattgttccatgcctttggctgtccgattcttgcatatgacagcaatcccattgcgcaaatgccggattatgtgcagcaaacttcgctggatgaactgctgcgtcatgcggatgttgtctccctgcattgcccgcttgtggaaagcacgcgcggcctgatgaatgcggaacatatcagcatgatgaagcatcgtgcaatccttatcaacacttcgcgcggccccgttgttgattcgcaggcgctggccgatgcgctgaacagcggacatcttgctgcggcagcggcagatgtgtttgaaatggagccgcccatcccgcgggaacatccgctgctgaacgcgaagaactgcctggtgacgccgcacattgcttttgccagcgaggaatccatgcttcggcgggctgaaattgtttttgacaacctctatgctttcttgcatggcgaacagaaaaacgtgattttgccgcgctgaggaatcgcccatgaaaatttatgtgaattgtaatcagcctttccccggtatggggacgaaggcttgccccttttcaaccattcagcaggcggcagatgctgccatgccaggggatgaagtgctggttgctcccggcatttatcgggaggatgtacaccctctgcgcggcggcagcgaagaaaaccggattatctaccgcgccgaagtaccggggcagagtgtgattaccggggcagaagtgctgtcacagtgggaagaatgcggctgcggcatctggaaaaccgttatccccaacgacgtactgggtgaggataatccgtttgcggatttgatttcaggcgactggtactacgatgatgccgccgagcctgtacaccgggcagatatatatcttgacaaccgatccctgcgcgaggttttcacgcgggaggcgctgcttgccgctgaaccgtcgccgtatgcgtgggatacggaattctcccgcaatgtgtggatgagcgaacgcacagagacagaaacgaccctctatcttcatttgctctgcggttctcctgatggtcatcttttggagtacagcgcgcgccgccattgcttctaccccatgaaaacgggtatccattccatcacgctctccggctttgttttttgcaaggcagcgccgcaatgggcgccgccgacagcctatcaagagggcatggttggcccgcactgggcaaagggatgggtcattgaggactgcgagctgtatgaaagcaagtgcgtcggcatttcacttggcaaataccttcagcccaataacgaaaacaagtggcgccgcttcgggctgaaacatggaacgcagaatgaacgggacgccatctgccaggcgcagctggaaggctgggatcgggcgcatgttggcagccacgttatccgccgctgcaacattcacgactgtgggcaggcaggcattgccgggcatcttggctgcgttttctccgtgattgaggacaaccacattcaccatatcaacaacaagcaggagctgaacggcgccgaaattggcggcattaagctgcacgccgctattgacaccatcattgcgcataatcacattcaccattgtacacgcggattgtggctggactggcaggcgcagggaacgcgcgtgacgggcaatacatttcaccacaatcagccgctgtgcgggcgaaaaatccgcacacagctgagctttggcgaagacatttttgttgaggtcagccatggcccgaccctgattgaccacaaccttctgctcagcccaatggcagggcgcatcagcacacaagggattgcatttgcgcagaacttgattgccggttcgtacacctttgtcggtgcgggaacaaacaacgccgggctttctcgccctgattccgtgcgctacacgccttaccatgtgccgcatcagacggctgtggcgggcttcatgtctattctccacggcgatgcgcaattctggaataacctgttcgtgcaacagccgatttctgaggaatatacggcctacatcaacagcattggcaaaaatcagctgtgcgaaatgaacctcatcgtcggtacgctgccctatcagggcttcccgacagaaagtgaatacctgtcacaatttacaccagagcgcattgcaggcgaccgcggcatttactatggtcatctacccgtcaaggcgggcggaaacgtctatctgaacggcgcgcagacggcggattgtgatattggcagtgtcaccgtgccagcccctgtgacttttgcagtcacggaaaacggcttgacaacaaacctctatgattttcttccagcggtggatacgaagtgcgtctgcagcgatgtgctgggcagtgcctttgagcctgagcagcgctatgaagcgccggatggatcaccgctgacgcttgatacggatatgtgcggacagaagcatgttccctctccgctgccggggccgtttgccgcaccaatttcggaactgcatttttaa

SEQ ID NO: 219 - DNA, 7652 bp, unidentified
  source 1..7652: mol_type = unassigned DNA
ttatgcctgtatctcaccatcaaatatcatattccagctcatacggatatcatacatcagccttgtaagtgcaatactatcttccggtgtataaatagcactggcactatttcctgatgctatgcatctgcctgcttcacgaatctcatattcaaatccatttatatcaaccgggtactcgattgtttcaggttctttaccatccacctcaagtatcaaggtctttgcgtgttggaaatccggcaaaaatatacttccctttgttccctcaattctggcattacgttttaactcctgccctattgtctggactgattctgcaatacatccatcattatatgtcagtttgagacaactgtaatcatctgttccattctcattaatatgtacttttgtggtttctacattctgcggatcacaccctgtaacaatacgcaaaaatcccagattgtaaattcctatatccaacagagcacctccaccaagtgcagagttaaatttacgctcttttctggcacccgttgcaacaaatccatactgacaggaaatatgtttaatttctcctattgttccctgaagcaggatattacgcagacgattatacaatggcagaaaccatatccataatccctccatgataaaaagatgcttatcctttgccagcctgtacagctcctgtgcctgtttctcatttattgtaaatggcttttcacaaagtacatgcttaccatgctcaagacaaagtctgcaattctcataatgcagactattcggtgttgctacataaacagcctcaacatccggatcatttactaatgcttcataagaatcataatatcgtggaatgtcatactccctggcaaaagcttttgcactatccatgtgccgtgagcctactgctgcaagctgttcattttccttactcatctgatttatagttgatgcaaattttcttgcaatattacctgtagccagaattccccacttcatatcattttcctcctaataatataattgcatttcacattcatatcttgttaataattatacactattttaccgcatacaccaacacaaaatagcaagtcaaatttcatattatttactgtcacaactatcgtacgcttcattattgttatataaaattcttatattaatcaaaatttttcaacacaatctaaaaaaagctgccacacatcattcttagtgcggcagcccctttgtggtaatagggtaattaataatttatatttcacatgctacatcatatgctgatttaatagcatgatcaatattacttggacgttctccagcacaatcaccaatatagtgaagtggaagaggacaatcagaaagctctggaaggttctttcttgcaccaacagccattacaacaaagtctgaagcaatttcttctgttgatgtattgtcgtctattgttttttcaacaactacagaatcatctttgatttctgataattttgcagatgttactatttgaacattataatgctctaattccctcattagagtaggtaaaatagtgttactttcttcttttgcaatctgatccatcatttcaataattgtaaccttacatcctcgtgaagccagatattcagcggtttcaacacctacaagaccaccaccgattacagaaacattaccgaatacgatttctttcttggcaagtacatcccatgcacttgctacagttggaagatctttgccaggaacagggattattgcattgtttgctcctgttgccacaattacttcatcgaatgaattataatcctgtgatgtgaattcctgaccaagcctgaaagtaacatccaattcaggaagtacatttgtataataattaatgcttctcatcatttcttcttttcttggaggtacactagcaataagtaactgaccaccaatctgaagtgatttctcaaatatagttacatgatgtcctcttaatgcggaaacacgtgcagcttcaagtccagcaataccagcaccaataattgctatattctttgttgatgctgcaggagtaatctgacgagatccttcgtaaccattttcagcattaagtacacaacttaagaaagcacgattctgaatattatctgtacatcctttattacacatcatacatgttctgacattacagcaatgtccatctgcgcatttgtttgcaaagtcagggtctgtgagaagagaacgacctaatccaataatatcagcagaaccatttgtaataactgcttcagcagcttctggtgtaacgatacggcctactacagatacaggaatagatacaagctctttgatttttttagaataagaaaccataaatccgtatggctgtgttcccatggcagggattgtatcacccatatttccagtatggttagcctgtgcaacatgtaatgtgtcaacaccgcaagcttctaattctttagcaaaaatgcaagcttcatcaagtggaagaccaccttttcctctaaaactattttctccaagaggagtaactataggaagcttgtagtcgataaccatgtcaggtacaattgtttttaatctttttacgagtgttaatgcaaaacgtgtacgattagccaggtcaccgccatattcatcagttctatgatttaaaataggagagcagagagaaccaacaagacggtctccatgtacttcaatacaatcaacaccagcttcgtgtgctaagatagcacagttttccatatgctttattatttcatcaagttcttctgcagttacttcatttacaaagtgctgcatatcatggtgaagtttagctcttgcttcctgcattttgccctgatgaaacatatcgtttaaagctttaacattgtagtcaggatggaataactgaattccaagctttgcaccattttcatgacatgcgtcagcaagttttttgaagctttgaacctgctcaggtgaataaagctttggtgtaggagagaatgttggaagtggtgcaacatctccaattactatatatccgacaccgccttttgcgagacgctcgtaaaaacgaaaactttgttctccaattgaaccatctttttcctcatatcctgttgtaagtggtgggaacataatacggtttttaaactcaatatttccaacttttataggctctaataatttcattgttcatacttcctttcaaattgaatatactatttaagtggtgttaaaaactctaacattaatttgtctaattctgctcttgcaaaagcactggcaaaattgtggttagcgccttcaattgttttataattgcattttccattgtaaagtgactcatatttatggcatgttgcatcatctaccaaatcatctgcagttcctcttataaggaggactggtccgttgtatccttctgctgacgagaatggctcataattaaataaatcataattaaaagatgttgggaaagtgagtccttcaatatcggccttggtgatccccttagcttccatggcttcagcacgatccttacatccaaaccacattccagcacctggacacataagcatgagagcataaggattaacaataggagcggcagtagcagctgcgtatcctcccatactctgaccagataagataatcttatctggattggcaaaatcttgtgttttagtccagtttataatatcctcgatatcgtgtaggatacctgtaaaggtcatgtcctcgaattcaccatcactttcaccatttccgtataaatcaaaacggacactggcaaatccatgttcagctaataatctggctgtgtgcgtataaatacttttgtaaccgcttttattccctgtaaagccatgtacatttacaatagcaggaaatcttgtgccatcttctggaatgttaactattccgcgtaagatgtgtccatcacggtttgtgatttctacttgttttgtcaattttaaatacctcaatttctaattttattctgcagttgtagcatttcgcttgtcagctaaatcctgtaacatttcagctgttttctcttttgtaagagggtagataaattttaataccagaacagctaataaatatcctacaacatataaacctgtatatgttttccaaagatgtcctgagaatgcttcattctggacagcttcattaacctggaatccagcaattgcaagtgcaaaactactcatacttcctgatacagcattagcaagtttacggaagaatgtatatgccgaatatacaattccttcattacgttttcctgtctgaagttcttgataatcaattgcatcatttacaagtgcccaaactaatacttggaaaccacttactccaagatagcagattccgttgatgataataaagagcataggattttcaagtgggaagaagaataaaatagcataaacaacaactgagaaagttgcactgtacataatccattctttctttccaaatttcttagcaacaaattttgtgcctacgaatgcaataagtgaccagagtacacttaacatacctgaaaatgccatgatggcaacatttccaaaataatcgcggaataaataagtatttaatccgttaaccatacctgctccaacaataccgataaagcttgataacataactccgagtaatgctttgtttttagtaatatctttaattacctggaagtagttaaacttttcttttttctcaacaactggctctctaataatacgctctttacaccaatgagatgtaaacataagacagattaatccaaaaactgcacagattgctgacataataaggaaatggctaggtactggctggttatctttatataagaataatggtccaacaataacgataactgtcataaaaattgtaccgccaagacttctgaaacgagaaaggtcagtacgttggttaacatcatcagtcattacacttgaaagactaccaaatggaacgttgacacatgtgtacataatttcgtaaacaatatatgtaatgaacatataagcaatacgtgcaccataagcgaaattgtttacgttaacaaatcctaatatacagagtactgcagttggaaaagcaaagaatttaatccaaggaataaattttccttttcctttgtttttgtggctatcaacaagtgcaccaattaaagggtcatttatagcatcccaaaactttgtaacaagcataaggattcctacgtgtactggattaacttttaataccagtgtataaaaaatagcaagatacatggcacggaactgctcagtacagcaacatcccaaatcgccaagagtgtaaccaattttgtccttcatggaaaaaggtcttgtttctttcatgataatttacctccaaacatttatattgttttagtagctacaatcttattatattggggttatgctgatatccatatacaaatattgcttgcaaactacgaaaaattgatatattgtatattttgacgaaatgaacaaaaaatataataggaaagtgtacaaaatagacatatgaaaaagcaaggctacaaaatggaatatttgaaaatattggatagtgcccagcgaagctttgggcaaaaggagagctatacaattgtatttatagctggtgggatagggtatatgcaccaggaggacgataatattgtatgtactatggaggatttgatatttattaagccaggtaataaagtaaagcttgaatatcgtaaaaataagtatcctcttaaagtttatgttctttatataggtggagaacttttaaggaaattgtcagatgaagaaacaagacttgatgaagcgtttgattttgttccgtatcaagttaagattgttcattctgagactgaatcggctatgcttataaagaatatatcaaaaaagctctattcgatgaataatgagccgcctaaatttgcccactcattatacgagaaaagcctattaactatgattcttgtacttgcacttcgctcatctgttcaggatgatgtacagatcaagacgaagaagaaaaaacacgttgtaatggatgatatttttatttatatcagagaacatttgacagaagatatctcgttggagcgcttggaaaatgaattttatataagccgttatcatatagtaagagagtttaaaaaattgacaggtgagacacctcattcatacattgtaaagagcaaacttgatttatgccgccattatatagagcaggggaaaagtattcatgaggtatatgagcttggtggatttggagggtataatcatttttttagagcatttaagaaagaatatggtgttactccaatgcaatattacaaagatttaaagattgacaggaatgaaaagtaatgattgtgtttgtagaataaagcaaataaggggctgtcgctttaacgatgcgacagccacagcatttttaaaattttcaatttgatgtgaatactgttcattcataagtgatgaatgaatcataaaatccgcagttgcaatattatttgcaatcggaatatcatacacctgtgcaattctaataagagctttaacatctacatacatccaatctgtcatttttatctatcatgcaaaaaattgatatacagttcttgacttgaatattttgtatgctggcaatatacaacttggaaattctggattattacatgaattaggatagaattgagtttcaaaacatacaccgcttcgcttattatatatagcaccatcttttcctatttgaccatttaaataatttcctgtataaacctgtaatccacataaatcagaataaacatccatcctgattccactgtctgccccatacagttttgcaacttttctcgtctttctgtcatttggaaatatataattatgatcataaccacctgcaatttttatctgtgaattatctgcatctatatcttttcctatctgcttacttttacgaaaatcaaatggtgtatcactaatatctataatttctcctgtcggaatcatatcattgccaagctcaagcatctgtcccgaatatatttccatatagtgtttaaggattgtaccagaattatgcccatctaaattaaaataactatgatttgtaggatttacaaccgtagccatatcactaagcatttcataatcaattataaattcatttttatctgtgagtgtatatctgattttctgctctaaatttcccggaaatccttgctccatattaggactatatcgttccatttccacaaactcacatgcatcagtctttccatttcttacactgtaaagtttatgatgtgatctattaaacccactgtgaagattattttgattatcatttttatccaacagatactttatatcttctattgttacttctgcccctgcaatacggttagcatttctgcctatatatgcaccaaaacctgtattctgttcataataatccatcagattatcataaccaagtacaacatctcgttttcttccatacttatcaagtacataaatggataataccaatgctccaaaatcagataattccacactcatacctttattgtttaccaagatatatctatgtgctttttttccttctttcgtcacaccaaaaactgtattccacat

SEQ ID NO: 220 - DNA, 12954 bp, unidentified
  source 1..12954: mol_type = unassigned DNA
ttatttatccttttcacggatttccacgcgacgaatctttccactgatggtctttggaagttcttctacaaactctatgacacgtgggtacttgtacggagcagtcacacgcttcacatgatcttgtaactcctttaccaactcaggtccttccttacccttaaaagttttagaaaggacaatcgtcgcctttaccacctgaccacggatttcatcaggcacaccggtaatggcacattccacaacagccggatgagtcatcaaagcactttccacctcgaacgggcctatacgataacccgaactcttgatcacatcatcagcacgacctacaaaccaaaaataaccatcctcatcacgccaagccacatcacctgtataataaataccatcatgccaagcatcttccgttaattccgaagcacgataatattctttgaacaatcccaatggtttacccctatctgtacgaataacaatctgaccttgttctccatcttcagcagaacgcccgtcgtgagtcaacaaatctatatcatattgaggattaggtacccccatacttccaggtttaggctccatccagggaaaagtacctaaagtcaacgtggtttccgtttgtccaaaaccttccatcagacgaatacctgtgattttcttgaacgtttcatatacagaatagttcaaagcctctcccgccgtagtacagtattccaaagaagaaagatcatatttactaatgtcctccttaattaaaaaacgataaatagtgggaggagcacataaagaagtgatatgataatcctgaatctttccaagaatatctgccggtgtaaatttctcatgatcatacacaaaaatattggctcctgctatcatctgtccataaagttttccccaaacagctttcccccaacctgtatcggcaatggtaagatgaagactgtcacgatgcaaattatgccagaaactggcagttacaatatgtcccaaaggatatgtaaaatcatgtgccaccatcttaggttctcctgtagtacccgaagtgaaatacatcaatgaagtatcttcattcgtattaggatgttccggtttaacaaaaggagtagccttctcaatacctttatgaaaatcttcaaaaccctccggaatatccggtcctacactgaccaacttttttactgaaggacaatcgggcatggcatctataatatgctttgttatcacatcttctcctgcagctacaatcatcttgatatcagcagcattacaacgatacacgatatcctttttcgtcaacagatgagtcgcaggaataaccacagctcctaatttatgcaaggcaataatagagtaccagaactcataacgacgctttaaaataagcatcaccatatcgccatgaccaataccaaggctctgaaaataagaagcagtcatatccgtatactttttcaagtcagcataagtatattgtatatgctcccctttatcattagtccataacaatgctttcttatcgggttcttcggcagcccaagcatctactatatcataaccaaaattaaaattttcagggattttaatctttaaattctttataaagtcctcttgtgaggtaaatgtggtctgttctaagaatttttctaccataatcttattcaattaaaaattgagaactaaaaattagaaatattatgcggtcaatgacaacacagtctttttaatctcaatttattataatattactgccaagaatttcacagtcttatcgtccaatgccagcataccatgtggaatagaagaatcaaaataaagactgtcacctggattcaagatcaattcttttccatttatattaagtaacattcttccttcaataaccaaattgaattcttgtccctcatgtgagttaaaatgaatcggagtattttccggtttcggttctacagttacaataaaaggatcagccttacgcccacgaaaaccggaagccaatgactgatatttatacgccttggtacgctctaccgacactcctgaaccacaacgagtcagaaaataagaactcatcttaggttcttcaccaaacattaatacatccaatgcaataccgtatttacgggctattttctgtaaagcactgacagaaatatctttctccccgctttccatacccaaatactcttccactgaaagctggcaacttttagccacttcatcaggagtcagttccagaacgtctcttaatccctggagacgctcagctatttgttttatctggtcactcataatcttattgttttatgcctcaaagataatgaagatttgagaattcctagcaaagtttcattaagtttcgaagaaaactatctaacagacaataaaattgcacaaacacgcttacaatgagcacaaacaaaccttttacagaaagtgatcattcaaatactttcatttgaaactataaaataatctttgtcccataacctttcttataatcatatttatacttactttgcagaaaaatgaaatagaatgaattatacgaatgaacaaatcagacgccaagaccgtctgttagaaaaagaaaaagctatcagcttattgaaaaacggagaatacggagttttgtccatgcaagatgaagaaaacggcgcttatggagttcctatcaattatgtatggaacaagaaaaattccatttacattcactgtgctcccgaaggacgaaaattacattgtatcaaacgctgcaacaccgtttctttctgtattataggaaagactcatatcatatccaatcaattcacaactgaatatgagagtattatattgaaatgtcgggcatacattggcttaaatgaagaagaacgaataaacgctttacatttattaatagaaaaatactctccaaacgacaaagtaattggtaaccaatatgcccaaaaatcttttcacagaacagaaattatccgactagatatagaagaggcaagcggaaaatgcaaacatatacctatgaaataagtattaaaagttcattgaactatcctctaatattctcaactattattcccccgagaaaagagagttaaaaggagataattgagaaagacgaaaagaaacacgatacaacttttataaaggatcattgagaaaattacatgctataaaaacattattccggcaaaacaatattaccggaataaattttctttatgttatcctttttcagattaggtatttggaaaagcaaccatcttaacaaccataaaagttgtacacattataaattatttctcattctttctacaaaatcatgaataatggaatacaaaatctccaaagaattctcctcataacaaagagtttccaaaggacaccaacctgtccggttcctattctgaatacgaggaactacctgcatacaatctagctttatattcgcacgccgcaataaaaccaatgcaggttcactgataatatctgtataaacttcctgtactctacctaataccatcaaaacagcagcagcttttcctatcaccttgtcagcaatctgagccccacgcagaaaagccggatccgtattcaacaaatcatacaaatcagttattccacgctgtgtaaaagtgctgatttccttattctttattacacaagaataattaccttcatgcaacagtttgattaatttatccattttttatttcattcaaataacacgatgcatttcgtgtccttccacataaatggcactgaacggacgtgccggacaaagattttcacaagcgccacaaccgatgcaacgttctgtattcacaaccggtattttaggtgaactttcatcattctcatctttaggtatcatttgaatagcaccagtaggacaatgacgagcacaatttccacaacttaccttatccgtattcactatacaattttgagcaatccacacggcatgccctatttgaatagccgacttttcagccaaactagtcaaatgaatggcatcagtaggacatacttctgcacatttcgcacattcggggcgacaatatccacgttcataggacatctcaggctgcatcaaccgcttcagatcacccgatggacgcaatacctgattagggcacaccgacacacaaagctgacaagccgtacaatgctgtgcaaaatgacgaagacctctcgctcctgcaggaacaatagaagtggcacgtttaggattctttttatcaataagaggcgccaatcctccatccactttcttttcctgcgctttcattacggcacttgtagcaagtaaagcagaaaccgtaaaaaaatttcgccgcgacgtattcaccttttctgaatttgaagacgattgagaagctgactgacctgtttcttctcttctcaaaacctgctttttctgaattattgctccagatacatactttatcgcatcctgacgacatttacctaaacaatccatacaagcaacacaacgggaataatcaatctcatgtgctttgggattaatgcaggaagacttgcaattacgagcacaaagtccgcaaccattacatttagacgtatcaataaccggtttaaaataagaatatctagataagagtcccaatactgtacccaccggacaaatggtattgcaataagttcttcctccacgccatgccaaaataaaaagcactatcacagtacccactgcaactacaaaagtagaaagacctttcatccaaacatctaccgaataaaaagcataactgtctacacgctccgcccatagggcaagtacattgttcccccactgatacaaaggtgtcagcaggttagaaatgatacggccgtatgcactgtaaggagcaatcaatgccgtcaatgaaactacccctgctaccaaagcgacgataaacaccgccaataccccatagcgcaaccacgacaaagcaggcgagtagtggaaacgattcttctttacccttcccgaaacccaggaaataatatcttgaaacacacctaacgggcaaacaaccgaacaatagacacgccccaaaagcaacgtcaacaaaacaagggctatcatcacccccacattcagtgccagcacggcaggaagaaactgtattttcgccatccagccaaaccaactatgcacagttcctgtaaaatccagaaacagcaacgtgatcattgtaaagaacaaaagggcggcgacgagtcttattttacgtaacataagcattcgttattttatcatgtttatccattccattataaagtctcttgtttcaactgctccacatatgcgtctatacgatgcagttctttgggaatatcaatactttgagggcaatgcgggttacactggttacatccggtacaatgacttgcctgccgcagtttgggcacactacggtcataacctatcaggaaagcacgccgtgcacggcggtaattctcatcctgactgcttttaggcacatttccttcgttgacacatttattataatgcaccagaatcgccggaatatccaagccgtaaggacagggcatacaatatttgcagtcattgcaaggaatcgtagggaacttcagcatcaattgggctgtttcttccaagaactctttttcctcctcattcaaaggttctaagggagaataagtccgaaggttatcctgcaaatgttccatataagtcattccactcagcacacacaacacattgggatacgtaccggcaaaacggaatgcccacgatgccacactgttctccggacgacgctgcttcaagcgcgccaccagatggtcgttcagtttagacaaacgtcctcctaacagaggctccataatcacagctggaattccacgcttggccaactctccatacaaatattccgcattaacatttcgacccgaagcatggcgccaatctacatagttcatctgaatttgcacaaaatcccatttcacatccagcgacagcaaataatcaaacacttccaccgatccgtgaaatgaccatcccaaattacgaatacggccttcttcacgctcttttagtaaaaagtcaagaactccattgtcaatataacggtcatggaaagttttgatcccttcccctccacctacagaatgaagcaaataataatccagataatccgtctgcaattctttcatcgactgatggtacatcttgatggaattctcacgagtataattttgaaaattagacatctttgtcgcaatcaacagtctttcacgaggatgacgtttcaaagccacaccagtggccctttcagaaaatccctggcaataaacaggagatgtatcgaaataattcactccgtgagcgatagcataatccaccagctcattcaccgcatcctggtctatcacatttccatcactgtccggcgctggtttcaacggccagcgcatacatccatatcctaaaagtgaaacatgttctccctttggagaagtacgataagtcattttatcaacaggcacttcgcctaaaatagaagcctcagacgcatccgacttctcgccggatgcacaaccatacattgccaccgtagatgcaactgtactaacacccacaatttttagaaattctctacggttcatttcctttttgtctcttttgtccatagtcttttacttaaccttcctttatttactgtaaaccaccactatagcctgatcatcagttaatgcaaagttaattagaattcatgaaattccttgcaacacaaccttaataatcaaaacaactttaattacagaaagcaaatcactttttaattcacatagatcactattgaaaataattatttaaacaactgtatcatagggcggcctatccaaacctgcggttgtttcaagccaaaaataaaagcaactgtagaagcacaatcaaactgcatcatactttcatcaaaaattcctcctttttttacattctttccagcaataataaatggagtttccatttcttgcatcgtttttccaccatgccccttatttattcctccatgatcggctgtaacaataataatactattatcataaatacctgcctccttgatagcatctactatccgacctacatatccgtctaattctttcaattttgcataataagccggagtatcatgtccatccacatgacctacatggtcaggattatcaaaacaaattgcagtcaagaccggcttcttttctgtaatatacttacatgccatctcacatagagcagcgggatatagattatagtcaggagcctgcacatgataattcaaagccaaagtatctactagatatttaataccatcccactcatacaacactcctatttcagcatcaggaacagctttacgaagttcactgaaaatagttggaaatatatgatgctcatttactacacgtgaaggaagttcgggagttttagacccccattctgtatatccatggagttcaggtcctgcccccataaacatagaagcccagtttactgcacttgaagaaggaagcacactacgttttttcaaagtatagcaacctgcatccattaaagttttaacatttggcatctcagccttttccacactataagccccccaaccgtcaaggccaatcaagaacacatggtcggctttccaactctgagcaaagcaagaaaaagtaaagaatgctatcaatatagcaaataaacgattttttttcatagcaacttatatttttcagttatacatattatcttaacaattctccacactatgaaatgattggatactctccatcggataaacttccacttacacacaatatttcatcaagaaaggtggaaacgatatctaatcccaatattgggagatatccctataatatgaaaaattaaaagatgagcaagcgctggtttcctttctccaaacgcctgctcagttcaaatagagacataaaagctgatttccatcacagctccatcatacctattatctatttcagacaagccttcattgctttaatgatcgctgagtcaaacccttcgtgatccaattcattaatacccttgatagtcataccaccgggcgtacacaccttatctatttccacactgggatgagtatcattattcaatatcaaggaagcagcccctttcacagattgagcaaccattttctgtgcatctttcggataaattcctaattcaatacctgcctgcatagctgcctgaatatatttcaaaacatatgcgataccacatgaagtcaaagccgtagtagcagccatctgactttcaggaataagaatagccaatcctaattcattaaagatatccagcatcagttgttcttgttccttactggcgttacgactggatatcaaggtcatactttccagctgagatatagcagtattgggaatcagacggaatatagtctgttccgggcctacactcttcaccaattgctcaaaggttacaccgcctgcgatagaaactaatacttgttgaggagtcaaatgaatcacactcaatacctgatctatcaaccacggttttacagccagaataacgatatcggcatcctttatcgctttcgggttttccgttgttacattaatctccggataatccgcctgtagagtttccagacttccgctgaacggatcggctactgttacatcactcgcaggaatgatagtgccttgggcaaggccgcgagcaatagcccctcccatatttcccgcaccaataattgctactttcatattattaaagattaagtctatagctacaaagataagggaaaaaaaggagaagaacgtattatgaaaagctaaaaataaaattactttgaagaagattaaatcaaaaagcctcgccggaaccgaaatgtttcctgacgagacctcattttctttcgtagattattatcccttttgaatctccagcttataccaacactttacgaaagcgttcaagaaattcatcagcctctgccatagtaaggcacaaaggcggaagcagacgaatcacattagtaccactgactccggtaaatactttctgttcgaacagcaaacgctgacgcaattccttaatcggttcttcaaattccataccgatcatcaaaccttcgccacgcacctctttaatctgtgagaattgtttcaattctttcagcagatgagcacctaccttggcagcattctctaccagattctcacctttcataacatcaagcaccgcgatagcagcagcacaagctaggtggttaccaccaaaagtggttcccaattgtccatataccggcttgaatttcggactgatcaggacaccagccatcggaaagccattaccaatcccctttgctaccgtaattatatcgggacggatacctgcatgttggtgagcaaaaaatttaccgctacgcccgtagccggattgtatttcatccaaaacaagggctgcatccacttcttcgcaagccttactcagttctttcaagaattttacttccggaacctgaataccgcctactccttgaataccttcaataatcaccgcacagacatctccttttgccaattccgctttagctgcttctatatcgttcaaaggcagataagtcacatgcccattgtcattgattggggctataattttcggattgtgggttacctccactgccagtgaagtacgtccgtgaaatgctttgcaaaaagaaagcacacggttgcgaccattgtaaaaagaagccagtttcaacgcattttcattagcttcagctccactgtttatcaaaaacaattgataatcatcataacccgaaagtttccctaaacggtctgccacttcctgctgtagcttgttaaccaccgaattggaataaaatcccaactgtgcaacctgcttgcttatcatttccacataatatggatgtgcgtgaccgatagaaataaccgcatgaccaccatacaaatcaaggtattccgtaccttggtcatcccatacatgacaaccttttcctttgacaatatttatgtcaaaaagaggatatacatcaaataatttcataaactcttctttattaaaaagcagacggtttcaacctcaaccctacggtttcttccaaattgaacatgagattcatattatgaaccgcttgtccgcttgcccccttcaacaagttgtcaatgcaagagataaccagcagcttatcgccatttttctccaaatgaatcaaacacttgttggtgttcaccacctgcttcaaatctatatttttgtctacaatatgaacgaaagaatcctcggcataatagtcttgatacatcttcaccagttcttccagttccaccttgcatttgactaccagagtagcaaagataccacgcgggaaatcaccccggtaaggaataaaatctatttcagcattaaagctgttttgcaactgtttcaatgattgcttgatttcgggaacatgctgatgagaaaacggtttataaatgctcatattattattacgccaactgaaatgactggtagcacccggtttcacccctgcccctgtacttccggtaatggcatttaccattacatcctcgttcagtaacagatgtttggctaacggcaataaacccaattgaatacaagtggcaaaacatcccggattggccacgtgcttgctatggcagatagcacgacggttcagttccggcaaaccataaatgaagtcatggtcatcactcttgatacggtagtccatactgaggtctatgattttcaaatcctcgggtacattgtgactatccataaacttctttgtatctccatgagccgtacagaagaacaatacatcaatctcatccagaggaagttcgtctgtaaaaaccaaatccgtttcaccatagagtccctcatgtacgtcggtaatcttattgccagcgttactgctgctatttataaactttatgtctacatcagggtgattaatcagcagacgaatcaattcgcccgccgtataacctgccccaccgataattcctgctttaatcatacttattaaatttcttcgtccttgtggttattataataaacacgcaaaggtgtagaagtcactttgataaagcctttagcatcttctgctgtccatcccttctgcatttcaccatattcaccaaatttggtcttcaccagatcgtcttttgattcaacacccacagtagagaatgaaagcggacggagttccaagatagctgtaccatttacattacgctgagactcctgcaacattgcctcaatatcgcgcattaccggttccagatactgactttcatgcaagaacattccgtaccaattggcaacctggtctttccaatattgctgccacttgctcaacgtatatttttcaaggaaacgatgggcaccgataatcagcataggagcagcagcctcgaatcctacacgccctttgataccgataatggtatccccaacgtgcatgtcgcggccgataccgtagggcgcaccgatctcctccactttttgaatagccttgataggatcatcaaacttctcgtcattaacagctttcagttcacctttttcaaatgtaagacgaagttgttcgcttccttccttggtcacctgttttaaataagcactttcgggcaaaccctgcgcagagtccaatatttccccaccgcagatagaagtcccccaaagacctacattataagaatatttcaattttgtaaagtcagcggcaaaaccatgttcgttcaaataatcgatttcctgctgacggcttaatgccatgtcacgggtcaatgtaatgatctcaactcccggagccagtaccaaaaaagtcatatcgaaacgaatctggtcattacccgcaccagtcgagccgtgtgcgatagcgtccgcacctatttcattagcataacgcgctatagccaacccttggaagatacgttcagaacttacagaaataggataagtaccattacggagcacattaccgaataccatatatttcaagctcttctcatagtattcctgggtcacatccaatgtcacatacttcacagcacccagtttgtaagcgttctcttcgttctgcttcagctgctcctcactgaaaccacccgtgtttgcacaagctgcatacacttcataccctttttccttagccagatacattacagtgaaagaggtatcaagccccccgctgaatgccactactacttttttcttcttttcttccataatgatattattttaattgagaattaaaaattgaaaactgagaaataagtacatgaatgcgcagccatcttttaattcttaatttttaattcttaatttttaatttattaaatagtgtcttcttcgtgcaaagccggatcgtaaagcatggctgtacaaatacagaacttacggttcttcgccactaatatatcgtgattgatacagccttcacaacctttccaaaaggcctcatcatcagtcagttcattgaaagttacaggaacatatcccagttctgtattcattttcattaccgccgcgccactggtcagactgaatatctttgctttaggccatcgtagacgtgccaatcggaacgaagccgcctttatacgcttggccaaacctattccacgataattaggatgcacaatcaatcccgaggttgctacatattgcttgtttccccatgactcaatataggtaaatcctgcaaaatcatctccacataaagcaataatcgcctttccttctttcatctttgtagtcacatattcatgtgtgcgttctgcaatgcctgttccgcgtaccttagcagcttctctaatagtatctaaaattttatcaacgtaaacttcatgtgaggcatctgccaccatcacatccacttgtttagcatccat

SEQ ID NO: 221 - DNA, 5631 bp, unidentified
  source 1..5631: mol_type = unassigned DNA
gtcgcggacgttctccccgcggccgtacacgggcagcggccttcggtggcggatattgttgatgaacagcgggatgagcttctccgggaattggtagggcccgtagttgttcgaacagttggtcaccagcgtcggcatcccgtacgtgtcgtggtaagctcgcacgaagtggtcggacgaggctttcgaagccgagtaggggctgtgcggcgcgtacttcgtctcttcggtgaagaactcctcgccgaagggcccgccgccgctctccccgcccgcagcatctccctcgggacgggtcagctccagcgccccgtacacctcgtcggtggagatgtggtagaacaatttgccctcccacttgccgtcccagtattcccgtgccgcctcgagcagcgagagcgtgcccaggacgttcgtccgcgcgaaggtgaacggatccctgatcgagcggtcgacatggctttcggccgcaaggtggatgaccccgtcgatgtcatactgcccgaacagcgcccgcagcatatccaggtcgcagatgtcacccttctcgaacacgtagttcggggaatcctcgatgtcccgcaggttggcaaggttccccgcataggtcagtttgtccaggttcacgatccggtaatccgggtatttcgtcacgaacaggcgtactacgtgcgagccgataaagcccgcgccgcccgtaatcaggatggtgcgttttggtgccattatctcgtatcttatatttgattttctcgttcggaataagtttccaccatttcagcaaaccgggaagaccaggccggccagctcaatttttctttatataatctccttgcattttcagacaatccggaaaattcctgcttgcatatgcactcctttatcttgttggcaaaatcggctcccgtacctgtcaggggaagcctgtatccgttcacgccgttcacgacataattagctattccgccggtatcggtcgtgaaaacggggattccgtaagccgcagcctcgcaatacacgatggcagagcattccgcgcgtgtcggcaacaacagaatatcggcttgctgccaaagttgcacatactggtgatattgttcgggaatattcttattcaaaaagccgatgtttttaacatgcggattatcccggtgtttttgaggcaggtctttaatacctgcgacatacagcgtcgcacggataccggcggcattaagctgcatgaccgtatctacagcaatctcgccgcctttccgctcccagtcgaccccggaaaacagtatgcggagcaaataccccccccctgcaaactcctgtttaacaggagtttgtatcttattttcatcgatattggcaccaaactctatcacattcagtttagacgccggaatgtggtaataatcccgggccgagttactcgcccattcagaagaatgaataattaccgaagccttatccaaagcccgctgttcgatggagtttccatatctgacgctgcatgcggcgaggttcggccaataatagtcgaccatcagttcaaaggtggcatcgctgaggtagaataccggtttatccgtttcgatccgggacagcacctgggagcctccgctgaaaaacagcatgtcgcatcctgcaatcagttttttatcgatgctgtgcgcttccatccgggcaatcagcgggatgtgggagtagacgatattctttcccgtaagttttgcatacaaatggtacagtcccaggataaacttggaaaaaaacggggtggtataggggatccatcgcaccgtatatccggcctgttcgatcgactcccggatcttgaaaattgtgccgctccatgccttccggtcgatgaaggggtttgccttactgacatagccaaaagttattttcgccatatctattgtcgttgaagtcgtttcatgcagtagatcaaggcctccctccagtgcgggatatccatttggaaggtctccttgaagcgggtcttgtccagcaccgagtaggccgggcgggtggccttcgtggggtattccgacgtgtggcaggggatgatacggcacgtgtcatggcccgcggccgcggcgatttccaccgcgaagtcgtaccacgagcacacgccctcgtcggtgaagtggtacaccccctcgttgcccgtgtagcgccccgcctcgatcagggagaagatcgcaagcgccaggtctccggcgtaggtcggagtgcccacctggtcgaagaccacgcgcagcgtctcacgctccgaggtcagccgcagcatcgtcttcagaaagttgttcccgtactccgaatagagccacgccgtgcgcaggatcaggtagcggcaccccgaggccttcacggcctcctcgcccgccagcttcgtacgcccgtaggcccccagcggcgaggtcgccatatcctccgtgtagggcctgtgccccgtgccgtcgaagacgtagtccgtcgagacgtggatcagcgtcgcacccgtctccttggccgctgccgcgaggtatgccgcggccttgtggttgagcaggtcggctgtcggttcatcctcctcggcacgctccacgttcgtgtaggccgcacagttgacgatcacgtcgatacgctgttccttgaccgtttgaagcaccgccccggcgtcggtgatgtccagctccgcgacgtcggtggccaggtagttgttgggcgacacgctcccaagctgccgcagcgagctccccaactgtccgttggcgcccgtaatcaggatattaagcatagtagtccgtattatagtcgaacagttccgcggcctcttccagccgcgggtggcaactgtccttgggcgagaggacgacatcccccggtgccaggtgccagtcgatacccagcgcggggtcgtcccacgcgatggcgccctccgattcgggggcatagaggttgtcgcacttgtattggaatacagcctcgtcgctcagcaccgagaagccgtgcgcgaagccccgcggcacgaagaactgccgtttgttgtcccccgagagctccacggagacgtgccgcccgaacgtgggcgagccccggcggatgtccacagcgacgtccagcacgcggccccggacaacgcgcaccagtttcgactgtgcatgcgccccccgctggaagtgaagcccgcgaagaacgccgtacttcgacatcgactcgttgtcctgcacgaaccgcacggggcgtacgagcctgccgaaggactgctcagaatagctctcgaagaaataaccccgagcgtccccgaacacctcgggttcgaggaggacaactccttctatttcggtagggatgactttcatggctttagcgtcggttttcgtcggtgagtttcaacaggtactgcccgtactggttcctgagcatcggctgcgccaactcccggagcttagcggccgtgatccagccgttatggtaggcgatgccctccaggcaggcgatcttgaggccctggcgtttctcgatgacctccacgaagatcgaggcctcggccagagagtcgtgcgtacccgtgtccagccacgcgaagccgcgctgaagcgtctgcaccttcagctctccgcgctgcaggaacgactggttcacgctcgtgatctcaagctccccgcgcgccgagggccggatacccttggccacatccacgaccttgttcggatagaagtacaggcccacgaccgcgtagttcgatttcgggtgttccggtttctcctcgatcgacaggcagttgcccgccgcatcgaactccgccacgccgtaacgctggggatcgtcgacccagtagccgaagaccgtagccttgccatcctcctcggccgtgcggactgcctcgcgaagaaggcccgtgaagcccgagccgtggaagatgttgtcgcccagaaccagacacacggagtcattgccgatgaaatccgcgccgatcaggaaagcctgggcaagaccgtccggggacggctgctcggcatacgtgatacgaaccccgtagtcggagccgtcgcccagcaaacggcggaaaccgcccagatcctctggcgtagagatcaggaggatgtcgcggatgccagccagcagcaaggccgataaggggtagtagaccatcggcttgtcgtaaacaggcaacagctgcttgctgacgcccttcgtgatcgggtacaaacgcgttccgctgccgcctgccaagatgatgcctttcataggtttctgaaattaatatgcgttctcatcctgccgcagggcattccataccgtcatgaagatgatgcggatgtcgagcagcagcgaccagttttccaggtaccagatgtcgcggcgtacgcggccttccatctggctcagggagtgggtctcgccgcggtatcccgtcacctgggcccatcccgtgatgccgggtttgatcaggtggcgaaccatatatttattgatgagtttcgagtattgctcggtgtgctggagcatgtgcggccgcggccccacgatggacatgtcgcccctgagcacgttgatgaactggggcagctcgtcgatgctcgaccggcgcaggaaatccccgaaccgggtcttgcgcgggtcgtccctggtcgcctgcaccctgtcggcatcggcgttgacgcgcatcgaacggaatttaatgcacctgaacgtctggccgttctccccgctgcgctcctgcaggaagagcaccgggccccgcgaggtcagtttggtgcctatggccacgaaaatatagatgaaggggaacagcgtgcagaggaacaggctcgatacggtgacgtcgaatgcccgtttgataaaccggttcgacgcctgccgcaacggctcctcgcggatgtagaggatcggtacgttgcccagcagttcgaggttcatcgtgcgcttcatgtagttgcgcaggttgggcacgtagaagaagcggacgaagttgttttcgcagaaatccatgatcgggaatatctcttccgcgtaacgatccgtcgagaggcagcagtacacttcgtttaccgggtgtgcctccagccacggcagcgcctcgtccacgctacccaggcagggggtgttgtccggcagggtgtggtcgtcgtggttgctgaaatagccgagcacgcggtaacccgtgctggtgttgtcgaccatttcgtggtatacctccaccgcattgtccttgcttccgacgatgatcacgcggcgggcgttgcggccgtgtccgcgcgtgaccttgaccacgatgcggcaggtgtagcgccacagcatcagcagaatggtgagcacgatgtagaacgtccccatcaggtgcaccggcagcagcccgtagctccatacggtctggatgagcacgaagaaccccaggtggcagagtacgacgtagaatacgcggcggatgatctcctcgtaggggacgatccgcgaggagaggatcacgccgaaccacgagaggcccgggatgaagcagatgttgagacaggcgaatatctccagcgagcgggcgatacaggccggttgcggatacagcgtgagcgccagtatccaggacaggttcagtaagaataggtctccgatgatgacgggaagctttatgagcaaagactcccgcatgacttgtttcat

SEQ ID NO: 222 - DNA, 7692 bp, unidentified
  source 1..7692: mol_type = unassigned DNA
ttatatttttccccataatttttccagcatctcatctactgctgcttcaactcgctcatctgcatcatctctcaatgacaatgctagagaaagttcatctaccttatcttcttttgataataaatgtggattatatctccacatttcaactgccatttgattttctgaatcaaataaattatttgtcataacatccttccaacgcgaaatactatctattgcaaaacatttgatttgtggaacatttagcattgtataatgagctaatgcgaaatatccgctttctaacaattcagaagtcacacaagttttaggtatatatacagttttttttactggattaagtaatttctgctgagttctctcaaataactctttgggtgagctatcagaatgtataattttctgcttacctgttttcatagtctgtattaatcctaatttttcaagctgacgagaagcccttgaaatagatgtaggtgtgaatccaagttcttttgctacctgactcgttgttatttcaacagtcccattatatataaagtacaacaacagaacctgagctgaaggaagtatttcctcattaggaaatgtttctgcattgcaacgttcctgtaaatataacgccataaaaggcagatatatctgtttattatttacaacaaatggaatcttctcccgaagcaaatattccttctgacgatatgtgatttcgtccagaatcataacaacaggtaaattcactatgctttttatctttgaaatatgtttttttaatgtttcaatctgctctagttccgttttaggatatataaaaacagctttttgtctatctaatagtacattacgcagaacatatcttgttccaataaaattgggtatatgtttaatgtcatcatttatataggtcagtttcaatcctagaactttttggagatattccatatatatgcctccattcataacttattttatgtattataacttaaataaagttataatacaatatttgagttataattttaaatgtttaaaaaaattattactgatattggggattttacaatatagatgtgaacagcgtaaggttttagatttccttattgaaccagtaacagatgataaaccacagttgcatgatgtatatttagttaaatctggatcaactgtaggaaaggtagcaattgttgaaaccacagaaagattcaatatatggtcgccattaaacacctaatactgaaactattttcacattttctttatctattagtgacaatattgaataactatttgaaataagctatttgtcgatttatgcctgtatctcaccatcaaatatcatattccagctcatacggatatcatacatcagccttgtaagtgcaatactatcttccggtgtataaatagcactggcactatttcctgatgctatacatctgcctgcttcacgaatctcatattcaaatccatttatatcaaccgggcactcgattgtttccggttctttaccatccacctcaagtatcaaggtctttgcgtgttggaaatccggcaaaaatatacttccctttgttccctcaattctggcattacgttttaattcctctcctattgtctggactgattctgcaatacatccatcattatatgtcagtttgagacaactgtaatcatctgttccattctcattaatatgtacttttgtagtttctacattctgcggatcacaccctgtaacaatacgtaaaaatcccagattgtaaattcctatatccaacagagcacctccaccaagtgcagagttaaatttacgctcttttctggcacccgttgcaacaaatccatactgacaggaaatatgtttaatttctcctattgttccctgaagcaggatattacgcagacgattatacaatggcagaaaccatatccataatccctccataataaaaagatgcttatcctttgccagcctgtacagttcctgtgcctgtttctcatttattgtaaatggtttttcacaaagtacatgcttaccatgctcaagacaaagtctgcaattctcataatgcaaactattcggtgttgctacataaacagcctcaacatcaggatcatttaccaatgcttcataagaatcataatatcgtggaatgtcatgctccctggcaaaagcttttgcactatccatgtgccgtgagcctactgctgcaagctgttcattttccttactcatctgatttatagttgatgcaaattttcttgcaatattacctgtagccagaattccccacttcatatcattttcctcctaataatataattgcatttcacattcatatcttgttaataattatacactattttaccgcatacaccaacacaaaatagcaagtcaaatttcatattatttactgtcacaactatcgtacgcttcattattgttatataaaattcttatattaatcaaaatttttcaacacaatctaaaaaaagctgccacacatcattcttagtgcggcagcccctttgtggtaatagggtaattaataatttatatttcacatgctacatcatatgctgatttaatagcatgatcaatattacttggacgttctccagcacaatcaccaatatagtgaagtggaagaggacaatcagaaagctctggaaggttctttcttgcaccaacagccattacaacaaagtctgaagcaatttcttctgttgatgtattgtcgtctattgttttttcaacaactacagaatcatctttgatttctgataattttgcagatgttactatttgaacattataatgctctaattccctcattagagtaggtaaaatagtgttactttcttcttttgcaatctgatccatcatttcaataattgtaaccttacatccgcgtgaagccagatattcagcggtttcaacacctacaagaccaccaccgattacagaaacattaccgaatacgatttctttcttggcaagtacatcccatgcacttgctacagttggaagatctttgccaggaacagggattattgcattgtttgctcctgttgccacaattacttcatcgaatgaattataatcctgtgatgtgaattcctgaccaagcctgaaagtaacatccaattcaggaagtacatttgtataataattaatgcttctcatcatttcttcttttcttggaggtacactagcaataagtaactgaccaccaatctgaagtgatttctcaaatatagttacatgatgtcctcttaatgcggaaacacgtgcagcttcaagtccagcaataccagcaccaataattgctatattctttgttgatgctgcaggagtaatctgacgggatccttcgtaaccattttcagcattaagtacacaacttaagaaagcacgattctgaatattatctgtacatcctttattacacatcatacatgttctgacattacagcaatgtccatctgcacatttgtttgcaaagtcagggtctgtgagaagagaacgacctaatccaataatatcagcagaaccatttgtaataactgcttcagcagcttctggtgtaacgatacggcctactacagatacaggaatagatacaaactctttgatttttttagaataagaaaccataaatccgtatggctgtgttcccatggcagggattgtatcacccatatttccagtatggttagcctgtgcaacatgtaatgtgtcaacaccgcaagcttctaattctttagcaaaaatgcaagcttcatcaagtggaagaccaccttttcctctaaaactattttctccaagaggagtaactataggaagcttgtagtcgataaccatgtcaggtacgattgtttttaatctttttacgagtgttaatgcaaaacgtgtacgattagccaggtcaccgccatattcatcagttctatgatttaaaataggagagcaaagagaaccaacaagacggtctccatgtacttcaatacaatcaacaccagcttcgtgtgctaagatagcacagttttccatatgctttattatttcatcaagctcttctgcagtaacttcatttacaaagtgctgcatatcatggtgaagtttagctcttgcctcctgcattttgccctgatggaacaagtcgtttaaagctttaacattgtagtcaggatggaataactgaattccaagttttgcgccattttcatgacatgcgtcagcaagtcttttgaagctttgaacctgttcagatgaataaagctttggtgtaggagagaatgttggaagtggtgcaacatctccaattactatatatccgacaccgccttttgcgagacgctcgtaaaaacgaaaactttgttctccaattgaaccatctttttcctcatatcctgttgtaagtggtgggaacataatacggtttttaaactcaatatttccaacttttataggctctaataatttcattgttcatacttcctttcaaattgagtatactatttaagtggtgttaaaaactctaacattaatttgtctaattctgctcttgcaaaagcactggcaaaattgtgattagcgccttcaattgttttataattgcattttccattgtaaagtgactcatatctatggcatgttgcatcatctaccaaatcatctgcagttcctcttataaggaggactggtccgttgtatccttctgctgacgagaatggctcataattaaataaatcatgattaaaagatgttgggaaagtgagtccttcaatatcggccttggtgatccccttagcttccatggcttcagcacgatccttacatccaaaccacattccagcacctggacacataagtatgagagcataaggattaacaataggagcggcagtagcagctgcgtatcctcccatactctgaccagataagataatcttatctggattggcaaaatcttgtgttttagtccagtttataatatcctcgatatcgtgtaggatacctgtaaaggtcatgtcctcgaattcaccatcactttcaccatttccgtataaatcaaaacggacactggcaaatccatgttcagctaataatctggctgtgtgcgtataaatacttttgtaaccgcttttattccctgtaaagccatgtacatttacaatagcaggaaatcttgtgccatcttctggaatgttaactattccgcgtaagatgtgtccatcacggtttgtgatttctacttgttttgtcaatttaaaatacctccatttctaattttattctgcagttgtagcatttcgcttgtcagctaaatcctgtaacatttcagctgttttctcttttgtaagagggtagataaattttaataccagaacagctaataaatatcctacaacatataaacctgtatatgttttccaaagatgtcctgagaatgcttcattctggacagcttcattaacctggaatccagcaattgcaagtgcaaaactactcatacttcctgatacagcattagcaagtttacggaagaatgtatatgccgaatatacaattccttcattacgttttcctgtctgaagttcttgataatcaattgcatcatttacaagtgcccaaactaatacttggaaaccacttactccaagatagcagattccgttgatgataataaagagaataggattttcaattgggaagaagaataaaatagcataaacaacaactgagaaagttgcactgtacataatccattctttctttccaaatttcttagcaacaaattttgtgcctacgaatgcaataagtgaccagagtacacttaacatacctgaaactgccatgatggcaacatttccaaaataatcgcggaataaataagtatttaatccgttaaccatacctgctccaacaataccgataaagcttgataacataactccgagtaatgctttgtttttagtaatatctttaattacctggaagtagttaagcttttcttttttctcaacaactggctctgtaataatacgctctttacaccaatgagatgtaaacataagacagattaatccaataactgcacagattgctgacataataaggaaatggctaggtactggctggttatctttatataagaataatggtccagcaataacgataactgtcataaaaattgtaccgccaagacttctgaaacgagaaaggtcagtacgttggttaacatcatcagtcattacacttgaaagactaccaaatggaacgttgacacatgtgtacataatttcgtaaacaatatatgtaatgaacatataagcaatacgtgcaccataagcgaaattgtatacgttaacaaatcctaatatacagagtactgcagttggaaaagcaaagaatttaatccaaggaataaattttccttttcctttgtttttgtggctatcaacaagtgcaccaattaaagggtcatttatagcatcccaaaactttgtaacaagcataaggattcctacgtgtactggattaacttttaataccagtgtataaaaaatagcaagatacatggcacggaactgctcagtacagcaacatcccaaatcgccaagagtgtaaccaattttgtccttcatggaaaaaggtcttgtttctttcatgataatttacctccaaacatttatattgttttagtagctacaatcttattatattgtggttatgctgatatccatatacaaatattgcttgcaaactacgaaaaattgatatattgtatattttgacgaaatgaacaaaaaatataataggaaagtgtacaaaatagacatatgaaaaagcaaggctacaaaatggaatatttgaaaatattggatagtgcccagcgaagctttgggcaaaaggagagctatacaattgtatttatagctggtgggatagggtatatgcaccaggaggacgataatattgtatgtactatggaggatttgatatttattaagccaggtaataaagtaaagcttgaatatcgtaaaaataagtatcctcttgaagtttatgttctttatataggtggagaacttttaaggaaattgtcagatgaagaaacaagacttgatgaagcgtttgattttgttccgtatcaagttaagattgttcattctgagactgaatcggctatgcttataaagaatatatcaaaaaagctctattcgatgaataatgagccgcctaaatttgcccactcattatacgagaaaagcctattaactatgattcttgtacttgcacttcgctcatctgttcaggaggatgtacagattaagacgaataagaaaaaacacgttgtaatggatgatatttttatttatatcagagaacatttgacagaagatatctcgttggagcgcttggaaaatgaattttatataagccgttatcatatagtaagagagtttaaaaaattgacaggtgagacacctcattcatacattgtaaagagcaaacttgatttatgccgccattatatagagcaggggaaaagtattcatgaggtatatgagcttggtggatttggagggtataatcatttttttagagcatttaagaaagaatatggtgttactccaatgcaatattacaaagatttaaagattgacaggaatgaaaagtaa

SEQ ID NO: 223 - DNA, 5851 bp, unidentified
  source 1..5851: mol_type = unassigned DNA
atggacgtattaaatagagtaccggttcgcgagcaggaaccacaggttcgtgcggctaactttgaagaggtatgtttaggatataacgaggaagaggcaaaagctgaggcagcacgctgcttaaactgtaaaaatgcgcagtgtatgaagggctgtccggtatctatcaatatcccggcatttatcgcacaggtaaaggaaggaaactttgaggaggcatatcacattatcagtcagtcttccgcacttccggcagtctgcggacgtgtctgcccacaggagagccagtgtgaaggaaaatgtatccgcggaatcaagggtgaaccggttgcaatcggtaaattagagcgttttgttgccgactgggcaagagaaaatgatattaaaccgaaaaaagcagagaaattaaacggacataaggttgcagtcatcggttctggccctgcaggtttaacctgtgccggagatctggcaaaacttggctatgatgtgacaatctttgaggcacttcatgaggcaggcggcgtactgatttacggtatcccggagttccgtcttccgaaacagaaggttgttgctgctgaggtggaaaatgtaaaagcactcggtgttaagatcgagacaaacgttgttatcggaaaatctgttacaatcgatgaattaatggaaaacgagggatttgaggccgtatttatcggttccggtgccggacttccaagatttatgggtattcctggcgagcaggcaatgggtgtattttctgcaaatgagttcctgactagaaacaacctgatgaaggcatttaaagatgagtatgatacaccgatcaaagcaggcaagaaagttatcgttgtcggcggcggtaacgttgctatggatgctgcgagaactgcaaagagacttggcgcggaggtacatatcgtataccgccgtggcgaggaagagcttccggcgcgtgtggaggaagtacatcatgcaaaagaagagggcgtgatctttgatctgctccagaacccgacagaaattcttgtagatgagaatggctgggtaaaaggcgcgaaagtcattaagatggaactcggtgaaccagatgcatccggaagaagaagcccggtagagattccgggatctgagtatgagatcgaggcagataccgtgatcatgtcacttggaacttccccgaacccgctgatctcttccactacaaagggacttgagatcaaccgcagaaaatgtatcatcgcagaggaagaaaacggtgctacctcaaaagccggtgtatttgccggtggtgatgccgtaaccggagctgcaactgtaattcttgccatgggtgcaggaaaagctgccgcaaagggaatcgatgaatatctgagcaataaataatagaccagtgatggtaaaaatgccggagtcagtggaaactgctgatgtccggcattttttcttaaaaacttttttttataaaaatttcttaacacatctaaaatattccttaaatcttatccaaaacctactttttttcaaaaatattggttatacttgtaagcaaagttatgatgaattgtaaatgagtcagagtgacagtgatgaatactaagaggtatagctatatggaggaaaatgtgaaccagacagagaaagaaatggcagaaaacgaaaaacagaatcagacgggaaaagaagtggcagaaaacgaaaaacagaatcagacgggaaaaggagtggcagaaaatgcagaccgggaacagacagaaacgatccgggaacagacagaaacgatccggggactgaccgcacagcaggtggcagagcggaaagaaaagggtctctggaataaaaaagcggagtcggcgacaaagacgacgaaagagatcgtaaaatcaaacgtatttacatattttaacctgatatttttagtgatcgcgttattgttaatcggcgttggtgctttccgggatctgacatttcttccaatcattgttgcaaatacgctgatcggaatcgtgcaggagatccgctcgaaaaaggttctggatgatctgtctatcttaaacagtccgaaaacacgggtaatccgggagggcagtaaaaaagaaataccggcagaagaactggtgatggatgatattgtggaactttctgcgggcgggcagataccggcggatgcagttgtgttagaagggcagttaaatgtgaatgaatcgcttcttaccggagagtcagatgagatcgtaaagaaaagcggggacgaacttctgtctggcagttttgtggtgtcaggaagctgtcttgcacgactgacaaaggttggagaagagtcttatatatcaaaacttacccaccgtgcaacacagacgaaagagggagaacagtcagagatgatccgctctttgaaccggctggtgcaggcagtcggtattgtgatcattcccattggtgtggttctttttatacagcagtttgtatatgcgggaacccctttgcgggacagtgtgacaagtatggtcgcagcgatcattggaatgataccggagggactttatctgttagcgagcgttgccatggcggtaagtgccatgcgtctggcaaagcagcaggttttgatccatgatatgaaatgtattgaaacgttagcccgcgtagatgtactttgtgtggacaagacaggaacaattacagtgccggagatggaagtggatcagtttattcttgcagaagacctgacgaaaagagtttatgagaaagacggtgatacgaaagtatatgtcgatgtaaagtgcggtgaggaacaggaacaaaaacatgcgcagataaagggcatgatcggtgagtttgcggcagacatggatgccgataatgcaacaatggaggcattaaagacatattttaagccggatactttaacaaagataaagaaagcagaaaaggtatttgcattttcatcaaagacaaagtacagtggaatcatttcagagggaaaaagttatgtgatcggggcacctgaatttgtgcttcgggaggattatgcagagtacaaagaccgaatagaagcgtatagtgagaaagggtatcgtgtccttgtgtatggcagatatgagggaattttagacggacagcagcttacggaaaaagtattaccgatcgcgtttatcatgctgacaaatgcgatacgggaaggagcaaaggaaaccttttcctattttacagagcgtggtgtggagatcaaggttatctccggggataatcctaagactgttgctgaaattgcggaaaaagcgggaatctgtggcgcagataactatgtggatgcatccacgttgacaacagatgagagtatcgcacaggctgtagcaaaatatcagatttttggcagggtgacacctgatcagaagttaaagtttgtggaagcgctgaaagcacagggaagaacggttgccatgacgggtgacggtgtcaatgatgtgctggcattaaaagatgcggactgcagtatcgcaatggcatcgggaagcgaggctgcatcgcaggtggcacagcttgttcttttggacaatgatttttcaaggatgccctctgtagtgatggaagggcggagagtggtaaataatatccagcgctcggcaagcttatacctggttaaaaatattttttccatgctgcttgcagtattttccatgatctctatgatcaattatccactggaaccgtcacagatttcgctgatcagtatgtttacgattggaattccgtcttttgtgcttgcattagagccaaacaaagaccgcatacagggacattttatgacaaatgtgttgttgaaggcattgcctgccggacttaccgatttctttgctgtcagcagtctggtattgttttgtcaggtatttggtgtgaacgaagaggacatttcgacatcctgtacgatacttgttgctattgttggatttatgatcttatatcagatcgcaaaaccgatgacggccggacaccgggtactgatggttggaatggtcgccggctggctgttctgcatgatatttgtcagccacttatttgcaatcagggatatctcagggcagtgtatgatgctgactgcggtatttacggttgcagcggagtccattctgcggtatctgtcgaaatttgtggagtggatgcgggaaagtcttttagtgttaaaaaagaaaatacatcaggcaacagcatgaaagaggacaggtattcggtaaggataaaaaccggataaaaaaacagccgctccgtttttaaagcagagcggctgtttagcaatcaatttttgtgaaaatgaaatgttgcagttattccagattaaggtgttttttgatgataaccatgcacacaatatagaaaataacacattcgatgatcgaaaagagcgatccggaaaacagcatagaggaaacagttgtgctgaatgtaacgttttcagtggcattataagttacaacattgacgttgttcatgacaccaaaatatccggtaagtaccaggatgatcgaggatacaatctgacctgacatgtaaaagacgattccggcaccgatggaagctcctactttatgttttgtaaagagctgaccgatagaaccgcttgcaaataccatcaaaaggtactgtaggcaggataagatcatggcaaaaatcatataaatgctaaacgtatggagagacatgccaaacagattctggaaatctaccatgagcatatcaaaatctgcatcaaaggaaaatcctctgtttgccgcacagcccagggcgaagatcgatacaaacataatgatcagggagagcatcagccagcatagggaaacgagcagttttacattaaaaattgacatctggccaaccggcagtgtgtgtgtcagataaccctgatcggaatacatggttttataaaaatgtacacacatatacacataacttactacaaagagtgcgaatacgccgagtacataaaataccatagctgctgtaaagaagatctcctgtaactggttttctgtgccggcaggatcactgtcaccgtacatggcaatacagccaaggatggtaacaaacgccataacgccatagatgatgaacattaacttgtatgtgtttttaaattcgtatttaaataattttcctaacatctgaatacctcccggaacagtgcatcgacggatttcccctcctcggcgcggatatcgtccacagaggatgagagacggatctgtccgttctgaataaaaataacctggtctaaaatgttttcgatatctgcaatcaggtgcgttgaaatcaggatggaagcggacggatcgtaattggttaagatcacgtctaaaatgtaatctctcgcagcgggatcgacacctgcgatcggctcatctaaaatatataattctgctttgcggctcatgacgaggataagctgcactttttctttcgttccctttgacatgctttttagagaatcatttggattgatatttagtttttgcagcatatcataggcgcgttcgctgtcgaaatcttcataaaagtcctgaaagaaggcgatgatctctttcacacgctggttcatattcagataactatgatccggcagataggaaatgtggcgtttgctctcgacaccgatcggattttctttgtaataaagggtgccggaggtcggggttaaaagtccgttgatcattttgatcagtgttgtctttccgctgccgtttggaccgagcagaccaatgatatgtccgctctcaatcgaaagatcaatgtggtcgatcgctgtttttccactgaaacttttggtgagatctttgcattcaagtaatgtgcccatcat

SEQ ID NO: 224 - DNA, 7981 bp, unidentified
  source 1..7981: mol_type = unassigned DNA
atgatcagagtaggaatcatcggagcaaccggttatgccggaggagaactggtaaggatcctgttaaaccacaaggatgccaaaatcgtatggtacggttcccgaagctatatagataagaagtattatcaggtataccagaacatgttccagctggtggaggatatctgcaaggatgacaatctggaagaactggcgaagcaggtagatgtgatctttaccgcaacccctcagggatttctggcgggccttttgacagaggagatcctctctcaggtgaagatcgtggatctgtctgctgattaccggatcaaggatgtggccacctatgaaaaatggtacggcatcgagcacaaatctcctcagttcattgaggaagcagtatacggactctgcgagatcaatcgtgataagatcacggagaagaccagattggtagccaaccccggctgctacaccacctgttcgatcctgacggcctatcccatggtcaaggaaggcatgatcgatgtgaacaccctgatcgtggatgccaagtccggtacctccggtgcaggaagaggcgccaaggtgcccaacctgttctgcgaagtgaacgagaacatgaaagcctacggcgtggcaagccacagacatacccccgagatcgaggagcagttaggctatgcgggcaactgccaggtgaccattaattttaccccgcacctcgtacccatgaacagaggaattctggcaaccgagtatgcaacactgaagagaaaaccggacggtacacttcctacctatgaggaagtaaaagctgtctatgataaatattatgcaaacgagaaattcgtccgtgtgctggataagggcagctgccccgagaccaagtgggtggaaggcagcaactacgtggacatcaattttgtcattgatgagcgtaccggccgtatcattatgatgggtgcactggataacctcgtaaagggtgccgcgggacaggcggtacagaacatgaacctgctgttcgggcttcctgagagcgaaggcctggagctggttccctgcttcccttaaagcagatacggaaaggattagaaaggataaaacacatacatgaataaacagtttacgatcaaacccatgaccatagaagattatgacggtctgcatgccctctggatgaccattcacggcttcggtatccggagcatcgatgattccagagaaggtgtggaacgttttatcaaccggaatcccggcaccagtgtggtagccatcggggaggatggagccgtagtgggcggcatcctctgcggccatgacggacgacgaggctgtctgtaccatgtatgtgtcagagaagattaccgaagacttggcattggcaaagccatggtcgtccactgcatgaatgctctgaaagcggaacatatcaacaaggtcagcctgattgcttttacccagaatgacatcggaaacgctttctggaaatgcattggatggacaaagcgggaagacttgaactactacgactttactttgaatgaagagaacattacggcgtttaataaatagatgccaggattgtggaagtgcgtagcacgaagcaatccgtaggcatcaaagtcgggggcttttgaccccgacatcataaataaaacggaagcgaaaggagattattccaacatgaaacagatccagggcggtgtgaccgcagcaaaaggctttgaggcagcaggtgtggaggctgccattaaatatcagaatcgtaaggatatggcactgatcgtgagtaaggcaccttgtaccgtagccggtacttttacctccaatgtggtaaaggcggctcctgtactgtgggataagcagatcgtggaacattctgcatttgcacaggcagtggtagtcaattcgggaatcgccaatgcctgcaccggcaaacagggactggactgctgtgaagcagaagcgaaatgtgccggagaactgttgggcgtgcccaccgatgccgtactggttgcatccaccggtgtcatcggtatgcagattcccgtagacaagatcaccgccggcatcgagaaactggtggcagccaaggcagatactctggaggctggctccgatgcagcccatgccatcatgaccaccgataccatttccaaggagatcgccatcgagacacagatcggtggcaagactgtgactctgggcggtatgtgcaagggttccggtatgatccatccgaatatgtgcacgatgttaggttttgtaaccacagatgtgaaaatttccaaggagatgctgcagaagtgcgtcagcgcagatgtagtggattccttcaacatgatctccgtggatggcgatacttccaccaatgatacactgctggtgctggccaacggcatggctggcaacgaggagattaccgcagagggcgaggattacgacaacttctgcaaggcactgcatgagatcaccacattcctggcaaagaaaatggcaggagatggcgaaggcgccacagcactgttcgagaccaaagtaataaatgcagtcagcaaggaagatgccagaactctggcaaaatccgtgatctgttcttctctgaccaaggcagctatcttcggacatgatgccaactggggacgtatcctctgtgcactgggttattccggagccaaattcgacccggaaaatgtggatctgtattttgagagcaagagcggcaagattcatatcttcggtaatggtgtggcatgtgattacagcgaggaagaggccacgaagatcctctccgatccggaagtcaccgcactggtggatatgcatatgggtgaggcagaagctgccgcatggggctgtgatttaagctatgattatgtgaagatcaatgcggactatcgttcctaaaaaaagaacgaccggaaagataaatgacaggcggatcacggtatctgcggaaatgaggataaaaatggaaaaagatatggaacaggtaatgaaaaaagcagaggtgctgatcgaggcgcttccttacatacagaaattcaaccgtaagatcatcgtggtaaaatacggcggcagcgccatgagcaatgaggaactgcagaaaaacgtcatcaaggacgtaacgctgttgaaactggtaggtttcaagcccatcatcgttcacggcggcggtaaggagatcagccgctgggtcggcaaggtcggaaaagaggcaaagttcgtcaacggtctgcgtgtcaccgatgaggagacgatggagatcgcggaaatggtactgaacaaggtaaataagagccttgtgaccatggtggaagagctgggcgtgaaagcagtaggtgtcagcggtaaagacggcggcctgcttcaggtaaagaaaaaatattccaacggtcaggacatcggttatgtgggtgagatcaccggcgtgaatccggatattctctttgacatgctggagaaggattacctgcccatcatcgctcccattggactggacaaggattatcacacctacaatatcaatgcggatgatgcggcctgcgctatcgcaaaagcagtacatgcggagaaactggcatttctgacggatatcgagggattgtacaaggacatcaatgacaagtccacatttatttccagactgacagcttccgaggcagagggactgatccacgatggttacatcggcggtggtatgctgccgaagctgaacaactgtacttctgcgatccgcaacggtgtaaaccgtgtgcatattctggatggacgtctggcacactgcctgttgctggagatcttcaccaatcagggtatcggaactgcgatcgtatccgatgaggagtgaaaaaagtgtgcagaataagcctggcagcttattccgcacccggctatttgtgccgcaggcgtcacaaagtagccattatcgcaaaaccaaattagaaatttggtttgcgtttccttgacgaaaagaacgtctgcggaatggagaggaaaaatgagcgacaccatgaaagaatatattgcagaggcggaaaaagacctgctgcatacctataaccgttatcagatcgttctggataagggcgaaggcgtacatctgtatgacaccgatgggaaaaaatatctggatttcgtagcgggaatcgctgtatttgccctgggctatcagaacaaggcatacaacgatgcgctgaaagcgcagatcgacaaggtgatccacacctccaattattattacaacgtgcctgccatcgaggcggctcgtaagatcaaaaaagtatccggcatggatcgtgtctttttcaccaattccggtgcggaagcagtggaaggtgccattaaggctgccagaaaatatgcgtatctgaaggatggctgtaccgaccatgagatcattgccatgaatcactccttccacggcagaaccatgggagctttgtcagtaacgggcaatcccaagtatcgtgaggcgttccagcccatgatcggacatatcaaatttgcagaactgaatgatttccagagtgtgcgggatcaggtgacagacaagacctgtgccatcattatggagactgtacagggcgagggcggactgcgtcccgctaatgaagagttcttaaaacaggttcgtgatctgtgcgatgagcgggatatcctgctgattctggatgagatccagtgcggcatgggacgtaccggttacatgtatgcatggcagcgtttcggcgtgaagccggacatcatgacttctgccaaggcactgggctgcggtgtaccggtaggtgcatttatgatgacggagaaagtagcacagcattctctgacagcgggagatcacggaaccacctacggcggtaaccccttagcctgcgcagcagtggaaaaagtgcttgatttattcgaagaggaccatataatagaacatgtgagagaggtggctccctatctggaacagcgtctgaacgaactggcagacaagtatgactgtatcaaagaacgccgtggtgtgggactgatgcagggactggtatttgaccatccggtaggagacattattaacagagcattggagaagggattaattctgatcaatgccggtgcggacattatccgcttcgtaccgcctctcgtgattacccgggaaaatgtggacgaaatgattgctattttggacacctgtatcgaataagaggtttaggtgaatttatgtttttgaaaaaaagaattatcgctacagcagctgtgatcgccatggctgctgcagctgtttacggaagtacgcaggagatgagtcagacacaggagagcggaagcggactgcagctgtttcgaggaaaggagacaatctattgctggtattccgatgaggcattgtccggttatatcaatgcggcagcagtatccttcggagaacagaacagtggagtccgtgtgattcccgtacttacttctgacagtgaatatctggaagctatcaatcaggagaccctgcattccgatcagataccggatatctatctgttgagcagtgactctctggaaaaggcttatctggcaggactggcatcgaaagtgcctgacactgtgggaatctgcaatacagaccatttttcccaggcggctctgtctgcggtaacctatgatcagaagctgatcggttacccggtttattttgataccagtgcgttggtatataatgaagattatcttcgaacctgggcaacccagcaggcggagaaggaactggcgggaagcagtgagaatgatgaacccataggggaaggagaagagatcatcgaggaagattctcttccggaagaccagaccacggaacaggtgacagcggatgaggcagcggtaaatgcgctggcagagcagtattttgcggaagcacttcccttcacagtggatgatctgctgaatattgcagatacctttgatgcaccggaaggtgtggagggtgtcatgaaatgggacgtgaacaatattttctacaactactggatcgtaggcaactacatgattgtaggcggtgatcccggggatgacagaaatgatattgatatcaataatccggagaccattcagtgtctggaagtgtacaaggcactgaaccagttcttctttattgaatccgatacggtgacttatgattctgtgatccaggactttatcgatggcaagaccatgttcaccatcggaaccacggatgtggtcaaacggctggaagaggcaaaagcggacggcagccttgcatttaattacggaattgcccgtatgccggatgtcagcgccgaactgcagagcagatctttgtctgttacgggagcggcagtcatcaacggctattcggaacacaaggaactggcggactgcttcgcagcgtatctggcagaaggatatgcggacggcctgtatgaacgctccggcaaaatgccggcaagtcttcaggcggcagagaatgcagacaacggtgcgcttatgatctttgccgatgagtatgcggacagtgtgtcattgccgaagatgctagagacgggaaatttctggatgcagctggaagtactgttttccaaggtatggaacggtgacgacgtgactactctggtacagcagctggacgagaccatagccggacaggtaggtggtacagagaactaaaactgttacaataaaatatgaatgaacgaaccggtcacaggatagactactactaaaaagaaaaggtggtagaatcctatgatcggttttttgattgctttagtttccggtgcgctgatgagcatccagggagtgttcaacacccaggtgacgaaatccaccggcatctggaccgccagtgcatttgtgcagtttacagcattgctggtatgtctgggggcatggctgtgtacggagcggacttcattcttgaagatagcgcaggtggagcccagatatatgcttttgggaggggctatcggagcctttatcacctacactgtgatccgcagtatggatgccctgggaccggccaaagcggtaatgcttattgtggtcgctcagcttgctgtagcatatattatcgaactgttcggatggttcggtgtggagaagcagccctgggagtggcggaaagccatcggcatggccgtggcgattgtgggtattgtgattttcaagtggaaatgatccagagttatcctcgtagcggcaattttgcgaatgggttctgaatcgttaccacaaatgcgaaaacggcttgtaaattccgtgcgattccagtacaatgaaagttaacagcatagagaggcaatcccctgaaattttgtgaaggaatcaggaaaatggaaaggggactatgatgttttcgataaggttttttaaaacaaaatatgcaggtttgatcggaatgtttttcagtctggtgatgttcataaccggctgtcagaggaaggatgaggccattgtgctgattccatccggagaagatgtggcggaatttccctcactggaagcggtggaacaggcagcggagcctgcaggcagcagcgtgacagtgcaggaaccggcaaaggctgaaccgcagatgatatatgtctatgtctgcggcgcagtgcgggatcccggagtcgtggaagtgccggagggcagcagagcggaggaagccctgcgactggtcggaggtatgacagcggaggcggatcctttttatgtgaatctggcagaaacggtgacggatggtcagaagctgtattttccaacgttggaggaagcggagactctggaagccgaggtaaaagcgacggcggagggacttgtgaatatcaacacggcatctgcggaggaattgtgtgcgctgccggggatcggagcttcccgggcggcagatattgtgcgctaccgggagcaaaacggagcctttcagacgaaggaagacattatgaaggtatccgggatcaaacagaacgcgtatgacaaattgtgtgataagatcacggtacaatga

SEQ ID NO: 225 - DNA, 7920 bp, unidentified
  source 1..7920: mol_type = unassigned DNA
ttatttaccctcgtatgctgcctgaatctcttttttgaactcttcctcgcccactctctgaagagtaagtctgaaacgctcaccaccgtttgcatgcttctcgaagaaactaattgccgcatctgtcactctgaaaagagtttccttgtcgcggataatcggaacaagctgctctcctttatagatgtggtttccgaaaagtcctccaaacgatacgatatatcccggagttcccttccatgcatctgtcggacagctctttacgcagcgcgcacagttgttacatttgtctctgtcgatgataatcctgccatcctccatcgaaagtgcaccctcgcggcatgccttcacacatacaccacactggatacaatcgtcatggctgcactctactgtcatgccgcccttgattccgacatcgttttcctcagcctttaagcagttgttctgacagcctgtgacaccaaacttgaacttgtgaggaagctctcttccgaagtatctttcatcaagttccttagccagagtgtatgtatcgatacatccgctaggacagatttctgagccctgacacgctgtgacagtacgtactctcggtccgcagacacctgttcctacaccgccctttgccagttcctcttttactacattgatatcctcaaccttgataaaaggaatctcaataccctgacgcgatgtcatatgaacatatccgtgtccgtatttctcagcaacctctgctactgctttgatattttctgctgtaagatttcctcctacaaccgcaattctaagcgagaaacagcccttttgcttctgtctcatgaatccgcccttttttagggccgcgtaatcaactttctccgccatttttaatctccttattgtgtaaatatgttaatgttttgttttatatgtaaatgcatatgcacgccctcatttgcatacacattgataccttattattatggcttaatcagctatatttgcaaaagcctgtgcaaaatcctccttgaggtcatctatatcctcgatacccacactgactcttataagatcctcaaatactcctgcatcctccttctgcttatctgtgctgtgaagactgattgtagagcccggatgaatgacaagtgtctttgtatctccgatattgctgagtgtgtaaggaatcgtcaggctgtctataaatttaaatgccttttccttgctgccaaccctgattgtaaggattgctccatagccgtttgcgagctgtttttttgctatttcatgccatttgctgctctcaagccccggataattaacctttatgtcaggataattgttttctatccacgacgcaagttcgagtgcattagagcattctctttccattctaagaccgagtgtctcaagtcctataatatttaagtatgcattcaccggagctaaacaggcacccatatttctgaaaagactgtttctcagctttgcgacaaatgccataggtccatacttcacataatctgcaaaccccggatatctgttcttgtcccatttgaacttacctgagtctgtcagaataccactgattgcattgctgcttccattgatatatttggaagatgaattgaccacgatatcagctccatgctttaaaacctgtatcaggtaagctgtcgatgtggtattgtcaactacaagcggtatatcatgtgcgtgtgctatctctgcaagcttctcaatatctgtgacatccagacagggattaccgatagtctctgcaaaaatcagtctggtatgctcattgatactgtcctctatctgctgccagttgttgttctcgacatatctggttgtgatgccgaaggcctcaagatcatggaacaaatctattgtgccaccgtagaggctggcgcttgagatgagctcatctccactgcttagtatatttaagaaggtattcatcagtgccgccatgcctgatgcgcatgccaccgatgctattcctccctcgagctttgttattctgttctcaaaagctgtaatcgtaggattggcaactcttgtgtaacagtagcccggagccttgttttcaaatattttttccagatctgccgcgctctcctgctcgaaggcgcttgtctgatataccggtggcagtgtagagccatttgtctcttttgtcacgccggcatgaagtaagcttgtattaaatctcattattttcttcttctcgttaattcttacatagtctattgtgttactaggaattgatgagattattatacaaacgtgtgtgttgaaagtcaatgctatcagttatacaaattatttgtccgtggttatatattttgtttataaccattaatgtcccttaaatactctgcggctgtcgttgcggcatttgcgccgtcagatactgcggttaccacctgacgcagtgtcttggtacggacatctcccgccacatacagtcccggctgaatgcttctatcatggtcaccattttttgttgcagcatatgtgatgccgtcctcacctgccactacatatcctctctcatcaagctgcaccagattctttataagctctgactgcggtactgaaccatatgccacgaatactccgtctacagccagtgtcctgccacttttaagctttatgcctgtcggctttttttctccatatatttctgtcactgcttcgtttaggacaagctctacattttctttctgctttaagagctcaactgtgctctgtgcaccgcggaagctgtctcttctgtgaaccagatagaccttctcacatatgtcggacagatataatgcatcatccaaagcggtatctccgccgcccagcactgcggctgtctttcctttatagaatgctccgtcacagattgcgcagtaagatactcccttaccggtatactcatcctctcccggcactcctgcctttctcggatatgctcctgcggtatagatgagcgctcttgcctctgctatcgtgtcatcatcgaatttcactctgtatatcgctgattcttctttctcaccattttgcactgcttctatctgcactgcttctttttcgataaattctacatcaagagacactgcatgctccctgaatttttctcccaagtcgtatccgtttatattgggaagccccagatagttgttcacatttccgctctcggctatctggcctgtcccctcgtattctttttctgccactgtcacattcagattggctctctttgcatatattgctgctgacagtcctgccggaccactgcctattattattatatcaaacatggaattggttcctttcatcgtccattgatttttttcggtaacttattatatacattatccttaaaaaatacaataataccgcctgcttttataaaacacctttataaaaacaagcggtatcaattttatctatcgtatatacatcctggcctcataaggtctgagtactgacatatcagaggtatccttataatttgaaatcagcacctccatgccctcacactcctttgcaagcggcattggtatctccttgtcaaagaaattgcacacaacaatcatggttttttcttcattctttctgctgtatgcaaaaatattctcatcatcctcaagtaaaagtgtgaatttaccatcaacaaataccggataatcctttctcagctgaacaagcttcttgtagcagctaaagattgaatcagggtcatccacctgtgatttggcatttattttgtcgtaattgtcatttacctttatccaaggtgttcctgtggtgaagccggcatttgccgagtcatcccactgcataggtgtccttgcattgtcacggccctttgcgtaaatggacttcatgatttcatcctttgagtatcctttttcaaggcgctcatggtacatgtttatgatttcacagtccttataatcctcgatatcatactgtacatttgtcatgcccagctcctcgccctgatagatgtatggtgtaccctgcatgccgtgcagcaatatagcaagcatctttgcagattccactctgtactccctgtcattgccccatcttgacacgatacgcggcaggtcatgattgtcccagaacagactgttccagccacagttgtagagctcattctgccagtgagccattatctttttgagctttttaaacggaagcggtgcaaggtcccatttctcgccgccctccttctggtcaagccctatgtgctcaaactggaacaccatagaaaactcgctgccatccggattgctgtaaagctttgcacgctctgtgtctgcgccccatgcctcacccacggtaatcaggtcgcccttctggaatgtctccctgctcagttccttaaaatattcctgaagccttggtccatttatggtgattctcttgtccggctcttttgctatctggtcgattacatcaagtctgaagccgccgactcccttgtccatccaccagagaatcatatcgtagattgctcttctgacctttggattctcccagtttaaatccggctgctccggtaaaaactgatggaaataatactgtccgatttccggcacatattcccatgcgcttccaccgaaacaagccttcatatcacttggaggcacgccttcatctccgtctctccaaatatagtagtcatggtatggattgtccttgctctttttagcctccttgaaccacctgtgctcgtttgaagaatgatttaagacaagatccatcataatccttatattgtgcttctttgcctcgtttatgagctcctccatatcatcgagactgccaaacgtcggatcaatatccctgtaatccgaaatgtcataaccgttgtccgcctgcggtgatttgaataccggcgaaagccatattgcattgattccaagcgtctcaagataatcaagtcttttgatgataccctgtaaatcaccaaagccgtctccgttagaatcctgaaagctctttggataaatctggtaaactaccgcctttttccaccatttttcgttattgtttttgctcattatgccctccttgtctcttcattatctctttttgttatctcttttagctgtctctttttgtaaaaattcagcctggtttctttaatgctgtatcaaattatgctattttacaagcaccaccaaaacctcacagctttcaagcttaagctcagatgctcccactgaaacagtgctcttttcagcatcatttgtgttggacaaaagcacctttttcacactgccatccagcctgatttgtgcctctttactgccaaaatttgccacaaccagcacgcgcttattttcatcctctctgtaataagccatgatgccatctgtatcctcatatgccggaacacatctgccgtaggtgaacagctccttaaattcatctgactttcgcagtgccacaagccttctgtaatagttcaaaacagatgaagggtccttttcctgcgccgcaacattgatagccttatagttttcattgaccttaagccatggctttgctgtggtaaaaccggcatttgcctcatcactccactgcataggtgtccttgcattatccctgctcatccttccacaggctgcaagtgcctgctcctctgataagcctgctgcaagtgctgccttgtactgatcctttgtgctgatatcgtcatactcatctatactgttccatttagcattttgcataccgatttcctgtccctggtatataaacggaatgcctcgaagcagtacgctgacagttccaagcatcttgattccggcaggattttgagcatgctttggtaaaaatcttgaggcacctctcggctcatcatgattttctatgatattggccttaaagccgtacttttctgtctcaagctgtgaaccaagaatggtctttctccatttgtcaaaatctattttcggtgcatcataccatccatgctctccatcacttaagcactgtgcacaaaaatcaaatatcgttgaaaaatgcccattctcaccgataaactccggcagctcctcaggcttcatattgaatacctcgccaaccgtaaatgcatcatacttcttaaatgtattgttctttaattcctctaagagctctccgacaccttctgcactttcaaccatcttgtagcaggcagccagtccgtcctctgcatccggctcaaaatcagggaaatcgagatttttctttatattgattatcgcatctattctaaatcctgacaagcccttatcaagccaccagttaatcatctcataaagcttttgtcttagcttttcattctcccagtttaaatccggctgctccttcgcaaacatgtgcagataatacttgtccgtgcccggcaccttctcccagcagcttcctccaaaataagagcggtaattgctcggcggattgccgtttttaccttttctgaaataaaagtaatcagcatactctccatccggatccttaagtgccttttgaaaccattcgtgcttatccgagcagtgatttattaccagatccatgatgatgtgcatatcacgcttctttgcctcggcaaggagctcatcaaactcctccatagtaccgaactcttcagctatcgcatagtaatcagatatgtcatagccctgatccacaaatggcgatttatatatcggagacagccatatgatgtcaattccaagcgattttaaataatccagctttgaaatgatacctcttaaatctcctattccgtcaccgtttgtatccagaaagctctttggataaatctgatatgccaccttgtcatgccaccattttctctccataatgtgtacctcttatctaatcataaattttgcactcatttacatcttgagcactttgtcttgatgtattatactgctattatagaaagtgattagtataaattcttgcaatattttttcattttataacacaatactgctcttataattttaaagggtatagttttaaaagctatggagaaacaacaatatgaaaaacaataatcagcctgccctcgggcagaaagaaaacgcaaagcacggagaagtatttttccccgttcagaaatatataacaagacttgcagcagattaccctgtcatcactacacactggcacgacgaggcagagctcacactgattacaaagggctcatgcacctatcagattgatttgctcgaatatgaagcaaaggaaggcgatatcatctttatcccgccactgctgctgcattccatttcaataagggactgcgacgaattttactcggaaacgtatgtattccatatcaattttttaggtggaaacaataccgatatatgctcttcaagatatctgactccgctaatcaaccatgagtttaccatgccttacctgattgcaccgaagcatccggcatatacatccctttgcaaatgcttcatgcgcataacaaatctatactccagtcaggaattcggctatgagctggccctaaaggcatttctgcttcaggcaatatttctattgctgcaatacagtgaaaaaaatgctgattttggtgtcaacacatcctccgataagctcaaaaatgtgctcgattacatcgagatgcactatgccgaaagcatccaggtttcagagcttgccgggctttgctatttcagtgaataccacttcatgcgtttcttcaaaaaacacatgaacatgacctgcgtgcagtatatcaacaatgtgcgtcttgaaaaatctgtggaacagttcgagcgcggcaacacctcaattttagatgtctcactgtctgtcggatttcacaatctgagctattttcacagggcatttaaaaagaggtatcatatgacacctctttcctttatcaaaagccttgaataa

SEQ ID NO: 226 - DNA, 9751 bp, unidentified
  source 1..9751: mol_type = unassigned DNA
ttaaatgctcgtatcctcatatttatatagctcccactctccgcgatgtctgcggaaatagaagatattggtatatccatttccaatcccgttcactttcaggattttcgtatttgagttatcactattcttctgtccataattgatattggacaatttatccacaggcaatatagggcggaaggcataccactggttcaaatcaagcgtagtctccagaatagaaaactcatcatccggatctatcgtgatatattccaaaggttcccggatatgtcgactctgataaatgctgtcggttacaaagcgagagtaaaacgtaacgaagtcttcattttcgccctgttctatctggcggagattgatagcttccagcatccatacccccttagtacgttcaaaatagtatttcttcaccatgcggttttccagaaaaatccattccacctgtacagaagtgagtgcagtatctcctaccaattccagatcatcttcatcatcaaagagcaatgtataataactctgctgggtaaacagataatcatgtccccagtcctccttctctattttcgaaggtgtatcgacgttgtaaaaaggcaacggaaatttggtccgctgccgttgcagggcgtcatccgaagcataactatagataaaatcatcaaatgattcatccgcttctatgggcttaggatcgttatcctcttcaacctccggcacagtatcagccttatgtgaagctgaatccaccaaattggtgattgtcgcaaaagggtccatcttcgttttcttgttgccgcatgacatcaagaaaacgagaagaaagaaccccaatcctatttttctcattctttaccgagacctcatcaggtcacttatttagtttagctcttaacttttcaagcatatccactgtcatggactctaaatcatactgcggtttccaatcccactcttcacgagcacaggtatcatccagactatcaggccaactgtctgcaatagattgcttcaatggatcaatttcatataccatttcaaagtcgggcacatgcttcttgatagcctgacagatctcttccggatcaaagctcatggcagcgatattgaaagcattccgatgcttcagacgtgccggagcagcctccatcaatgaaatagctgcattcagcgcatcaggcatatacatcatatccatataagtaccaggcttcaaaggacatacgaacctttcacctttcactgcggagtaaaatatatcgactgcatagtcggtagtacctccacccggaggggtcacattggagataatacccggaaaacgaaccgcacgggtatctacaccgtatttagtataataataatcgctcaataattcagtagttactttggttacaccatacatggtacgggggcgctgaatcgtatcttgcggagtcttcacatgaggtgtagcttctccgaacgaaccgatggagctcggggtaaagactgcgcaaccatactcgcgcgctacttccagtacattccataatccgtcgataccgattttccaagccatggccggacgactttcagcaacaaccgaaagcaaagctgccagattataaatcgtatcaatcttgaattggcgggccaccacttcaatagactgacggtcggtcacgtcggcaatagctgaaggacctgatgcctttaattcccctttaggcatagcactcggaatgtatccagcgataacatggtcatccccataacgtttacgcaattccaatgtgagttccgaacctatctgtccggttgctccaattaccaaaatattcttcatacgacttatttataaggtactccttacttagagacgcgcaaatatacatacttttttttcattattctatcattttgctattgtttatttgaagaaaaatcgtgtcctttgtatcgtttagtattaagatgacaaacttttaatttataaagctatgtacgggaaaatgaaagaacatctcagcaatacacttgctgaaattaaagaggccggactctataaagaagaacgcctgatcgagagtgcgcaacaagccgccatcaccgtaaaagggaaggaagtgctgaatttctgcgccaacaactacttgggtttgtccaaccatccgcgactaattgccgctgcccaaaagatgatggatcaccgtggctacggcatgtcttccgtacgcttcatctgcggaacacaagacattcacaaagaactggaagctgctatctctgactatttcaagacggaagacaccatactatatgctgcttgttttgatgctaacggtggtgtattcgagccgctatttacggaagaagacgccatcatctccgattctctgaaccatgcctccatcatcgacggtgtccgcctatgcaaagccaaacgctaccgctacgccaatgccgatatgaccgaactggaaaaatgcctacaggaagcccagacacagcgtttccgcatcatagtcaccgacggtgtattttctatggacggcaatgttgccccaatggacaaaatttgcgatctggctgagaaatacgatgcactagtgatggtagacgaatcgcactctgcaggcgtagtaggtcctacgggacatggtgtaagcgaactgtatcaaacttacggacgcgtagatatctatactggaacattaggtaaagccttcggcggtgctatgggcggattcacgaccggaccgaaagaaatcattgacctgttgcgtcagcgcagccgtccgtatctgttctctaattcagtagctccggctgtgataggtgcaagtatcgaagtattcaagatgctgaaagaaagtaatgcgctacatgacaagttagtaaacaatgtgagctatttccgcgataagatgactgctgccggtttcgacatcaaacccactcaaagcgccatttgcgccgtgatgttgtatgacgccaaattgtctcagatatatgccgcacgcatgcaggaagagggtatctacgtaaccgggttctactatcccgtagtaccgaaagagcaagcccgtatccgcgtacagatttcggcaggacacgagaaagaacatctagataaatgtatcgaggcatttattaaggtaggaaaagaacttggagtattagcgcactaaagtgcgctaagttacaggctacgagttacgagctacaagtcactcgtagcttgtagcttttagtatcaccgcaaatctgctccctttcccctgttccgagtgcagttcaatccttccctgcaatttctctataataatctggcagatagaaagccccaagcccgttccttgcgaaaattcattctgcttgtagaaccgattaaaaatcatcttctgctcggcgcgaggaatgccacagcctgtatcttccacataaatttccacttccgaagtctcaggtaaataacgatatcccagcttgatataccctgaagctgtaaatttagaagcgttattcaggaaattagtgaccacttgcgccaaccgtcctttatccacatttatccttaccggcactgtatccttatccttaataaattccaactgttccggtattaacatctgatgggtctgatagatttcatccaccaattcctccactccgcatggagcaaattcaaaggacatatagcccgactcaagccgtgaaagttccaagatatcatttatcagcagcagcagcaaatcactattcttgttgatcgtcttgatatactcacagcgctcatctggttccagttcttcatccgctgccaatatattggaaaagccgacaatcgcattcagcggagtgcgtatctcgtggctcatattcgctaggaacgactgtttcagctcagctttttccgccagcagacgcgcctcttccagttcatgttcatgatctttaatgtcctgtatattcagcaacagtccggcagccttatagccgccatccggcaatgcaatggtcttataccggaattcccaccattgatatccttttccgttaaagtcgcaacgcacctgcaccgccaccttacggattaaggatatcttcctccagttttcctccacctcatcccggcattccggatgaataaacttaatgagtttatcaaacgtaagtaccttcgacatcattccctgcgacttccagaaatcactctcaaatataaaataatcattctccaacttccacgcgtacgtatcactcccctcaatagccagcgccaacgtttctttttcatcctccagcgcattgagagctttctttttcctcccctgctcccgacgataaaggaaaaacaacaagacaaacagcgtaatcaatagaactgtaattgagaaaataattcctccccacagccaaggatatgcctcactgaacggaatatggataatagaatacttctctggaatatccgccttcgaaagccccctctgctccatcacctcccaatctaccacatactctttagcactgtttgcgatgggcatatccaaaggcttctcaccatgcaaaatcctgaccgccgcatccaccatttcccctacctgtattgggatcgtcgtcatatatccccccaacagtttctcgccatagccaaaaccttcattaatggctgtcagactggggctggaacagatatttccgatattgacagtcgtaaagtcccttttcaattgaagataacacctatctcttgtgtattggctcaaactccaaagtagtccggcatccgaacgatccttctgaagccggacagtaagcccggcaaaatacgtataactcttgtcttttacaaactccttccattccctggaattgaattcttttgagttcatgaaaccttccaccttctcgtctttcaactgttcccaagcatccttccttatttgtttatccagataagtggagtctataatagtgaagagatgcatccccttcccgaatatctctttcgcagccttgatattcgccataaaatctattttatcacgaaatccggtcacgttgggatattgctttataagaggccagttagggtaattcactccaccaaaaacaacggggagttgcttcgccagcggatgtccgcacttcagcagtgaataagttgcctggtcatcattaaccaatataatttccggttcccagttttcggaaacttcatccaacagagagtgcagatacaaagattctaagttatcccgataagcctcgcaatctaaatacactgtacggagttcgacatcaatccctctcttccggaaagtttcggcaatcattttattaaaatcaggataagcagcataagttttctcataagagtgcaccaccagcactttccgtttttccatctccgaacaagcgctcaagacatggcaactcaacattatccaaaggaggaatttaaaatttattttgcccatacgcatagtaattcacagtacgtgttaaaaagagtaacaaaggtagattaaaatactgaaacagcaaaaataaaagagctgcttaaaaaatcaagcagctctttttttgacttatcaattctatatcaaaagattattaacgttcgcccaattttacgtctacaaagaagatacccgttgcaccggctttcttaatcatatcaacaatgcctgcagcagttgcttcttcttctacttgttcacgcacaaatccccacaggaagtcctgcgttgctttatctttctcagcagcagctacatctaccaacttgtcaatcatttcggatacacgacattcgtgtttgtaaacctgttcaaatacttccagcggagtaccaaaatcattaggaactacatccagcttatcgactttggccttaccaccacgcttaattacgtaatcggccagtgaacaagcatgttcattctcttctgcccactgtttcttcaaccaatgtgccataccacaaaatccttctttttccatatagaaagacatagccaaatacatgttagccgaccacatttcagccgtaatctgctcgttaattgcattctgtaatttttcagtaatcataatcgtattttttaattaaattgaaatcattacaaaagtaacaatgatacacaacatttgttcatttgataacattttttaaataaataaaatcagaagtacatttgaagctagtatatatatgtccggcgtataactcctccattgcttttccatttccaatcacatcatacaaatatagatattgaaaataaaaaaacaattttcatatttcaaatacaaataaattaaatacaaaatgacaaaaagcgtgcaagacttaaatgatagtcttacacgcttcctacaatatattcaattctttcacaccagttcgtccgaagtgtacccctgtggcaactcacgacagttatagctcgaagccattatctcaccataagcacctgcagaacgtaatgcaatcagatctccacgcttcaccttattcaaatctatcgctttcccgaaaacatccgacgattcacagataggacctaccacatcatacgcctcaactgcatcctcggaagtaatattctctatcttatgataagcctgatacaatgcaggacgaatcaaatccgtcataccagcatcaaggatggcaaatttcttatttgctccctgttttacataaagcacctgtgagataagtgaaccgcactgccccgttatggcacgtcccaattcaaaatgaagtgtttgataagagcgcagtttcagatgttcggcataagtagagaaataatctttgaaatcaggtattgcctgacggttgggatgcttataatcaatacccagtccaccacctacattgatatgctcgatgcggatgcgatgtgcttccagcttgtcttgcaattcatttacacgattgcacagggcaacgaaatcacccatatctaatatctgcgaaccaatgtgaaaatgcaatccgataaacttcacattcttcatctccaaagccacttctatcacatgatccatgtcttgcatactaatgccaaacttgttttccgctagtccggtagtgatattggcatgagtatgagctcctacattcggattgatacggaaagcgacattagccactttacctttagctgcagccagttcattgataatctccagctcaggaatagactctacattaaaacagaaaatattatagtccagactcagatttatttcccaatcagacttgcccactccggcaaaaacaatcttatttgtaggaaaacctgccttaacagcagcacgcacttctcctccactcacacaatcggcacccagcccgttctcacggataatagaaagcaccttcgaattagcatttgctttcacagcataatgcacctcaaaattgccatatttagcagcttctgcacgcacgcaggaaagagtgtcgcgcaacaccttcgtatcataataataaaagggggtacgcagttcacggaatttatctatgggaaatgttcctttcatacttcaaaactttgtttataaagaaaagagcgcaaattacgcgaattacacaagagcctttatcagcgagttgtgcaatttgtgtagtttgcgctccatatcattttatatctgtactttcttatttctcttattcttcgttgaacagtgcatcactaagcgactgcaatgcctgattcttatcgcactcacgaatgaggaaagaaatgttgtagttactaccaccgaacgaaatcattcgtaccggtatgtcgcgcatggcatccagtgccttcgcttcgaaaccgacattctcccattccaaatcacctaccacgcagacgatacacatatccttatctactgtaacggttccgtacttcttcaggtcgtccagaatctcgttgaggtgcttcgtattatcaatagatacagatactcctacctcagaagtacaaatcatatcgatagaagtctgatagctctcaaagatttcgaagaccttgcgcaagaaaccgtgggcaagcaacatacgactggatttaatcttgatagctgtaatgttatctttggctgcaactgccttgattttacccttctcggtatcattagaaatcatagtaccgggagcagtcgggtccatcgtattcagcagacgcaccggtatattggcatacttggcaggctgtatacaagtgggatgaagaatcttcgcaccaaaataagccagctcagcagcttcttcaaaatgaagatgacgtacaggagcagtcttgtcaacaatacgcgggtcattattgtgcataccgtcgatatcggtccatatctggatttcggaagcattgatagctgcaccgatcagagaagcggtataatcgcttccaccacgttgcagattgtctatttctccgtaagcattacgacaaatgtatccttgtgtgatgtaaatctcagcaccgggatgcaattccaactgcatctgaagtttctccttaatatatacaggatcaggctccgcattcttatcggtacgcatatattccaaagccggaagcaaaatggacttcacaccacactcttgcaggtaatagttcatcatggcagtagagatcaattctccctgtgccagaaccactttctcctcaaacagcgtgaaaagatctttggtgtaagaacggatgtagtcaaaatgagatttaatcagttcctgacctttctgtttatactcgggagtggaatacaactcattcacatgctgtttatatttagcctccagcttgttaatgatttcgttggcaccctccggatttttcttgtacagatagtccgaaatttccaccaatgtattagttgtgcccgacatagccgagagtacaactatcttttgttcaccatcagtgatcaatttggctacttcctttatccgcgatgcagaacctacggaagtacctccaaactttaaaactttcattttcgttcctgtattaaatgattatatattattatttgtttcttctacagtcggcatcatacccgaatactcggacgtcacatctgttatctgatgacctgcacagcgatatacctgtcccggaaactcgtgaagcagatggagattgtgcgtagtcatcaataccagcgagccacccgtgcggctgatgttatgtaatagtcctacaatagcacgtcccgtttccgcatccagattaccggtcggttcatccgccaggataatctccggagagttgagcatagcacgggcaataacgatgcgttgctgttcgcctcccgaaagttcgttaggaaacttatatcctttattacccattcctacctgcatcagcacttcagcaatacgatcttttatttccgatttgtttttccagcccgtagccttcaatacaaaagcaagattatcgttcaccgtgcggtccgtcaacagttggaaatcctgaaacacaatgcccaatttacgacgcaactgcggaatatgcttacgcttaatgcgactcatatcataccccagtaccattgcttcaccggcagtaatatccagttctccgtagagggtctttagcaaactggtcttacccgaacctaccttaccgatcaggtacacaaactctcccttctgcagctcaaggtttacctcattcagaacgcacaagtcctgttggtgtacttccacatctttatatcgtatcagcggttcagccattcccat

SEQ ID NO: 227 - DNA, 5955 bp, unidentified
  source 1..5955: mol_type = unassigned DNA
gtgtcgacttatattgaccagcgtgtacgggtaagtgcatttaaggccgaacaaactctaaccaaagatacggttccggtaaatgtggatgcagtcgtatattggaccgtctgggacgtggaaaaagctgcattggaagtacaggagtaccaaaaagcgatcgaacatatcacacagactggtctaagagataccatcggtaagcacgaactgtcggatctcttgcaggaacgcgataagatagctgaggatttgcaacaggtcttagacagaaatacgaatccgtggggcatcacatgccagactgtcggtatcaaagatatcgctattccgcaagacctggccgaagcaatgagcaaagaggcccaagccgaacgtgaaagaagagctcgtgtcatcttgggaacggcagaaacggaaatcgcagaaaagttcgaacaagccagtaaaaaatataccgataatcctgtggcattacatctcagagggatgaatatgctgttcgaaggcttaaaagaaaaaggatcaatggttatcgtaccgagttcggcactcgacaccatgaacttaggggctatgggaggcttggtttcattggctaagaacaacgagacaccgaaataaactattttctaataacaaaaaattaccatttatgaaaatacacaaacaagggattacttttgttctccttctattagtcttcacaagttgttcacgaaaaccatcgctgcaatggattcccttcagttgggaaggtgatacaatttcggggatatacattgaaaaagcttttctaaatgttccggtaaaaatagagaatttaccctacgaattcacaatgcagtttgatttaggaacatataattctgtcttttacgggaatacttttgctccttatctcaaagaagccccatctttaatgaacaaaaaagattcaaccgggatgtataagaatgtcaacctgcaaatagggacagtggagtttagcaatgccaatatcggattcatgcagaatttcggaaatgaaatccctaaagattcacttcattcaaatacacccaagcatattggaacgatcgcatccgacatggtgcaagataaagtcttaatcattaattacaaatcaaacaagcttgcaatcacagactttttaccggctgaatacgaaaatctgccggctgaagaatttgaatcagaatatggggtaataaaattgcctttacggattaatggaaaaacatgtaaagtattgttcgatacaggttcaagccctttccagttaataacgacacaagaaagagcttggagcgtatcagaccttactattgtcgactctctaagcggtcctttatggtggggacaagaaataacattttatggctttaatgtaaccaaaccgatcgagttcggcggaaaagccttgaacaattcgaaagtctactacgccaaagacggcctttgggatagtatttatagttccctcgatgtctggggaataaccggaaatgcttatttctttgaaaacaccgtgattatcgattacaaaaacaaactattcaggataaaataaaaattcgaccccatacttcttcattcagatgcaagcataagttattttctacattgccgtatacattcccgacaacgtcgaaaacaacttacacttgcatcaaaacaaaaacacattgccatcttacatcaaacctttgccagagcttggtctaggtcatcaatgatatcatcgatatattcagtacctatactcaggcgcacaatggaaggcgtgatatgctgtccggccagctcttccggagtcatttgagaatgggtagtcgtatacggatggatcaccaggctcttcacatcagccacattggcaagaagggagaatatttcgagcgaatcgataaacttccaggctgctacctgtccgccttcaatctcgaaagtgaaaatacttccggcacctttcgggaaatactttttataaagttcatggtctggatggtctggaagagccggatggttcactttggttactttcgggtgtttggataaatactcgacgactttcagagcattggcaacatgacgctccacgcggagagacaatgtttccagaccttgcagcaagataaaagcattgaaaggcgagatcgtagctcctgtatcacgcagaatgacagcccggatgcgggtgacgaaagctgccgaacctgccacgtcggcaaagaccgctccatgataacttgggtccggtgtgcccaaggtcgggaacttatcggaatttgctttccaatcgaaattgccactgtccacaatcactcctcccaagctcgatccatgtccgccgataaatttggtggcggaatgaacaacaatatcggccccgtgctcgatcggacggatcaggtacggtgtaccgaacgtattatccactatcaacggaatattatgacgatgggccacctccgccacagcatcgatattggtaacatcagaattgggattaccgaacgtttcgacatacaccgctttcgtattctcccgaatagccgcctccaacgcctgcaagtcattgacatttacaatcgtgtgggtaatgccctgagccgctaacgtatgcgtaatcaggttgaaggaaccgccatagagattatcggcagccacaatatggtcgcccactccaagtatattctgcaaggcatatgtcacggccgccgcaccggaagccaccgccagaccagccactcccccttcgagagcagcgacacgcgcttcgaaaactccctgtgtcgaattggtcagacgaccataaatattcccagcatcacgaaggccgaaacggtctgccgcatgttgtgaatcatgaaatacataagatgttgtctgataaatagggacggcacgagcatctgttgcgggatcggcctgttcttgccctacatgaacctgtaatgtctcgaaatgtaatttctttgttgccatagtcgtattattttaaattgttcttcttgctcattttccagcaaaactatagcagacagagatatcagacaagatatatggaaaatacagaaaataacgctatttttacggtcgtcaacagaacgcataaactgtatcaggatcgaaaaaaggattctgatagaattttattcttatgaacacacttgagaaattagacaaagtagacttgcagatcctccgtaccctgcaatcgaatgcccgactcaccacaaaagagctcgccgcgagtgtcagcctctcgtcgacacccgtattcgaacgcctgaaacgcctcgaaaacggaggatatataaagaagtacattgccgtgctggacgccgaaaagctaaaccagggcttcgtggtcttttgcagtgtcaagttgaggagactgaacaaagagattgcggcggagttcacaagaatcatacaggaaattccgcaagtcacagaatgctacaatatatcgggaagttacgactacctgctgaagatccatgcaccgaatatgaagtattaccaggagtttatcttgaacgtgttaggcacgatcgacagcctcggatcgctcgaaagcacctttgtgatggacgaggtaaagcatgaatacggaatccatatttaaacgccgccccgtccctatcttacatttattacttcaatgcataaatccgctggatgatgtccacaaccttcatgccttccaatacgttggtcgtaatacattccgaacttgcaccggaaaggacacggaccacattgcggatcacgaaattatggttctgggcggaacctttataagggccgtagtcatttcccggattcgtcggcgccagttccggcatttcataatctttgatatggcagtattcgacttcgttcatatactgtccgccgattttcacgcttccgttctccgcaacaatcagcatactgctttccatgttcctgttccagacagaagtggaatagctcaggctccccatcccgccgttcacgaagttgaaattcacaaagcccgaatcttcaaaagccgtaagtccggcatggttgaaatcggcaaagcgagcctggatattgcagatatccccgaaaagccagtacataatgtcgatgaaatgggagaactgagtaaaaagcgtccctccgtccaaagcagcatcgccatgccagccaccggatttataatagcgctcgtcacggttccaataacaattcaactggaccatatagatcttgcctaacctacccgaatccaccatctccttgatccaaacggaaggaggagaataacggttttgcatgacacagaacacttgtttacggtatttcagcgaagcatagaccaccttctcggcatcagcaagcgtcagtgccatcggtttctcgatcacgacgttgcaaccggcttcgacagtctgaatggccattgctgcatgcaagccgttcggggtacaaacatttacgacatctatggaaattccgctctgcaatagctccgtcagggatgaaaaaaacgggacatcgtatgcctcaatacccaattcctcacagggacgaatatcacaaagggccaccaattcggctcccggatcgcgtgtcaccatctcggcatgacgtttgccgatatggccacaaccgataactgcaaattttatctttttatccataagcattcgatgggggggtgtcaaaatctccttgtccccgtgcttgacgcggggccgcaaaaggacagaccttatcaatcagatttttatagggtcggttctaatgcgatcccacgtcaagcgcgggaacaggatagtttcgacacacccccttttttagagtttctgttatatattgctgttgtccgagggacatttccgtatgaataggcagggaaaggacggattcgcacaaacgggtggagacgtccaaattgccggatacacgggagatatgccggtaagcttcctgatgatgcactggtacaggataatagatcatggaagggattccctgttctttcaacaggcattgaaggacattccgcctgccgtcttttacctggaccgtatattggtgatagacatgagtcgaaaatatcgatctcgcagggagaaccaacgaatcgcaggaggacaaagcttcatcataccgagaggcaacttgccgacgggtttccgtgaactcctccagatgcttcaacttcacatccagcacagcagcttgcaacgtgtccagacgggagttgcatccgatccgcctatggtggtatttgcattcctggccatgattggcaattatgcggatacgggcagccaacgcctcgtcggaagtcatcaacgcccccccatcgccatagcaggccaacggcttggatggaaaaaaagatgtcgtcccgatatgtccgatcgtcccggcctttcgtacccgcccgtcggaaaagatataatcggcaccaacagattgagcgttatcttccactacatacagatgatagacatctgccaaagtcatgatcggctccatatcgcaggcttgtccgaacaggtggacggccacgaccgcctttgtccgttccgaaacagccgcttctattttccggggatcgatattaaaggtacagggatcgacatccaccaacacgggcgtcaaccctaacaaagcgacaacctcggctgccgctatataagtaaatgccggcagaatcacctcatcgccaggctgaagctccaatgccatcagagcaatctgcaaagcgtccgtcccgttagcacaaggaatcacgtatggaacctgaagataatcagccaaatgcccggcaaaggatttcacctgcggaccattgataaaagcacaactgtcgatcaccgcctgcatggcctcatcaatctcctctttgaaccggagatattgtccatgcaagtcgaccatctgtatctgttcttccaacat

SEQ ID NO: 228 - DNA, 8245 bp, unidentified
  source 1..8245: mol_type = unassigned DNA
ttatgtagattctctataaatagtctcagcttctaatataatggttttatcaggtagttccgggtgctctactttttgtacaattagtcttgatgcttcttccgccatttgttttactggttgttcgactgctgtaatggatggatgaactaatacgcacaaatccgttcccgaaatacaagctatggcaacctcatcaggtatttggactccatgcttttgaagattgctttttgctccgagagcagacatttccgtaaagcaaaatagtgcatcgaaagcaatgtgttgtttcaataattgttccactgcctgctcacctccagagaaatcgactccagcatcaatgacatactctggacaataaggaagatgaaatttttccaaggcatcccgatatccacgtttcctttcttgggagttttgaatatagtcgggtcctgccaagtgaacaattcttctttttcctctacgtatcatctgttcgaccaaaaagaacgattttagataatcatcgattttcactttggaaattggcaaagaagacaaggtgcggtcaaaaaagaccataggaatgccttttttcataattcgctgataagttgcaagattcttttctgtatgacagacactgatgagaatgccctctacccgatagtcttcaaacatctgtagattggccagttctgcattcggattttcatgtgactgagccaatgtaacccgatatccctgtctattcaattcctgttgggcataggtaatgaaattcatataaaaaggagtcagcatttccggaaccactataccgatagtgcgcgtgctttgttttcgcagattgacggccagttcattgcgggtgtatcccattttcttggccatcgccaagattctttcccgtgtttctttactgacattttgcttatcgccccgtaaggcacgcgacacggtcgatttggaaatacccaaagcttgggctatgtcgatgatggtagtgtatttcatggcggcattttttattaacgctacaaagatatgaaaaaaaagcaagtttttgggaacggttgcggattttgggaacggttgcgggaacggttgcgaaagataaatgtataaaatttatttttcatctgatttccagtgtatagttttgtttcagaaatcattaaaatctaataagcaatacacatgaaaaacgatttgaatcaatcgaaagttcctttcataagcaagttggcttatggcatgggagatgttggctgtaatttcagctggatgtttgtcgggaatttcctgatgatattctataccgatgtttttggaatcagtatgagtgccgtagctacattgatgttattttcccgtttctgggatgccatcaacgacccgattattggagggctaagcgataagacgcatacccgatggggacgctatcgtccttggctcttgtttgctgctccgttaaccgctttagttctgattcttactttctgggcacatccggactggagtcagacgcataaaatcatttacatggctgtgacttactgtattttggtcttaggatatacctgtgtaaatattccctatggaacgttgtgtggtgcaatgactcagaatatgaccgaacgagcacaaatcaatacttcccggtcggttagcgctatgatagctattggaattatcaacatcattacgattccattgattgaatggttgggtaatggaaatgcccggcaaggctatctgctgattgcaattctttatggaactatcttcgctgtctgtcatatcttttgttttgccaagacaaaagaggtggtagaagtgcctgttgcccagaaaattccgttacgattgcaactgcaggccgttgctaagaacaaaccttatttgttggcgttgttgggacaggtgctgtttggatttatcctttacgggcggaacgccgatttactctattattttacctatgtggagaatgatgctgtattgttcacctattattctatggccatcatcatcccatccatcattggagcagcctgctttccgaaggtatttcaattgacttccaacaagggttgggcagcctctgtgtttgcctttggtacgggtatcaccataattgcactcttctttttcagtcctgtgacctcccccatacctttctatttatttgcggcactttcccaattcttcttctccggtttcaacaccgcaatctatgcaattattcctgactgtgtggaatatggagaatggcgtacaggcatccggaatgatggtttccaatatgctttcatttctctcggtaataagattggcatggcattgggtactgcgttactggcattgtcattaggatgggccggctatgaagctaacaccacacagaatgaagccgttgtagctattatgaggcattcattcagtaccataccaggaatattatgggtagtgactgcacttgcgttgttcttttataaacttgataaaagaagctataatcgaattctggcagtaattaaatataggttcctgaaacgcaaaaagaatcagcgagaatatgatgttatcgctttaggcgaactgttggttgatttcaacgccttgcattccaatgattttgatagtgtggtgtatgaatcaaaccctggtggtgctccctgcaatgtcttggccatgttaagcaatctgcagaaacgaacagcttttataggaaaagtcggagatgactttttgggacatgctttgcaacaacgcattgttaggatgggtatttctacggaagggctgtcgaaagacaagaaaaggaatactactttggcttttttgaatgactcgaaaacttatccccaccaatatcttttttaccgcaatcgtacggccgacatgaatctggatgaaggggatgtggatgcagatatgctgtcacgcactcgtattttccattttggttccctttcgttcacacataaacgatgtagaaaagctacgcgtaaagctattaaagcagccaaatcaaaacatcggttaatatccttcgaccccaattaccgtcctgtgttatggcctggtgaagaggaagcccgcaagtggatgttgtatggatgttctgtgtgtgatattttaaaagtggaagctagtgaactggcatttattacccagcaaactactattcagaatggagtggactttttgcagaaacattattctatttctttgattcttgtgacatcaggagaagccggcagtcaggcatttatgggaaatcgaaaggtataccaggaggcatttctcaccaatcgaaccatagatacaaccggtgcaggagatacttttcttggatgctgtttggcctatattttggagcaaggcatggagctttctgaccatcagctacaggaaatgctgtttcgagctaacgcagctgcatcactggaaactactcgtaaaggagctattcgagccatgcctactcaagcggaacttgaagactatctaaaacaattgacatcattttaatttaaataataggagattacattatgaaaggtacaatgaaggtagccgttatgaacggcattggtcaaatgggttatacaaacagagatattcctcagcccaaagacaatgaagtattggttaaattggaatatgttggcatttgcggatcagacatgcattattacgaaaccggacgtatcggtgattatgtggtagaacctcccttcgtattgggacatgaaccgggtggaacagtggtcgaagtgggaaagaacgtgaaacatctgaaagtgggtgaccgggtagctttggaacctggaaaaacttgcggacattgcgagtactgtcgtgagggaaagtataatttatgtcccgatgtggtgttctttgctactcctccggtagatggcgtgtttcaggaatatgtagctcacgaagccgatctttgcttcaaactgcccgaaaatgtctctactttggaaggtgcattgatcgaacccttggctgtaggctttcatgcagccaatcaagggaatgcacatgccggacaaacagcccttgttttcggtgccggctgtatcggattggtatccatgatggctttgaaggcagaaggtgtgtctaaggtttatgtagtcgatataatgcagaaacgtttggacaaggcattggaactgggagcgactggtgtcatcaattctaaagaagaagatgtgttggaaactatggcaaaacttaccaacggaaaggggatagatttggtgattgagacagcaggaatggagataaccacccgtcaagccattcacgtgactaaaaaaggtgctaccattgtattggtgggatattccaagagtggtgaaatgactcttccgttgagcttggcattggacaaagaactcacattcaagacagtgttccgataccggcatatttatcctatggctattgaagccgtagcatcgggtaaagtcaatttaaagggaatcgtgaccaatgtcttcgatttcggtgatatccagcacgcaatggatagcagtgtacaggataaggctaatattgtaaaatcagtggtgaaattttaattgaatacacttttagagtgtgcctgtcaagtacaggcacacttgcaaaatccttaaataatcatatcatgaaaaatttagtaataggtatcggagaagctctttgggatatattgccagatggaaaaaagataggtggggcacctgctaatttttcttatcatgtatctcagtttggtttaaatagtcttgtcattagtgcagtaggccatgataagttgggtaatgaaattctcagcgatttcgatgggaagcttttgaatcatcacatttcaaaagtagaatatccaaccgggacagttcaagtagaactggataacgaaggagttccctattatgatattcgggaaaatgtggcatgggataatattccttttacagattcaatgaaggggttggctcaacgtgcaaaagctgtctgtttcggttcgctttctcagcgaaatatagtgtcgcgcactacaattcaccagtttttggatgaaatgccggatgaagggacttataagattttcgacatcaatctgcgtcaaggattctataccaaagaaatcctatgcacttctatgcaaaaatgcaatatattgaagattaatgatgaggaattgattgctgtcagtcgtatgtttggttatccaggtattgacttaaaggataagtgctggattctattagccaaatataatttgaaaatgctcatacttacttgtggagtcaatggaagttatgtctttactcctggagttgtttcttttattgagactcccaaagtaatagtggcagatactgtaggagccggagattcatttacagccagttttattgcatcaatattaaagggaaaatctgtagaggaagctcatcggttggcagtaaatgtttcggcttatgtatgtacacaaaatggggcaatgccacaattaccagattattttatcaaatgatagattatgaaaaaatacataggtttattactaatgttgttttcattggaggcaactgcacaacttcatatgaaggcgaatttacaaacgaaccatctgtggcgtggaatagaggtagcagatgggctggtcattacgggcgatgtaaattactctttatgcaatggattgtttaacttaggtttttggggtggaactaatacccagggtacatacaaggaatttaataatcacatttcatttcagtataaaggtttttctttggctttgtgggatacatataatttttcaacaggtgctacatataataataaggaattttttaattacaaagctcacagtaccggacgctttttagatgcaatattgaattactattgtggggaaagatttcctcttttaatatcttggtcaacgatagttttcggtcgtgacagaaataaagaaaacaccgccaataaatactctactttttgttatctggaataccccatctatacaaaatcccgatggcatgcagatgctggaattggcggagcatttgctttgaataaagccggtagtaaaactaatttttatggtaatacaaatgggattgtacatgttttgctaaaagtaacctttgattggacattagcaaagcatacgatgccgattcatgcttgtatggtatggaatccgcaagcagacagagccttttttcaacttggtatccaattatttaatttataaaaggaaacatatatggaaacattgattaataattactgcatggggatacaacatattggtattccaactatagatatagaaactacggttaaattttatcagcagcttggctttaatgtggtactgcgaacccaaaacaataatcaaaaggttgctttttaaagaatttgctgaaagatgccatatctacaaaattcagttcttcggatatttgccggatacttatctcataattatccaacatgtccaaagcatgataaatgatttctttgcatatcatttcgtggggtgtctgtttaaacgtttctttcgtcaatcgagtcaggtgcttggttgaaacacacaagtaatcaacatagaatgtgacactatgttctgtaacggcattttcacaaatcaatttcatgaaattcattaacaagatgtcttttttgttaagaaattcaggctttcaaaataaatctgtttaacaaagtaataatcaattcgttgtaaatttattgatttttatcgagaaacaaaacaggaacaagattacacttttaagcgattttacattttttcgttttcatataacaaaaaaaacggagtccaaggttaatcttgcgttctttagtaaaaacggattttgagcttcctacgtcgtttcattagccggaccaagtgttttcgtccttctgattatgcctgtctgtccgtcaaattactacagtctccggcggcggactgtatagtccgttgcagtggaccgtacagtctgctacagtggactgtacagtccattaccgcagactgtaataatcttccgtttaaaaggccttgaccgacccctgggaacggcttattcttccctttgtttgtaatatgatatttaaatccccaagaataacaagtgacacaataagggtttttaaaagagtgaaaaagatctatcttctaaattttaacattgttttctattgtttttcaatgaaataggtgtatctttgcactatgttaaaaactcgtatatcggatttggtgtcgtaaacaatctgttctcataaatagattgtttattcgtgtattctcgggatattttttcgagagcaatttcatattactataattttattttttaattacacagggagtatggctatgctttcagtgtatgtttaatatattacgataatgaataatgacaacaatacaattctaggattcgatgtaaatttgatttgtgattttttcttaaatacggagcgacaaggacccggaagtcccgaagtaactcttaaagcattaagctttatagataatcttaccgacaaatcccttattgccgatctcggttgtggaacagggggccagacaatgatcttggcacaacatgtaccggggaagattacaggcatcgactttttcccgggattcattgaacgtttcaacaagaatgccgagaaactgaatctccagaatagggtgaaaggcatagtcggttcgatggatgacctttcttttgaaaaggactctttggacttgatctggtcggaaggagccatttataatatcggctttgaacgaggcttgaaagagtggcgcaactatttgaaaccgggaggataccttgccgtttctgaaagtgtctggtttaccgatcaacgcccggcagaaattcatgatttctggatgagtgcttatacggaaatagatacggttcccaacaaagtagcccagatacaaaaagcaggatatattccggttgcgacattcattcttccggagaattgctggatagaacattattttgctcctcaagctaaagccgaggaaatattcagaagaaaacatgcaggaagcagaatcgtagaagaattgataacatccaatcatcgtgaggctgagctatatagtaagtataaagcatattatggctatgcattctttatctgcaaaaaaaggattctcactgagaaggtgagcgaatga

SEQ ID NO: 229 - DNA, 17866 bp, unidentified
  source 1..17866: mol_type = unassigned DNA
  misc_difference 6943: note = a, c, g, or t
  misc_difference 6944: note = a, c, g, or t
  misc_difference 6945: note = a, c, g, or t
  misc_difference 6946: note = a, c, g, or t
  misc_difference 6947: note = a, c, g, or t
  misc_difference 6948: note = a, c, g, or t
  misc_difference 6949: note = a, c, g, or t
  misc_difference 6950: note = a, c, g, or t
  misc_difference 6951: note = a, c, g, or t
  misc_difference 6952: note = a, c, g, or t
  misc_difference 6953: note = a, c, g, or t
  misc_difference 6954: note = a, c, g, or t
  misc_difference 6955: note = a, c, g, or t
  misc_difference 6956: note = a, c, g, or t
  misc_difference 6957: note = a, c, g, or t
  misc_difference 6958: note = a, c, g, or t
  misc_difference 6959: note = a, c, g, or t
  misc_difference 6960: note = a, c, g, or t
  misc_difference 6961: note = a, c, g, or t
  misc_difference 6962: note = a, c, g, or t
  misc_difference 6963: note = a, c, g, or t
  misc_difference 6964: note = a, c, g, or t
  misc_difference 6965: note = a, c, g, or t
  misc_difference 6966: note = a, c, g, or t
  misc_difference 6967: note = a, c, g, or t
  misc_difference 6968: note = a, c, g, or t
  misc_difference 6969: note = a, c, g, or t
  misc_difference 6970: note = a, c, g, or t
  misc_difference 6971: note = a, c, g, or t
  misc_difference 6972: note = a, c, g, or t
  misc_difference 6973: note = a, c, g, or t
  misc_difference 6974: note = a, c, g, or t
  misc_difference 6975: note = a, c, g, or t
  misc_difference 6976: note = a, c, g, or t
  misc_difference 6977: note = a, c, g, or t
  misc_difference 6978: note = a, c, g, or t
  misc_difference 6979: note = a, c, g, or t
  misc_difference 6980: note = a, c, g, or t
  misc_difference 6981: note = a, c, g, or t
  misc_difference 6982: note = a, c, g, or t
  misc_difference 6983: note = a, c, g, or t
  misc_difference 6984: note = a, c, g, or t
  misc_difference 6985: note = a, c, g, or t
  misc_difference 6986: note = a, c, g, or t
  misc_difference 6987: note = a, c, g, or t
  misc_difference 6988: note = a, c, g, or t
  misc_difference 6989: note = a, c, g, or t
  misc_difference 6990: note = a, c, g, or t
  misc_difference 6991: note = a, c, g, or t
  misc_difference 6992: note = a, c, g, or t
  misc_difference 6993: note = a, c, g, or t
  misc_difference 6994: note = a, c, g, or t
  misc_difference 6995: note = a, c, g, or t
  misc_difference 6996: note = a, c, g, or t
  misc_difference 6997: note = a, c, g, or t
  misc_difference 6998: note = a, c, g, or t
  misc_difference 6999: note = a, c, g, or t
  misc_difference 7000: note = a, c, g, or t
  misc_difference 7001: note = a, c, g, or t
  misc_difference 7002: note = a, c, g, or t
  misc_difference 7003: note = a, c, g, or t
  misc_difference 7004: note = a, c, g, or t
  misc_difference 7005: note = a, c, g, or t
  misc_difference 7006: note = a, c, g, or t
  misc_difference 7007: note = a, c, g, or t
  misc_difference 7008: note = a, c, g, or t
  misc_difference 7009: note = a, c, g, or t
  misc_difference 7010: note = a, c, g, or t
  misc_difference 7011: note = a, c, g, or t
  misc_difference 7012: note = a, c, g, or t
  misc_difference 7013: note = a, c, g, or t
  misc_difference 7014: note = a, c, g, or t
  misc_difference 7015: note = a, c, g, or t
  misc_difference 7016: note = a, c, g, or t
  misc_difference 7017: note = a, c, g, or t
  misc_difference 7018: note = a, c, g, or t
  misc_difference 7019: note = a, c, g, or t
  misc_difference 7020: note = a, c, g, or t
  misc_difference 7021: note = a, c, g, or t
  misc_difference 7022: note = a, c, g, or t
  misc_difference 7023: note = a, c, g, or t
  misc_difference 7024: note = a, c, g, or t
  misc_difference 7025: note = a, c, g, or t
  misc_difference 7026: note = a, c, g, or t
  misc_difference 7027: note = a, c, g, or t
  misc_difference 7028: note = a, c, g, or t
  misc_difference 7029: note = a, c, g, or t
  misc_difference 7030: note = a, c, g, or t
  misc_difference 7031: note = a, c, g, or t
  misc_difference 7032: note = a, c, g, or t
  misc_difference 7033: note = a, c, g, or t
  misc_difference 7034: note = a, c, g, or t
  misc_difference 7035: note = a, c, g, or t
  misc_difference 7036: note = a, c, g, or t
  misc_difference 7037: note = a, c, g, or t
  misc_difference 7038: note = a, c, g, or t
  misc_difference 7039: note = a, c, g, or t
  misc_difference 7040: note = a, c, g, or t
  misc_difference 7041: note = a, c, g, or t
  misc_difference 7042: note = a, c, g, or t
atgttcaacaaacaccctaaaggtctgattgccgcatcctttgctaatttgggcgagcgtttcggcttttataccatgatggccattcttgtactttttctgcaagccaagttcggactggatggaaaagaggcaggtttgatctactcaacattttatttttctatttacattcttgcattgataggtggtattattgccgacagaacccgtaattacaaaggtaccatctttgccggtattgttttgatggcggtaggctacttgatgcttgccatcccgtctcctacaccggttgccaataaaaccttgtttttggtgattacttgtgcggccttgtttgtcattgctttcggaaatggtcttttcaagggaaatcttcaagcgctggtagggcagatgtacgacaatccccaatattccagcatgcgtgattctggtttctccttattctatatgttcatcaatgtaggtgccatctttgctccgtttgccgcagtaggcgtacgtaactggtggctgtccacattcggctacaattatgatgccgacctgcctgccctttgccacggacatctggcaggaacgctgactcccgaagctgtggacacttatagtgcactggcaacgaaagccactatttccggaacacccgtaacggatatgacggtatttgccaatgaatatctgaacgtgtttaccaccggtttccattatgcattcggtgtagctatcttggctatggttctttctttggtaattttcgtcattaacagaaagaaattccccgatcccagcaagaaggtggctgcaaaagcgggcgatgccactgcagtggagatgagcgcacaagaggtaagacagcgcatgtatgcattgtttgccgtattcggtgtggtaattttcttctggttctcgttccatcagaatgggttgacactgacgtattttgccaaggaatatacagatttgaatttgttcggcatggctatttccgctgagctgttccagtctttgaacccgattttcgttgtatctctgacaccggtcatcatggctgtctttgcagcacagcgtgccaagggtaaagagccttccactccgcggaagattgccatcggtatgggtattgctgccaccggcttccttataatggctatcggttcttatgtaagcaacttgccgatgcacaaggatattatcgctttgggtacctctccggtgaaggtgactccgctgttgctgatggttacctatctgatattgactgttgccgagttgtacatttctccgttgggcatttcattcgtatccaaggtggctcctcccaaatatcagggtatcatgcagggcggttggctcggtgctactgccattggtaatcagttgctcgttatcggtgctatcctctacgaaagtattcctatctggatgacgtggacggtatttgtagtagcgtgctgcatttccatgttcaccatgctgttcatgctgaaatggcttgaaaaggtggcgaagtaatcggaaacgaaagataaaactaaaggctgcgcaatgttcgtaatgaactgcgcagcctttagtttttggagggcttttaatgccgggactcagatttccagtcccatgatgtagtcattcatgtaatatccgtttcctatcgggaaatccccttcacggagttttcgcattcccatatgttcgtaaaactgcagtgccttgttggtgcggtttacattcaattccatcagacaagggccgggatgtacttccttgatgtacttgatggcttctcgaaagaggaaactgccgcaatgtgcaccctggtaataggggagcacataaatcttttgcaggtggaataaatcttctccttgctgctgtacggacacatagcccgccgcttcacattcttcgtaggccaggaagtagacgtggccttcctcttccatttgcttgcggatattgtccaatgaatacatccattccatcatgtagtcggtctgttcgggagtaaggatatccttatacgtgacggggaatatttgctgcgcaagtttctgaatcagtgcgcagtctgctgtcgttgcttttcttatggtaaacatatcggttgtatttatactgtttggggtgtaaagttaagccttttttgtgaaacaatcgttatctttgcagaccgttaccgaactaactaattctgattttaaaaattatggcatttacgagcaacattatgattgtccgccacagattgctgaaggaactggtaaagctgtggaataacaacgaacttgtggataaaatagaccggctgcctatcgagctgagtccgaagaggtccaagcacgcgggacgctgctgtgtgcacaaagagcgcgcggtgtggaagtacaagtcattgccgcttctgggactcgatatggaggacgagacggatgagctgacccccttgtcggagtacgctgcccgtgcactggacagagcggaaaatggcaggccgaaagacaacatcatgtgtgtgattgacgaagcttgttcggcatgtgtgcagattaactacgagattacgaacctctgccgcggatgtacggcacgcagttgccaggtgaattgtcccaagaaggcagtgcacgtcaaggagagcgggcaggcatggattgaccatgatgcgtgtatcagttgcggcatctgccataagagttgtccctaccatgccattgtttatattcccgtaccttgtgaggaggcttgtcccgtgaaagccatcagtaaggatgagaaggggatagagcatattgacgaaagcaaatgtatctattgcggaaagtgtctcaatgcatgtccattcggagcaattttcgaaatatcgcaggtgttcgacgtgttgcacagaatccgcaagggtgagcaggtggtggctatcgtggctccgtccatcctggggcagttcaagacgactattgaacaagtatatggcgcattgaaacaagtcggttttacggatatcatcgaggtggctcagggagcgatggataccgtcagcaacgaggcgcacgaactgattgagaagctggaggagggtcagaagtttatgacgacttcctgctgtccgtcttatatagagctggtgaacaagcatattcctgccatgaagccttacgtgtctggcaccggttcgccgatgtactatgccgcacgcattgccaaggagaagtatccggatgcaaaggtggtctttatcggtccttgcgttgccaagcgcaaagaggcgcagcgcgacgaggcggtggactttatcatgactttcgaggaggtggcttccgtgcttgccgggctggatattcagatggagcaggcaaagccctattccatgagtttcacttccgtgcgcgaggcgcatggttttgcgcaggcaggaggcgtgatgggtgccgtgaaagcctatctgaaggaagaggcagataaaatcaatgccgtacaagtggctaatctggataagaaggctatcggtgcgttgcgtgcttacgccaagtcgggcaaggctccggggcaatttattgaagtgatggcttgcgagggcggttgtattaccgggccatgttcgcataatgaaataactgccggaaagcgccagctgacgcaggagttggcaaagagaaaagagacgtattagccctttgtccgtttatatgaagcatttgattgacaaactgcggagcaatcgcaggctggatgccgaagagtataaagccttgcttctttgccgggacacaaaacttgcagcctacctgcaggatcttgcccgggaagaagcgcttgcccgctttggcaataaaatcttcattcgtggactgattgagataaccaaccgttgccgcaataactgctactattgcggcatacggaaggagaaccggaacataacccgttatgagctggcgcaggaggagattctttcgtgttgccatgaaggctatcggttgggcttccgtacctttgtgctgcaagggggcgaagcgccggcggtgaaggatgaggggatggtggagacagttgccgccatccggcaatccttcccggattgtgccattaccttatctttgggcgaaaaatcgcgggaagcctacgaacgtttcttcctggcaggtgccaaccgctatctgttgcggcacgaaacctgcaacgaagggtattatcaccggcttcatcctgctgagatgtccctttcccatcggttgcaatgcttggactggctgaaagagataggctatcaagtgggaaccggaatcatggtaggcagtccttaccagacggtggaccatctggtagaagatattctcttcatcgaacggtttcagccggagatgataggcatgggaccttttcttccgcatcacgatactccgtttgcctcttttccgccgggagatatggagttgacgctgaagttgctttctatcttccggctgatgcatcccgcggcactgatacctgctaccactgccctggccacacttgctccggacggacgggaacggggaatattggctggcgccaatgtcgtgatgcctaatctttcgccttctcatcagcggacgaagtactccctttatgataacaaagcttctgcgggtgccgaagcggcagaaggtttgcaaaaattggaggaacaactgaaagggataggctacgaggtatcaaaagagagaggagattatgagaatggagaattgaccgttgataattgataattttcaaatcttcattctttattttaattaccaattgtcaatttacgaagtgtataacataaagtcaagacaagcagaagaattcatcaatcaccaggagatattggatacattggagtatgcgcaggtaaaccgcaacaaccgtccgctcatcgaaagtttgattgacaaggctgctttgtgccagggactttcccatcgggaggcggccctgctgctggaatgtgacgagctggaactggtgcagcgcatctatcatctggcacgtgaaatcaaacggaaattctatggcaaccgcattgtgatgtttgccccgctttacctttccaactattgcgtgaacggttgcgtctattgcccgtatcatgccaagaaccgtaccatcccccgcaagaaactctcgcaagaggagatacgccgcgaggttatcgccttgcaggacatgggacataaacgcctggcgctggaagccggagaagaccctcgaaacaaccctatcgactatatcttagagtccattcgcaccatctacagcatccaccacaagaacggggccatccgccgggtgaatgtcaacatagccgccactacagtggaaaactatcggttgctgaaagaggcaggcatcggcacttatatcctttttcaggagacttacagcaaagagcattacgaagccttgcatcccacgggaccaaaaagtaattatgcctaccacaccgaagcgatggaccgcgctatggagggtggcatcgacgatgtaggtatcggtgtattgtttggtctgaatacctatcgctacgacttcgtaggattgctgatgcatgccgaacatctggaagctacctttggcgtgggtccgcataccatcagcgtgccgcgcatctgtccggcagatgatatttcgaccgaggattttcccgatgccatctcggatgagatgttctgccgtattgtggcggttacccgcattgcggtgccttatacgggaatgattatttccacccgtgagtcggaagccgtacgccgtcgggtgctcgaactgggcgtttcgcagataagcggcggttcgcgcaccagcgtgggaggctatgccgtgccggaagccaaagaggaagattcctcccaattcgatgtgagcgaccggcgcacgctggatgaagtggtgagttggctgctcgacctggggcatatccccagcttctgcaccgcctgctatcgcgagggacgtaccggagaccgcttcatgtcgctcgtcaagcgcggacagatagcaaactgctgccagcccaatgcactgatgacattaaaagaatatctggaggactatgcctcctccgaaaccaaggagaagggcatacagctgattcgtgaggagatggagcatatcccgaaccccaagatacgggcgatagccgaacgtaatcttcaggagataggggaggggaaaagagactttagattttagatttcggatttatgaataatacacctcgttccaaccgcctgcacattgccgtctttggacgacggaacagcggaaagtccagccttgtcaatgccttgaccgggcaagacacggcattggtatccgcaacgcccggcactactaccgaccccgtgaccaaagccatggaagtatatcctttgggcccgtgcctctttatcgatacccccggttttgatgacgacgaaggcgaactgggcggtatgcgcgtggagcgtaccttaaagacggtggagaaagcagacatcgccctcttgctttatgaagctgacggaacgctggaacagcaatggctaaagctgctggcagcgcgcgaaatccccgtgatactgatactgaataaagccgattcccgtcaagacaccgcttccgtggttcttcggattgaaaaggagtgcgggcaggctcccgttgtggtcagtgccaaagagggtaccggcattcaaggtatcttcgatgctatcctcgaaaagcttcccgagaattttggtgagcagactatcacgggcgatttggtgcgtgaaggagatgtcgtcctgctggtgatgccccaggatatacaagcccccaaaggtcgtctcattcttccgcaagtgcagaccatccgcgaactgttggataaaaagtgcttagtgatgagctgcaccaccgacaagctgcaagcctccctgcaagcccttgnnnnnnnnnnnnnnnnnnnnnnnnnnnnnnnnnnnnnnnnnnnnnnnnnnnnnnnnnnnnnnnnnnnnnnnnnnnnnnnnnnnnnnnnnnnnnnnnnnnntgcttagtgatgagctgcaccaccgacaagctgcaagcctccctgcaagcccttgcccgtccgcctaagctgataatcaccgattcacaagtattccccatcgtctatcaacaaaagcctgccgaaagtagtcttacttccttctcggttctttttgccggctacaaaggagatatcaatgccttcgtggagggagctgccgctatccatagcctgacactccaatcgcgtgtactgatagccgaagcttgcacccatgctccgctgaccgaggacatcggcaccatcaaaattccccgcctgctacgaaagcgcatcggcgaggaattgcagatagactttgtatctggaaatgactttcccaaagacttgtcccgatatgatttaattatccattgcggcgcttgcatgttcaaccggaagtacgttctcaatcgtatagcccatgcccgcgcacagcacatccccataaccaactacggagtagcaattgcgagtctgaccggtatattggataaaattgttatctatcggtaaatatccctctccctctctgttcacgttactgatgttatagagtagtgtgaactacttttcttgttaacgatgcttaatataaggtactttgtaatacaaggtactgatataatacatatatttgtgtcatacaaggaacaacaatagaatgaatgagaacactcattactctattgcgcagcaaaatagtaaatcgtaaattgtcaaatagtaaataccattatggatgtaaacaatgtaaagtcgcaaatgcgcaagggcatgcttgaatattgcatcatgttgctgcttcacaaggagccggcttacgcttcggatatcattcagaagttgaaagaagccagactgattgtagtggaaggtacactttatccgttgctcacccgtctgaagaacgacgacttgctgggttatgaatggattgagtctacgcaaggtcctccccgtaagtattaccggttgacggaaaaaggagaagtctttctcggtgaactggaaatgtcctggaaagagttgaacgagacggtgaatcacatcagcaattcttgaaatgaccacagagaatatgctgcattcgccgaatggtaaatagtaaatcgtaaatagtcaaattgtaaataaatagtgtgttatgaaaaagacattaactgtaaatttaggtggaaccgtttttaatattgatgatgacgcataccgccttttggataattatctgagtaatctcaagatacacttccgtaaggaagccggtgccgacgagattgtagatgatatagaacgccgcatttccgaactctttgccgagaaattgtcggccggttcacaagtaatcacgattgccgatgtggaagaggtgattgcccgcatgggaaagccggaggacatggagacggaaggagagagcagcagtgccgatgccggtagtacaaatgccggaggtggttatggtgccggtgcatggagcagcaataccgcttatagcactacacgccgccgtctctaccgcaatcctgatgacaagatgctgggtggtgtcatcagtggaatggctgcctacctgggatgggatgtaactttacttcgactgttactgcttgtcatcttgatttgtggggtagggacattgataccggtctatattgtgtgttggctggttataccggaagcccgcacagcagccgagaagttgagtatgcgtggcgaggccgttacggtggagaatatcggaaagacggtgacggacggttttgagaaggttgccaatggggtgaatgattatatgaggtcggacaaaccccgtactttcttgcagaagttgggagatgcattggtgatgattgtcggctggttcttgaaaatctgtctggtgatatttgccattatctgcagtccggtattgtttgtatttggagtggtatttgtggcgttgttgtttgctgcgatagcggtggctgttggtggcggtgcggctctcatttcctttttcccgatggctgatgtggtactgcctacttctccgttgtctgctattgtgatgtacattgcaggaatcttgctggtaggaattcctttggtcagtcttgtatgggccatcttcagtcagatattcaaatggcagccgatgaattccggtttgaagtggacgctggttatcctttggattgtaagtgcggcttgcttcggaatctgttttgcagtgcaaggggctactttcccggaattgggtatatttaacttctgagaatagtaatttcttttttaattgatatcgtgtttgtaggaatctgatttctataaacacgatattttttatttcaatgtaattatttgttatacagtggaatatttcgtttggaaaaggtgttttttaaacgttcgtttaatgaacgcaaagataacgtgtatttttgaatctcgcaaaatgtttaataaaaatattctataaatttctttttagtgagtataatactttgtcagtaagcctattgcattgtatttctctaacttcttccttttactaatttttaagtaatcttccctctttaattttcttaaatattgacgttcaaaaaacgaacgtctattgaacgctttttgcttgcaatagattcgtttacagcattttacctgttaggtaatgaatgactgcaaaaaatctgttgacaagaagggcgtaaagcttgtcgtattctacataaagtgcccgcaagtaattgaatttcaggtgtatgtaagagattcaaagccccaggagaacacccttgtctgaacaaaagcataaaaatgggaatagagaaagaggtcgaaatctggtatgctatgcgtgccacctaccgcagagaaccggatgccatgcatctgctcaagaaagagaatttgggctgtttcattcctatgcaatacaagatatgtataaaaaaagggaaaaaagtccgtgctctggttccggtcgttcataatctgctttttgtccatgcccgtccttccgatgtgcagcgtgtaaaatctcaagtcacttatctgcaatatatcaccgatacccgcagtgggcagaagattattgtccccgacagtcagatgcagcgtttcattgccgtatccggcacttacgatgaccatcttctttattttcaaccggatgaattgaacttgtccaaaggtaccaaagtccggattaccggcggtgaatttgaggggcaagagggtgtgtttctgaaggtgaaaggcgcacgtgaccgtcgcgtggttatcgaaatacaaggtgtcatagctgttgccatggccactatccatcccgatcttatagaagtaatcggctgaactttaatttttaattcttaattctataattgcttatgtctctttccgaagaagcaatcactcttcagcgtgctgcgcacgaactgatgtatttgggtatggacggcagtcccgtctatagcgatgacttgtcacggcggaacggtgaggtctaccgtcttaccatggctttgtaccggtcgggtgtaaaaggcactaccatcgaagagcaggcaaatgtctgtcttgcccttcttatgggttacagcgcctcttttgtggaccatggcgaaaagcagcagcatgtccaggaagtgctggactgttgttgggatgtgctcgacgcccttcccgcttccttactgaagctccgtctgcttactgcctgctacggtgaagtgttcgacgagtctttggccgacgaaggccgttccatcatcgcctcctgggattccttatcacttactcccgaacagcaggaagcggttgatgaatttcagaatgtgacagacaatccctatccatgggaatatatcgatgaataaaacttttcattataatgcttaacaataaatccgtattgattaccggaggaacgggttccttcggaaagaagtttgtggaaaccattctccgtgattatccgcaagtaaagaaaattattatttactcccgcgatgagctgaagcaatttgagctgaaacagaaatatcccggtcataagtatccgcaactgcgtttctttatcggtgatgtccgtgacctcgaacgcctgacgcgggcttgcgaaggagtggacgtgattatccatgcagccgccatcaagcaggtggataccgctgaatacaatcccgaagagtgcatcaaaaccaatgtacacggtgcgcagaatgtgataaaggctgctcttgccaccggtgtacagcatgtggtggccctttctaccgacaaggcttgtgcccccatcaatctttatggcgccaccaagctcacttccgacaagttgtttactgccgccaacaatatcagcggttccaaggacatcaggttctccgtagtccgttatggcaatgtgatgggttcccgcggttccgtaatccctttctttatcaacaagcgtgacaacggggcgaaggaacttcccataaccgatatgcgcatgacccgtttcaacatttcactggaagccggtgtcgctttggtcatgtatgccatcggacatcacctgggtggtgaaatctttattcctaagattccttcctatcatatccaggacgtggctaccgccattgcacccaatctgccgcaggtggaagtgggcatccgtccgggagagaaactgcacgaggagatgattactgtaaccgatgctcttgatacaatcgatttgggcagatattatgtcattcttccttccgtatctttcaagcacagtcgcgaagagttcatcagacatcacaatgcagtatccgttcccgacggtttccactacagcagtgacaacaatacggagtgggagacagtagagactatgcgcgagaatataaagaaatacgttgaccctaatttcgaggtgaaatgataagcaagcctattccatacggtcgtcagcatatcacagatgaggatatccgggcagtcatcgataccctgaaaagcgattacttgacacaaggtcccaaaatcagggaatttgaaacgaaatttgccgaatatgtaggtgcacaatatgccgtagcggtgaacaatgccacttcggggcttcatcttgcagctaccgcactgaatgtaaagccgggcgacaaggtgattgtcactcccatgacctttgctgccagtgccaactgcatccgctattgtggcggcgaggtggtattctgtgatattgacaaggatacttacctcatggatatccgtaaactcgaagccatgcttaaagcttctccccgcggtacttacaaaggtattgttccggttgattttgcaggctatcctttggatctggaagagttcagaaagcttgccgacgagtacggcttgtggattatcgaggatgcctgccatgctcccggcggctatttcatggacagtaaaggcaagaaacaacattgtggcaacggttgttttgccgactgtgccgtattctctttccatcccgtgaaacatatcgctacgggtgagggaggcatggtgaccaccaacagcaaggagctctatgacaggctttgtctttaccgtacgcatggcattacgaaagaccctgctttattacacgagcatcatggtggctggtattatgagatgcaggagttagggtataattaccgtctgactgattttcaggctgccttgggtatttctcagctggagcgtgcgaaagcaggtcttgaacgccgccatgaaatcgtgagacgctataatgaagcgttttccggaatagatggcatcaagactccgttcaatgctgccgatgtctatcatgcttatcacctttatatcattcaagtagctgaccgcttgggcctttataattatctgcacgagaacaatgtctatgcgcaggttcattatgctccgcttcatctgatgccttactatcagcagtggggcaataggaaaggcgatttacctatagtagaagagtattacgaacattgtctgagtcttccgatgtatcccacgctgacggacgaggaacaggagtatgtgattgaaaaggttatagaatttgtagcgaaatgaaaaatatagcaatcattcctgcacgtggcggcagtaaacgtattccgcgtaagaatatcaagccctttatgggtaaacctatcattacatattccatagaggcagctttacaaagcggtctttttgaggaggtgatggtttctaccgatgatgaggagattgccggaatagcttgtaagtatggtgccaaagttccttttatgcggagtgccgagatgtcaaatgactatgccggtactgatgatgtaattcttgaagtactgaggaagtataaagagcaaggcagggagtttgaaacggtttgttgcatttactcaacggctccttttgtcactcccgaaagactccgggaagcatacggaaaaatgaattcggagatagattccgttttcacttgtgtggcttattcctatcctatacagcgcagccttcacatcgtggatggaaaaattagtatggtttatcccgaatacaaaaatgcacgttcccaagatttagaaccgatttatcacgatgccggtcagttctatttctctcgcactgctccctttgtggagagccggactttttggggtgagaatacagccgggttggtactttccgaacttgaagtgcaggaccttgatacacagactgactgggcattggcagagatgaagtatgagttgcttcataaatgatgtaatgcagaaaatctatctccgtgccgatgcaagtgctgccatcggctacggtcactttattcgtactctggctttggccgatatgctgaaggacgattttgattgtaccttctttacttgccatcctaccccttatcaggtgagtgagatggagaaggtatgtcctttcatccccttacaggaagaatcgcattatgatgagttcctttcccttttacaaggtgacgaaattgtggtacttgacaactatttctttactactgattaccagcgtgccatcaagcaaaaaggttgctgtctggtgtgtgtggatgatatgcacgacaagcactatgtggctgatcttatagtcaatcagggattgggttacacgcgtgatgactattcgtgtgaaccatatactcaatttgcctttgggcttcaattttcattgttgaggaggcctttcttcaatgttgcgctgcagaataaacggaacaattattcaggaggtttatatgtattggtggcttttggtggttctgatttcttgaatttgacgtatcagaccattcatgcaattaaagccaaagacaatgtgaagaagataacggcaattgtcggtgattcgtatgcagccgagaatatggttgatgaccccaaagtaacctatcagaagaatttgtctgccggttccattgcagacttgtttagtactgtagatgtcgccatattgcctgcctctacgatgatgaatgaggcattggcctgtggaactcctgttataggagggtattatgttgataatcaggagtacgactattatatgtttttgcgtgaagggctgattcagggggtgggtgattataccgatgccgctgcctttactcttgttgctgagaatttggataagatggccattcgtaaaagacatgccatcactccggatattcccaaacggtttgtcaatttgtttaaaagtctgttgatatgcaagtaacttcacaaagagcttcggccatattgtataattatctgtctggcaaccattttgataaaccgttcttattgccggcaaatgtgtgtcctgtagtgcccctgtcgtttatgaaagcaggtgtcggttttgaatttatagacatagatgaaagccatgccatgtcaaccgagaaatgtttgacagctatagaggcgggaaaatattccggtcttgtatttgtgcatgcctacgggaaaaagtatgacaacaaagaattttaccgagcagtgaaaagtctcgatcaaaatctttgtatcattgatgattgttgtttgtgcattcccgaattggtagattccttgcctgaaaatgtggatctctgcctttacagtaccggatatgctaaattcatagaactttcctatggtggctatgcaagttttaggggggtacgaagttgttgattattagtatgatagcattagtgaacaaaagcattcggtatatataaggaaatgtctcctggagaatgtcagatatatgcttccggctgactatccttggctggacgcctcaaatttgcaaatgaccgatgaggaatattttgacatcattgaaagaaagctcccaaaagtgattgcggaaaaagagaaaataaacaagatatacaggaatctgcttcctgaatcgattcagatgggagatgatttccagaactggaggttcatgattgtcatcgagaaccggcagaaggttcttgacgcaatattcaaggccggtctgtttgccgggactaatttcccttcggtttcatacatgttcaaaggtgtttcttctcctgttgcggaagtggaggtgaagcatatcgtcaatttgtttaatgatttctggttcagtgaagcacaggcaagaaagatctgtgatgtgataaattcggttatatgaataaaagattattgatactgggcgcaggtgaaatgcaggttcctgtcatccgaaaggcgaacgatatgggattgcataccatagtcgcagatatggatgcgaatactccgggaatggggtacgcctcggaaccggttcttgtcagcacgatggataaggaaggtgttttggaatgtgccaaacgtcactctgttgacggcatacttactacaagtgacgcgcctgtaaatgtggtttcctatgtcggggaacagctggggcttccgtccatgtccactgaggtcgcaaaaatctgtacaaacaaatacttgcagagggaaatgtttgcggccaacgggattgatgtaccatttttcatgctttgtgataaagatacggacttgggcacattgcaagattatccatatattgtcaaaccggtagattcctctgcaagccgcggagtaaaaaaggttacaaatcataaagaacttgtacttgctttttccgaagctctcggttattcccgtaccggaaaggccattgtcgagggctttataacaggccgtgaattcagtgttgaaacatatacgcaaaacaataaaactaccgttgtcactattacggagaaactttgtatcggtgaggcagaaggcttctttgttgaagatacgcacattgaaccggcgcgtataacgaaacaggagtgggagctggtttcggagaccgtatcaaaagcactttgcctgattggacttaataattgtccctcgcatacagaaataaagctgaatgaatcgggcgcttatatcatagaaattgcttgccggcttggaggagattatataacctctgatttggttccattgtcaaccgggatagatatgctgagaaatctggtgaactgttctcttggtttgcccgttgatgtccttcgcaaacatgaaaaatgctcagcggtacagttccttaatccgctcaactatcagcgttgtgtggattttctaagctcttcccggtcatcggctgtttttcggtctgaaataagaccttattctgaaaaaaaaataaaaaactctttagaccgtttagggtatatcatacttcagactgatagtatggaagagcttgaaagtattctaaggacgattaaatagtaaagacatgagagataagtgtatgattgtggctgagatgtctgccaaccataacggtaagaaagaaacagccattgaaaccgtcagggctgcaaaacgtgccggagccgatgccgtcaagttgcagacctatcgggctgataccattacgcttcgctgtgacaagcctgattttataattaatgaaggctctatatgggacgggcaatatttttatgatttgtatgaacaggcttatactccttgggagtggcatgaagagttgttccatgtggccaaggaagaaggactgatctgtttttcttctccttttgataagacagccgtcgatatgcttgaggctttggactgtcccgtttataagatagcttctttcgaaattacggatattccattgatagaatacgcggcttcgaagcataagccgatggtacttgctacaggcatagccaccgaagaagatattcaattggctgttgaagcttgccgcagaatgggaaataatgatattacggttcttaagtgtacctcttcttatccggctccagttgaggaagccaatctttgtatgattcgtgatttggcagaacgtttccaggtaaaaagtggactttccgaccataccctggggagtgtctctcccattgtggcggttactcaaggtgcgagtatgatagaaaagcactttattttgaatcgttccatcggtggtccggattgttctttttctatggaagagaaagattttgcccaaatggtaaaagatgtgcgcatggctgagttatctttggggaaaacgacttacgaattgacggagaaaatgagaggtagccgttccgcatcacgttctctctatgtggccgaggatatgaaggccggagaagtgattacggagcggaacgttcgctccgtccgtccgggcttcggcctgcaccccaaatatctgaaagatatattgggaaagaacgtgaaccgggatttggagaaagggacgaggtttgcattggagtacgtgaatggttag

SEQ ID NO: 230 - DNA, 14196 bp, unidentified
  source 1..14196: mol_type = unassigned DNA
  misc_difference 7351: note = a, c, g, or t
  misc_difference 7352: note = a, c, g, or t
  misc_difference 7353: note = a, c, g, or t
  misc_difference 7354: note = a, c, g, or t
  misc_difference 7355: note = a, c, g, or t
  misc_difference 7356: note = a, c, g, or t
  misc_difference 7357: note = a, c, g, or t
  misc_difference 7358: note = a, c, g, or t
  misc_difference 7359: note = a, c, g, or t
  misc_difference 7360: note = a, c, g, or t
  misc_difference 7361: note = a, c, g, or t
  misc_difference 7362: note = a, c, g, or t
  misc_difference 7363: note = a, c, g, or t
  misc_difference 7364: note = a, c, g, or t
  misc_difference 7365: note = a, c, g, or t
  misc_difference 7366: note = a, c, g, or t
  misc_difference 7367: note = a, c, g, or t
  misc_difference 7368: note = a, c, g, or t
  misc_difference 7369: note = a, c, g, or t
  misc_difference 7370: note = a, c, g, or t
  misc_difference 7371: note = a, c, g, or t
  misc_difference 7372: note = a, c, g, or t
  misc_difference 7373: note = a, c, g, or t
  misc_difference 7374: note = a, c, g, or t
  misc_difference 7375: note = a, c, g, or t
  misc_difference 7376: note = a, c, g, or t
  misc_difference 7377: note = a, c, g, or t
  misc_difference 7378: note = a, c, g, or t
  misc_difference 7379: note = a, c, g, or t
  misc_difference 7380: note = a, c, g, or t
  misc_difference 7381: note = a, c, g, or t
  misc_difference 7382: note = a, c, g, or t
  misc_difference 7383: note = a, c, g, or t
  misc_difference 7384: note = a, c, g, or t
  misc_difference 7385: note = a, c, g, or t
  misc_difference 7386: note = a, c, g, or t
  misc_difference 7387: note = a, c, g, or t
  misc_difference 7388: note = a, c, g, or t
  misc_difference 7389: note = a, c, g, or t
  misc_difference 7390: note = a, c, g, or t
  misc_difference 7391: note = a, c, g, or t
  misc_difference 7392: note = a, c, g, or t
  misc_difference 7393: note = a, c, g, or t
  misc_difference 7394: note = a, c, g, or t
  misc_difference 7395: note = a, c, g, or t
  misc_difference 7396: note = a, c, g, or t
  misc_difference 7397: note = a, c, g, or t
  misc_difference 7398: note = a, c, g, or t
  misc_difference 7399: note = a, c, g, or t
  misc_difference 7400: note = a, c, g, or t
  misc_difference 7401: note = a, c, g, or t
  misc_difference 7402: note = a, c, g, or t
  misc_difference 7403: note = a, c, g, or t
  misc_difference 7404: note = a, c, g, or t
  misc_difference 7405: note = a, c, g, or t
  misc_difference 7406: note = a, c, g, or t
  misc_difference 7407: note = a, c, g, or t
  misc_difference 7408: note = a, c, g, or t
  misc_difference 7409: note = a, c, g, or t
  misc_difference 7410: note = a, c, g, or t
  misc_difference 7411: note = a, c, g, or t
  misc_difference 7412: note = a, c, g, or t
  misc_difference 7413: note = a, c, g, or t
  misc_difference 7414: note = a, c, g, or t
  misc_difference 7415: note = a, c, g, or t
  misc_difference 7416: note = a, c, g, or t
  misc_difference 7417: note = a, c, g, or t
  misc_difference 7418: note = a, c, g, or t
  misc_difference 7419: note = a, c, g, or t
  misc_difference 7420: note = a, c, g, or t
  misc_difference 7421: note = a, c, g, or t
  misc_difference 7422: note = a, c, g, or t
  misc_difference 7423: note = a, c, g, or t
  misc_difference 7424: note = a, c, g, or t
  misc_difference 7425: note = a, c, g, or t
  misc_difference 7426: note = a, c, g, or t
  misc_difference 7427: note = a, c, g, or t
  misc_difference 7428: note = a, c, g, or t
  misc_difference 7429: note = a, c, g, or t
  misc_difference 7430: note = a, c, g, or t
  misc_difference 7431: note = a, c, g, or t
  misc_difference 7432: note = a, c, g, or t
  misc_difference 7433: note = a, c, g, or t
  misc_difference 7434: note = a, c, g, or t
  misc_difference 7435: note = a, c, g, or t
  misc_difference 7436: note = a, c, g, or t
  misc_difference 7437: note = a, c, g, or t
  misc_difference 7438: note = a, c, g, or t
  misc_difference 7439: note = a, c, g, or t
  misc_difference 7440: note = a, c, g, or t
  misc_difference 7441: note = a, c, g, or t
  misc_difference 7442: note = a, c, g, or t
  misc_difference 7443: note = a, c, g, or t
  misc_difference 7444: note = a, c, g, or t
  misc_difference 7445: note = a, c, g, or t
  misc_difference 7446: note = a, c, g, or t
  misc_difference 7447: note = a, c, g, or t
  misc_difference 7448: note = a, c, g, or t
  misc_difference 7449: note = a, c, g, or t
  misc_difference 7450: note = a, c, g, or t
atgatttatccgctgcctgccgtattggtgagctgcggaagcactccggaggaatataacattctgactatcgcatggacggggacgatttgtacgaacccgcccatgtgctacatctccgtacgccccgaacgccactcctacgacatcatcaagcggaatatggaattcgtcatcaacctcaccacgaaagacatggcacgggccacggactggtgtggcgtacgctccggaaaggactacaacaaattcgaggaaatgcatctgacaccggggaaaagcaccgtagtcagcgcgcctctcatcgaggaatcaccgctttgcatagaatgccgggtaaaggagattatggctctcggttcgcacgacatgtttatagcggatgtggtaaatgtacgtgccgatacccgtaatctgaaccctgaaaccggcaaactggaactggcggaaacgaatccgctggtctatgtgcacggtggatattatgagctgggagaaaagataggcaaattcggatggtcagtagagaaaaagaagtaataatgcgataaaggttttaagagatggagttgcgacgaatcttgatgggcttatatctgttggccttccccgccatgatgtggggacagactccggttgtgcccggtactgccgacgaagagcattccggacaccgcaaggaaactccggtcaatttcggtttcaaaggcggtttcacctcttccttgttccttgtatcccagttcagcgtcaacggagtgcccatcgacgaagtgcagaacaattacaagataggatatttcggctcccttttcatgcggataaacttcgatcgccacttcctgcaaccggaaatatcctacaacatcaaccggtgcaacatcaccttcgagaaacctctgcccgaagacgccgcatcaggagcccggctggaggaagcctccattacatcgtccatccacagtatagacatccccgtcatctacggatacaacttcatcaaggaggggccgtacagccttgccgtctttggaggacccaaagtgcgctatatatgggacaggaaaagtgacatcgacttcgagaatttcgaccaggtgaatatccgtgaaaggctgcgtccgctcaatctcagtttcaccgtcggcgtatccgtcaccatctcacgcgtctttttcgacttccgttacgacatggggctgcataacatctccaaaagcgtgacatacgatattccggccgacaacaacgctgctgacgaaaacacgaaaaacgaaatccgttttcaccgcagggacaatgtgctgagtttttctttcggagtgttcttttgacagtaaatttcttccttttctttcaatttattcatttatttcccgtaaatttgtgcgcttaataagagaacacagatttatcaaacttatctaataagcagaatgaaaagagatgatttaattttcgaacttatcgaaaaagaacaccaacgtcagctcaaaggcattgaactgattgcatcagagaactttgtaagtgaccaggttatgcaggcaatgggctcctgcctcaccaacaagtatgctgaaggataccccggcaagcgttactatggtggttgtgaggtagtggaccagagtgagcagattgccatcgaccgcttgaaacagatcttcggcgcagaatgggccaacgtacagccgcactccggtgcacaagccaatgcagccgtattcctcgccgtgctcaatccgggcgacaaattcatgggactgaaccttgcacacggcggtcacctctcccatggttcactggtcaacacttccggtattatctatactccctgcgaatacaatctgaaccaggaaaccggacgtgtggactatgaccagatggaagaagttgccctgcgcgagaaacccaaaatgattatcggcggcggttctgcttattcccgcgaatgggactacaagcgcatgcgcgaaatcgcggacaagataggtgccatcctaatgattgacatggctcatcctgccggactgattgcagccggtgaactggataaccccgtgaaatatgcccacatcgtgacctccactacccacaagactctgcgtggtcctcgcggtggcgttatcatgatgggtaaggacttccccaacccctggggcaagaaaactccgaagggagaaatcaagatgatgtcccagttgctggattcagccgtattccccggtatccaaggtggtccgctagaacatgtcatcgcagccaaagccgttgccttcggcgaaatcctgcaaccggaatggaaagaatatgccaagcaggtgaagaaaaacgccgctgtcctggcacaagccttgatagaccgtggcttcaccatcgtttccggcggtacggacaaccactccatgctggtagacctgcgcagcaaatatcccgatttgaccggtaaggttgccgagaaggcgttggtatctgccgacatcaccgtaaacaagaacatggttccgtttgacagccgctcggctttccagacttccggtatccgtctgggtactcctgccatcacaacccgtggtgccaaggaagacctgatgctcgaaattgccgagatgattgaaaccgttctgtccaacgtagacaacgaacaagtcatcgcagaggtacgtgcacgcgtcaatgcgaagatgaaagaatacccgctgtttgcttattaataagcaaacagaattaaaaattaagaattaaaaattaaaggctgcgcaatgttcgctttgaactgcgcagcctttaatttttaattctaaacgcgctccgcgcgtttagctcagcccttctatatttccgtccacaatatcaatgtgttcggcttgtggtttcttgggtaatcccggcatacggagaatttcaccggcgatggctacaatcatttccgcaccgttattgaccacaatatccttgatgtggaactcaaagttgttgactgcaccgtatatcttcgggtcggcagagaaggagtactgcgtcttggcgatacagacggggtaatggctgatacccatctgctctatcagtttgataaccttgcgggagtggagactgtaagtcactacgcttgccccgtagaggttgcaggctaccttttctattttacgttccacgcaatcgctctcttcgtaggtgaaggtcagcggttcggatggtttgttctcgatagtatctactaccagattggcaaggtcaacggctccctctcctcctttggcaaaggcgttgttcacggcaaaacctacctcaagcttttcttcgcaatggcggcggatagcttccacctcctcgtccgtatcactggcaaaacggttgaatgccacgatgacctgctggccgaatgaacgcaaattgcgtacatgtttgtccagattgccgaagccctctttcagtccttccatattgggttccttgatgcggtccagactgacaccgccatgcatcttcagtccttgtgcggtagcaacgattatcgtcagcttgggctgtaggccgctcttgcggcacttgatgttgtagaacttctccgcacccaggtcagctccgaaaccggcttccgtcactacataatcgccgaatgtcatggccatttttgtggcaagaatggagttgcaaccatgggcaatatttgcgaacggtcctccatgaacaaaagcagcagagccttcggtagtctgtaccaagttggggttgatagcatctttcaacagtacggtaatggcaccggctactcctaactccttcactgtgaaaggagtaccatcgaaacggaatcccagaataatattttcaatacggcgacggaggtcgtcgaggtctgttgccagacagagaatagccataatttcggaagccggggtaatatcgaagcccgactcctcagtaatgccgttggtgctcggtcccaatccggtgacaatgctccgcaaggaacggtcattcacatcaagtacgcgccgccagatgatttctttcagtccgaagccgtctgcctgatgctggtacaagtaattgtcgagcaaagcggaaatcatgttgtgtgcggaggtaatggcgtgaaagtcgcccgtaaagtgcaggtttatcttctccatgggaagcacctgggcatatcctccaccggcagcaccgcctttcatgccgaagcaaggacccagcgagggttcgcgtaaagccacaatcgctttcttgccaatcttgttcagccccaatgccagcccgatggacacggttgttttaccgatacccgctttcgtagccgtgatagccgtcaccagtatcagattgctcttcttcactttctcttcatcaatcagatgcgtaggaatcttggctatgtaacggccatagttctctacttcgtcacgcgggatatccacactttcagccacctgctttatcttcttcagctctatgctgcgggctatttcaatgtccgatttcaatcttcgtcttttctttaaataacaactttaatgttttgaaagttgcaaaagtacgaaagatgtggcaaagtacaaaagaataccgtattttcacctgaccacctgcatcttctatctatttgaaccgcgacgtatccactgcctcccgttgcttctccttatatccaccgaatttataggtgaacgatacgccgaattcgcggaagcatgagtaatgattcgtcacattctgcgtcttgaaacggatgcggggagaaatctgtcccgtctcaaaaatatcgttgcaatagaggttgagaatggctttgttcttggcgaagccgtagcgcagggcaatattcacattgcccgacgtaggcaggtcgtagatgccctgaatggctttactatgcacaaatccggtcaccgtcagcttcaagtcgggtttggtggagagagtaaaagtattgttcatctgggcaatgccatagcattgctttctatcgaaaggaatatcccagaaatcaccatccttttcgcgatgccacaagccgatgagggtaagacgagaattcaaccaattcttcaccttaaacggtatagaggcttgtatacctgcttgttgctgataatcaaaattgagtgtcttgtagatttcaaccagacgttcggaagattggtagagcgtctgtacggagtagtccttggtatggttgaaccaagcgctgaagatgtatttgctcttcaaaatataggtcattttaagctcatactcttgcgccggtttcagcaacggattaccatgcagctcagagtatccgccaccgatgtaagagacggcatcctgcaccgcccagtagtcgggatagtccttgtcgctgctcagagagagctgaaggatatgtcccggtgacggcatatagttcaagttgacgatgggataccagtcccactggttccagacgggagtcttgtaatgctccacagccagggaagcgtccaaagcgagtttgtcgccgaaactcttgctgaaacctgcatagatattccaggtctgttcgcggcggcgggacttcatattgcttaaggcatctgaggaggtcagttgttcgccggtttcggggtcgtaataatattggtagctgttgtcgatgctggtagtatagatggctccgtaattcaaatcccaaccttttcccagactgtgctcctgggccagaaagaatttccatcggttgatgcgttggcaatcttcggtgtagaagtcaagttcctcatcctgcatgcggctatgcagcaactggtcggacggggaacggtagtaggtcagttcggcaccggctttgaggccgaaaggggtacgatagtccagacggccgttgtgcagccagtcggtgctattgccatgagttgtggacacctgcgtgcccgtcacgcccgtccagttgtgggaggtggaatagccaccgttatagacgaaactcagctgatggtccttggcgatgttatagtccgcccctaccctgaaattatgggtatggctgcggccacggcccacctcatatgttgtcatggggtgaaccgagccgtctgccagggtgtgcacagcctctttgtcggtagtagagtagccccggccatggctgtgcgagtaaagaaaatctgctgagaatttatttttgctgaagagcaggctggcgcgttcctcaaagccttcgttatgcttctggcgatacttggcatagagttcgccttgccaggagtctgggccgcctgccgattgtttcaaggtgatattgatcagtgcgccacgcacctggtagcgtgcaggggcgttgtacatcacttccgccttctctatgtggctggcagggatgctgcgcagcaaggaatagagctgctcggtgctgagggtggttactttgccgtccaggataacggtgactccctggcctgccaactgcagcccgccattcatctcgatgacgccgggaagctctttcacggcatcgtaggcattgtctacggggaggttccggataaggcggggcaggtcgtacaccagcttgccttgcgctgcctttacgatggggcgttcgccggtaatcatcacttccggcaaggtctgataaagactgtccagacgggcatcggtcgtgataaggctgtcggcgctgaggatgcggttgtcgtctgcaccggaggtggttgcagtgccgttgttctcttgtgccgaaagactgatgctcaaagcacagcatacaatagggagtaaatagaatcgtttcatgttcttctttttatttatgtttatattcttcttctgcaaatcttcgtctgcaaagtacggcagaatcagcagaaacttgtgttatcagcggcttaccaagtgttatccagtgttatcgggagtgttatttagtcttatcggatgatagggttcacaatattaatcttacctttgtatgtataaaagtaaccggaaacaaacatgaaactgccattcaaatatattgccatacttgtcatcgtctccctggccggcatcttcgcctaccaagcctactggctgacggggctctaccataccatgcacagtgaaatggaaagggacatcaccgaagccatgcgcatgagcgactataacgaaatgatgatacgcgtggataaaatgaagcaggacgacataaaccacggtgaagtcagcgtatcagccggatacagcgatgacggaaaatcatttgtccgtagcagtaccaccatctcccgtgaagattctttggacaacaccaccctgcacgaaaccttcatgcccaaaggagacagtgtttacgtgacccacccgaacgattcaacccgcgtggaagtcagtgtcaggnnnnnnnnnnnnnnnnnnnnnnnnnnnnnnnnnnnnnnnnnnnnnnnnnnnnnnnnnnnnnnnnnnnnnnnnnnnnnnnnnnnnnnnnnnnnnnnnnnnncagtgtttacgtgacccacccgaacgattcaacccgcgtggaagtcagtgtcaggaagaacgttcctttgctcaccaaagaggacagtgtgcttttcatcgaccagcatagagaaacggataaagtccgttggatgtctgccgattctgcccgagagcgtctggaagaagcagtcaaggactcagacagctctccccaatccgcattgagtgccaaagggggactggatgtgattttgcgcgaccaaaacagtatgctggaactcgccacctacctccagcgcggactgcattcgggactggacatcatttccgaccccgacgtagtgctttatgacagcctgctgacttcattcctgcatgaccgtaacatcaatcttccccataggctgctacatcttcacaaaggcagcaaatgggactctaccattctctatatagatacattggtaaacatcggtacccccggctatgtgcctacctcaaaagccgtggaatataattattctttcgacatcaatacaaatcaaagctaccgtctcatcatggaaccggccggcatgttggtcttgcgacagatgtcgggcattctcaccacatcattcgttattctgatcgtactcgctttctccttctggttcctgatacgcaccatcctgaaacagaagacactggaagagatgaagagcgatttcaccaacaacatcacccacgaactgaaaacccccatcgccgtagcatatgccgccaacgacgctctgctcaacttcaaccaagcggaggaaaaggccaaacgcgacaaatacctgcgtatctgccaggaacagcttcagcgcctcagtggactggttgaacagatactttccatgagtatggaacgccgcaggactttccgcctgcacccggaggagtttgcaatacgtgatattctggaaacgctcatcgaacaacacaagctgaaagcggaaagctccgtccacatatcggtggacatcgaaccggaagatttgagcgtacttgccgaccgtacgcatttcagcaacatcatcagcaacctgatagacaacgccatcaaatattcgcacggagaagccgaagtggccatccattgccgcaaggtaaccgtcgaagggcagaatgaacagaccgaaatctccgtcagcgaccacggtatcggtattgctcccgagaagcagaagcacatcttcgacaaattctaccgcgtacccacgggtaatctgcacgatgtgaaaggctatgggctgggattgttctatgtgaagaccatgatagagaagcatggtggcagcgtatcggtaaagagtgagttgggaaaaggaagtacctttacgataaggatatgataacattatttgttagggtactttacattacttgttaaggagctttacattacttgtaacaaaagcgacaattatggaaaagataactgtacttctggttgaggacgaacagaccctcgccatgattatcaaggacacattggaaggacagaacttcatcatccacaccgcagcagacggtgaagagggattgcgcaagttcttcgacctccgtcccgacgtgctggtggcagacgtgatgatgccccgcatggacggctttgaaatggtgcgccgcatccggcagaccgacaaacagaccccggtactgttccttaccgcccgctccaccatcaacgatgtggtggaagggtttgagctgggtgccaacgactacctgaaaaagcctttcggaatgcaggaactcattatccgcataaaggccctggtaggcaaagctttctcctttacagaggaaaagcccaaagaaactaccgtttttgaaatcggtgactaccgtttcaattccgtcactcaacgacttgcttttgcaggcagcaccccgacttcacctaacgcggatacggaagtggaactctcccaccgcgagtccgagatactgaaacgtctttgcgagaaccgtaaccaggtggtcaacacccagaatgtattgctcgacctctggggagacgacagcttcttcaactcccgcagcctgcatgtgttcatcaccaaactgcggcataaactggccggagacgagcgcatccgtatcgtcaatgtgcggggaataggatataaactaatagtgaactaaactaaaactaaactactatttatgagaaagttattattcattacttttatctgttcctcactctgcgcctatgcacagagcgagattccggaagacacaataaagaaccggcctcccgtaaagaaagagcagattcccttttctccaaaagagaacaagcgtacgggccttgatgaaagccagccccaacaaagtctgcagggcgaacagcaggaagagataaatctccatctccctccctccgacaatatggagcccctgccctggacggacatgaagaagatacactttcagaaaaacatctttgaatgggacttccagcgtttcgccgatttcctgctctcgccggaagtcgtactgacgatgtacggcagccataacacctatcctgcaatgggctccatcatgcaggctggcgcaggagttacttattacagtcccgacggacattgggaattgagcggaggggtatatgccgcccattattccatctcccaaccttcatccattaccggtgcccagtatgccaaaagggatgccccccgaggtactcaatgggacataggctacaatgcctccgtatcctaccgcatcaatccctacatgcgtctacatgccttcggccagtattcgggctacgggagaagtaactcctttcatggatatatgaacccgatgtatccgcaaagcggttatggcatggtactggaactgaaagtgacggactggctcgacctcaacggaggcctggaacggagctacgaccccaccaaaatgaaatgggtgacttcgcccgtcttcgcccctaccattcgtataaagaaatagaaataatacaaagatatttccggaaatagagggaaacgagtatctttgttcagtctgcccctatgcggcagacagcaactgaaattgtgaacaaagaactatgaaacgaatcttcttctgcatcatcattttacttgcaggcatatcgtccgtcagcgcacagagtgggatgcctgccgatacggtacgtaccgctgtacgtggcgaagcgtctcccgaaggcatgtctccgtctgaaaaggagcttctgccggacgtgaagaattacgacggcttcctgctggatatggggctgatgaatctgtccacccccactcttcccaaattcactttggagataccggatgccagcaaagactatagccgcatcttccagttgaacccgaacgtgacttattcacaaggtctttcgaacatattctcactcagcaactcccggtatttcagttcgaatcccttcggactgacgggcttctggggctctactgacaacctgcaaatgggaagtttcactttgaagaacggcatgcgcatccatacgtacggcgaatatgacaaggacggctggaaagtgcccaacccttccgcactgccttgggaaaagaacaatttcaaaggggcgttcgagctgaaatcagccaacggatcctttggcatacgcatcgaggtacagcagggcagacacgtgccctattgatgcccatcacttaacaacagaatcaatgacaagaaagaaaatactggtgataggcgccaacggttttaccggcagacgtatcctggatgatttgtcccacaacgtgttttatcagacaacgggctgttccctgcacgacgacatctgtccccattcgggcaactatcgctttatccgcacggatatatgcaaccgccaggcggtggaaaaacttttccaggaagtacagccggatgttgtaatcaatacctccgccctctccgtccccgattattgcgaaacgcaccatgcagaagcggatgccgtcaacattactgccgtggagcatctggcagaatgctgtgaggcgggaggcagccgttttatccatctttccaccgacttcgttttcggtggtgatacggaccgaccctatacggaggaggatattcccgctcccgttaattattacggctacaccaaactggaaggtgagaaacgtatcgctgccgtttgcagggattatgccatcgtgcgcgtagtggtggtgtacggtgccgccctgcccggacagcatggaaatgtgctccaactggtggcaaacagattaaggaacaatgaggaagtgttcgtcgtatccgaccaatggcgtacgcccaccttcgtgggagacgtgtcgcaaggagtggagaagctgataaatcacccacaaaacggcatctaccacctctgtggcagcgagtgcctgaccattgcagacatcgcttatcgggtagcggacgtattggggctgaatcgctcgctcatccgtcccgtcaccacgaaggagatgaacgaaaagacaccacgtccccgtttcagcgggctgagtatagaaaaggcacaccgggaactggggtatcagccgcgcacgctggaggaaggaataaagcagatgttcggatggtaaatgatgcagtcggatggtaaatgatgcaggttgaggatggcagcagattcgactacagcaactccggctctgccagtcctttctctttgcgatacacacgtaccatctccagaatcacatctccatatttctccgcccctttctttccgaaatacggaatgcgtacaagcatagccttatccgaagggagcagattgctgatacccagaattgccttctgctgaatgacggtgtatacgggcaaccccaacgcggaagcttctgcattgcgccatgccaccaagcggttgtaaagttccggatgcaacacatccgtgggtacttcaacagccgcagcatcgcgtttccgctcacgcggacgtttctctttatcagcctgcttactgcttccctgcccttctttggcagcggcacttctccctttgcctttacccttctgcaaagccgaatcatcaatggaaagcagtgctttctgcttcaagtattctgccacatggaaaccattctccagcacataatccagcaaatcagtcttcaagtcaaacatttcctccagctcctccatggcatcccggagcttcttcttcaactctttattatcagaagttaccgcactcgccatcaccgcatccagcggttgcaactgctcttgaaaataagtggcggcagcgtgtatgcgcccctgcaaagtcgggtcggctgcatagtcctgcgcagtatcaatcaggcgggtatactggataccgaacttctgggccactttcgtcactttgtcgtgaaaacgttccacttcctccttgcaggctgcgagttgcttgggaaagagcttgtacaagtgttcgtctatcagccgcacataccgccgcaaagcctgctccatgggctggaaatcgaacaggcccgacagcagttccaggaaataggtctgctgcaaggaacggaagcgtttctcgtccggctcgtttctccgtgcctccatcgtgaaggtttccaccgcattgtcattgattatggctcttgcagaaagcggagcactgagcaccactccctccagcgtcttgcagcggctcagggccacatacgtctgcccatgcgcaaaggaggcgctggcatcaatcacggcacgttcaaacgtcagtccctggcttttgtggatggtaatcgcccaagccagtttcaacggatactgccggaatgttccttcaatatcttctgtaatctccttggtttcctcatcaagcacatacttggcattcgtccactcttcctcctgaagtaagaaggtagcgtcacttcccttactgcgcacttcaattccatctgccgacacggctgtcacctctccaatcatgccattgtagtaacggtgttcgccggaggtgtcgttcttcacgaacattacctgggcaccgcgttccagttccagcacctcatccgtgggataggaatattcgggaaactttccgtcaatcttggcacgaaaggcatacgagcgtcccggaagttgttccagctcatggtcattaatccgttgggcctgatagttgtgggtcaccaggcggatgtatccttcttctttatctggtacgaaattgggaatataccggcggttcaaggcttccagcacttgcccgtcacaacggttttcgcgaatgcggttcagtaattcaagaaaagtcccatcgttctgccgatagactttctttagttctatggtgcaatattccgtctgcttcaaggcctggctggagaagaaataaggcgtgtcatagtatttgcacagcatctgccactcatcgtctttcactacgggagacagctgctgtaagtcgccaatcatcagcagttgcacgccgccaaagggtttgttccggtcgcggaaccgcctcaagacggcatccaccgaatcgagcaagtcagcacggaccatactgatttcatcgatgaccaataaatctatgctgcgtataatgttgattttctctttcccgtaacgaaaacggtaggttgccttgccatctgcgctgaatgagctttcgggcacataaggagcgaaaggtacttggaaaaaggagtggatggtgacaccgcctgcattgatagcggcaattcccgtcggtgcaagtacaatcat

SEQ ID NO: 231 - DNA, 31177 bp, unidentified
  source 1..31177: mol_type = unassigned DNA
tcagcggaacaatgcctccccgttcaccggttccccgttgtgggtcagagcaaagtatacgttgcttccttcggtgctgtagtatttcgtgggcgctgccacactgccgatggtgtcgccgggattcacataggaattctctttcactgtgatctccgtcagctgtccataagtggcctcatagccgtcacccagatccagggtcaccgccttgccgatctcctcattttcgaagattgaagtcacttttccctgtgcacaagcggtcactgccgtaccttcttccgcggaaaaaatggtggcgggattgtatttatactgatccagtgtagcaaaataagtgctcttgtccatagagtaatgcatcagaatatcactctgcaccggttgctgtaatccgtcactttctgcaaagtgcagtgtcttctcaacgaccacatccccgcctgctgtctgctttcccccggtctcttccttttgtcggtcggcatcggaattctgctgctctttctgtgcggcctccagcagggtctcctgatccgtcagccccggaatctctacgttgccggagcctacctcctggggcatatagtccagatcatcctcggtgacaggagttcccgcgatctcatttcccgctgtattatttgccgtcagtccggggatgttctcgtcctccttcagaagatgttcgtcgttattctccgtgatctcctgtaatttgtcatccgcattgttgggaagcgcagtgaagtccaaggtataaccatcatccctggactccacattctgccccttcatatagacccctgtcatggtcaatgctgccagtacaaaggctgaagaggctaacattataatacgttctttgttaataccgctctttttatttcttctcatatcctatccgcatccttcctgttccctgagtcaactgcctgctatacaatcgtttcaaccactttccctggtttatcctatagtcttgcccgattcatgggttttattcagaatgtcttcgatatgaaatttgcatttatttggaactattcagagccatgtaaatagcgtcgaatgtttgcattcgtaagaacatttgatgctatttatagggcgaagtaactgaatagttatatttattctatgcctgtgcggcataggcagccatatccacgtgctgtaccgtacccacatttccgttttcgtataagaaaataccggtcttgcggatcacagcattggtcgcattggcattggtagtgccgtcctgggccttacggtctccctgcagggtaaaatccgtagaagcgttttgcagacagatagcaccgacacccttgtcagaaagtttgtacagtacgtcgttgccgttttcatccttgcaccagatttttaattttgaccagatggaatcgttctcatcgatccagccattgccatcctcatcatactgcgccagatctgcaaagccatccccattccgggtgccgaatagctcactgccgtcgttgatagtgccgtcaccgttcttgtccagtgccagatagccgctgccattcagcacggagatctcttcttccttgccatcggcatccagatcaaaataaaaggtctgatccgacacttctgccacatcagtatccaggttgatcaccagcggatcatggagtgtgaattctgctacattgagttgctctttgtagtattcctcgcatctgcggctcatatttacatttacattaaaattgatctctctgccatccttggtccgtacacttcccacggtggaaaaactggtatcctcctgttctatgttccaggtctcgctcacatagttcaatattttcacacgggacgtgaccagattgaacacgtctgacgcaggtgttgcggttccctgtgtactgccggaattcgtctgggtattatttacgctattccctgtattccagctgtttccggtctgattaccgctgctccatccgttttcctgcatccagtcccgcaaagtgctgttcctggacgggaataataaatcaaaaatataacgcaccgtatattcccggatggtagacaatgtctgttcactggcactgcttcgcatatcccatctggcagaagataccagcaagcgactctgccagtctttggctgtcatcgtggtgttctctgcagtgttctcctgttcctccgtgttctgtgtggtatcctcaccattcggtgtcttctgtcccttagtggatacatctgtcagacctgcctgataatccgttatctcaaatcgtctgacgcttgtcttagaagcgtgatagcttctggcggaatccattcctatgcttgcggaatcaattctcaaatctgtaattttctcctttccccgacctcaccacgaaccaacagggcgcgcttcctgtaacgcttaacagttcaccgccgcatgtattcataaaagcgcctgctccgcagtcgacgccgctaagcggctcatcttttatttcatacatgcggcgctccgctcatgcaatatcatatgttctgctttgtgtgccagcacccacgcagaacatatgatattgcatggctgaactgttaaactaaaaaaagatggtaaagaaacagaatacatataatatgcctctgtctggttaccatccgtggtgtcattatcaaactgtaaaaaataagtagcaggaagtgactggccttgtcacctctctactacttatatcgtccgctatggacattttatttagtgttaatttactgctgttggggctgagtgggagcgccaggggttccgggtgcgggaggcaccggtctgccggctgctttcagctttgctgcgatcatgctggctaccatttctctggtcaccacgatgttgccaccgaagggattgatcacgaatcccagcgccgggctgatattgccctgtgcatctttgcgcagcagcattcccgcataatcgtcaaagttcatggcgaaagtctgctgattctcctcatctctccacctttttagctctgtccagtcagtgaacgccatgaagaacttccgaccgtcctcggtggacagcatcgggaactgtactttggcatctcttgcgatggtcacccggccgttttcatcgggcacaggcaccggatcgatcacgaccggagacaggaactttgctttctgcagttcatccaggaacatctgtctgtgttccggggtgtcctctgcttttaataattcaatggatcccaccatcatggggttggataccggtttgttaaattccatattttttctccttacttctcattgtaactattcagcctctcttcgcgaaacgcatctgcgatggttagtcacatgtctctgaatagttacactcggttatagttgatcaggcatcccttcaggatgatctgacgttcttcgtcggtcagctctcccagcttcagggtgaattccttcatgccttctccggttgttaccacatatgccttaatttcctcggccttgtcttccacggctttcttaatactaggaatgaacaggtaatccagattcttgaaaggcaggtctccgggctggatcaggaaaggaagcatgccccagttgatcaggttggaacgataacgcttggtggcatactcgttggcaatatttgcccagccgcctaataccttctggcaggaagcagcctgctcacgggcagaaccgtctccgggcttcactgcgaaaatagtggaaccgaatccggtgttctcacgacttgcatcgggatactgtttctttacttcacccataacatccttcagtaccggaactgcctgacagggatgtccgccgttcatacgctctttctctgccttctggatctccttggcacgtcctacatactgcggatccttacggcttaaagtgaactctgccagtcccagaggattggagcggtaggaagaggtctcaccggagggaatcagctcatcggtagtagttacgggatcgtggatctcggatactacctgcagtaccagattctcaggcagggcacccatagcgggccagtccttgatattggggccgaactggatctctacgctctcgtctgccacaccgtgggaatcgaagacacggttcttgtaaatattgctatcgaaatgatatttgtattttccgaaatctccatcgaagtctgttgcgggagtcagcacacccttgttggctgcagtggctgcgatggaacgggcatccatcagagctacggaagcgatctggccgttctgcaacttggagccttcacggttcgggaaatttctggtagagtgacggatactgaatgcgttattggcaggcgtatcaccggcaccgaagcagggaccacagaacgcagtcttcatgactgcaccggtctctaagatggtagccgcacagccgttgcggatcagctccatgtatacgggcatggatgcgggatatacgcttaaagtaaactcatccgcaccgatgtatctgcccttcaggatgtcggcagccgcacagatattctcgaatccgccgccggcacagcctgcgatgataccctgatctacaatgaacttgccgttctttactttattcttcaaagtaaagtctacagcaccgtccagacttactttcgcacgcttttccgtctcatccagaatatccatcaggttcgcattcagctcttcgatggtgtaagtattgctgggatggaacggcatggcgatcataggacggatcttgtccagatccacctcgatcaatccatcatagtatgccacctggccgggattcagttccttatagtcttcggtacgtccgtggatctcatagaactcacggatctggtcatcggtcttccagatggaggacagacaggtggtctctgtggtcattacgtcaatgccgatacggaaatcagcactcagggaagccacgccgggacctacgaattccattactttattttttacatagccattcttgaatactgcgccaatgatagccagtgccacgtcctgaggacctacacccttcacgggagcaccctttaagtatacggctaccacgccgggcatgttgatatcataggtctggttcaacagctgttttaccagttcgggaccaccctcgcccatagccatggtacccagtgcaccgtaacgggtatgggaatcggaacccaggatcatcttgccaccgccggctaacatctctctggcaaactgatggataactgcctgatgagggggtacatagactccgccgtattttttcgcacaggtcagaccaaacatgtggtcatcctcgttgatggtgccgcctacggcacacagggagttatgacagttggtcagtacatagggcatggggaacttctgcagtccggatgctctcgcggtctggataatacctacaaaggtaatatcatggctggtaagcttgtcgaaacggatcttcagcttgtccatattgccggaggtattatgctcctgcagaataccatatgccatggtgtttttcgctgcttcttctttggagatcgtaatgccggtcttcgcctgtatctgactggctgcttccggggtatccgctacgatgtccgtaccgtttaccaggtaagcgccgccctgtgttaactgaatcatgctcgtcctcctgttattccacttcttatgcgtaatgtgcatctaaatgtgcactcctttcattatactggattgttttctcagatgcaatgatcttataggatgtttttgccactgtaccacgctaaattttatttttctccgggaaccattcctcttttgttccggtgttgctataatatcctcagaaattatgccattttccgaaaatctatacgaaaacgacagttgtcggccgaattccggcggcagcggaaaggaaccttatgaatgtagtaatagctatcgattccttcaagggaagtatgacctccatgcaggcgggtttgagcgccgccacggggatcaaacgtgtttataaagatgcacatattaccgtccgtcctctggcggacggcggggagggcaccgtcgatgctctggtaaacggctgtgacggccgtatgacacaggtgcaggtcacaggcccttccggccaccccgttgtctgtccttacggcattgtcgacgagacccataccgcaatcattgaaatgtccggtgccgccgggattacccaggtcagcggagaggaaaagaatcctctgaacaccaccacttacggtgtaggcgaagtcatcaaagatgcaatccagaacggctgccggcattttattgtcggtatcggtggcagtgccaccaatgacggcggtgtcggaatgctgcaggcacttggctttggctttctggataaaaacggaaatcagatccgcttcggagccaaaggactggaggatctggaatccatcactacggatcatgtgcttcccgaactcaaggaatgtactttccgcatagcctgcgatgtctccaacccgctctgcggagagcagggatgttccgccatctacggaccgcaaaagggcgctacttccactatgatcctgcagatggacaaatggctggcttattatgccgctctggccagagaacagtttcctcatgccgatgccaaatatcccggtgccggtgctgccggcggtatgggatttgcttttcttaccttctgcaatgccacactggaatccggtattaagatcattctggaagaaacccatctggaaaaatatatccgggatgcagatgtcgtgatcaccggggaaggccgccttgacggtcagacggttatgggaaaagctcccatcggtgttgccaagattgccaaaaaatatgaaaaaccggtacttgctttttccggctgcgtgaccaaagaggccgttgcctgcaacgcagagggcattgatgcctttttcccgattctgcggaacgtggtatccctggatgaggctatgcataccgacaatgccatgaccaatatggcggataccgcagagcaggtattccggaccatacagacattttcctccgtctgcaaataatgcactttacagtttttctcttaatgataagcttatcaacgtaaaaagtttctaaatgtaaagcgaagatttttcacactcaaatttgctcctgcactgtatactcaagtatcccataccacagcttaaaatctccggatgacatcgtgtccgcattgcccctgccttctaacacttttcaagaaaatgtcaacaaccagctgtagtatgggctgccaccactccggaagttctgtttgtattgaaaatgccattttgggctaaaaaaatacaaaagcaggagattttggccttttataagagcttattttcgctaaaatgggaaaaataataaaatcagtacaaaaaatgtttgatttagaagtttttttgtactgattttgctattttgatgcgatttgcaccaaagcaatagaaatgcctatagtgtacagatattatgagaaagcacaaaacacccacgtcagatggaatgtccttccaagaatgattgtcggaaggtggtgattttttctcgaaaagcattgaaagacaggatggaatgaacaggatgtttgcggcaggccccttgcatgacagccctacgctacgaaccatgcaaaaaaagagcgaaacagcatcgcttgtgcgcaagctcccacgacgtgttccactctatttctgcatggctcgtagctatgctaactttccatttactaaactatagattattcttcgtatccgtttggattgttcttctgccatctccaggaatcttcgcacatctctttgatgccattctcagccttccagccaagttccttctctgccagagaagcatcggaatagcaggtggcgatatcgcctgcacggcggggtttgatcacgtaaggaatcttcacgccggtagctgcttcgaagttcttcacgatgtccagaacactgtagcccacaccagttcccagattgtagatcttcagtcctgcattctcctcaatcttcttcagagcctttacgtggccctttgccagatcaacgacatggatgtagtcacgtacaccggttccgtcgggggtatcgtaatcatcaccgaagacacccagctctttcagcttgccgactgctacctgtgtgatataaggcatcaggttgttggggataccgttgggattctcgccaatggtaccgctcttgtgagctccgatagggttgaagtaacgaagcaggatcacattccattcgggatctgccttctggatatccgtcaggatctgctccagcatagatttcgtccagccgtaagggttggtgcactgtcccttggggcattcctccgtaatgggaacaaatgcggggttgccgtatacggtagcgctggaagagaagataatgctcttcacaccatgttttctcatgacatctaccagggtcagggtaccggcaatattgttctcataatattcccagggcttctgtacggactcaccgactgccttcagtcctgcaaaatgaatgactgcgtcaatctgttccttgctgaagatctcttccagagcttcacggtccagaatgtctgccttatagaaaggaaccttcttgcctgtgatggcttctactctggggatcactttctcacttgcattgcagagattatccaatacgactacatcatagcctgcctgctgtaattccactacggtatgactgccgatgaatccggcaccacctgttaccaaaattctcatacactctctcctatccgccgtgcataggacaatactatttgttcactatggcggctgcacaatctcccatctgtcagagccggatgaaattttttcttcgtttcttacagtatcagattactgtaattctatcgattcctcaataaccttatgttgtgaaaatctgtcgaaatgtttacagcaccacaccattctcggtgagcagttctctggcactttccacagagtccacaccggtcttgttcttgatcggcgcaaattcttttcttctgactacctcgaagggcagacagctgtccatctggtggatcatatccagtaccagactctcgaatttgtagccgttgggagcctccggcttcaccggttctccgttctcatccagatacgggatcttcttctctacgatatgcaggggcatcttctctgccatgatcttttccagatcctgtaccttgaacagataattcaggatcacaccataattatacgcgggttctcccttctcatccttagcattcatcagttcatcggtcagttcataatattctacgatagaaggtctgccatcctctaagcacataacgcctaccttctcatccggtgcattcttgcggaccaccttggagcctaccacacaatttttctgaatagtagctccgatgaagcagggatctgcgattcgctgcaatacattatccacggcaaatacattgatccactcaatgccttctctgtgtacaatgtccagcatgccattgtttttcatggaaatgaaccagccgccgttaccattgggggaagtggacagcttgcccttttcctccagatagatcttaccttcataatcggtagccgcagccatctcctgtttaaagaaatgcacatattccgcattatatccgaagaaatcatgctcctttaaaaaggctatggtcgcatcgttgttcttatcactggtcattacgaacagatggatccagctgtctgcctgatgtacgacttccatcagattattgatcaggcattcaaaaatatacagttcatgagtcagtcccacattgtacattcccttgggattgtcagatcccagtctggtgcccataccaccggccagaaggaccgctgctaccttgccctgtcggatcgcttcgataccggttgcggtaaattcctccctgtttgcttcgatttcgtctaactgcatggcagccaacggtgtgatcactcctttttttgccagatcttctttatgcttgcaagcttccagaatgctcatatccgtagtttcgatctgatccagaatcccctgcttctcttcctcgttgagctccccgtaatacttcagaacatgttcctgaccatacttggcaagcttctccttagcctgttccagtgtcatactcatattcctacctccgttttattttctccgactattccaccccgggtaacagtcaattttctctattatacttgatatttcctgcgattgcaaaccttactcccgggatcgttcccgcccgtaagtcctgccgttaagattctgtaaacgtgttgcaaagattttgtaaatatcccgacaaaatggtgttaagggtcgctcaaaactattcacccgggggtatctgtttactataatacggtatgtgaagtttttaaggacttcatcgaatgttgtacagaatgacagaaagttgaggaattcattatgaatattggaattttaatcattgcaatcgtaggcggtgctaccggacttttatctacagcttatctggcagtcagtttccctgccgtgatcctgtggaaactctatcgcagggtggtacacagaattcctcttacacaataagcttacaacgaacactttccctctaaaagggcccggaagatttctcctccgggtcccttgtcgcattttcttattctatttttattcctgtaccggatcccagttctcatccaccagtgtcgcagttactgtaattccctccgatgcattttctgcgcggatcacaagatagaacattccttcttccgaatccgcggcatattctgacggattctccggcaaaaagacagaaaatccctccgggtactgctgcatctccagaaatcccttttccaacagtgcagttttgtaggcttcttttactgcatcccggtccccacaggagtacacctttattgaagcaaaagttccctcttcgctgtctgtctccgtacaatctgaaatcacagcatcgggatagataatatcctgctgcaccgctttcagatattccgttgacatccggacactctgtaagatctcaaaagtatcttttccatcctcggaatgcgccatgagtaccagactcaaaagcaaaatgagcagataacttcccagtgctcccgccagtattttcgcaaaaggattctctggctgccccagatttgtataagaagtgatgatccagccaaaatttcggtagtccaccgcggtattacagtattcgcagactccgccgcccaaaatgtccacactgcctccgcagttggggcatttgtattcccggagtgccctgctgtgctgcgttaccacatcctgtctgccttccagttccagccggatctcctcataacggttccggatcttctttcctgtatccagtgtcaatcgggtcctcacttccacgctgattctgtaagactctccccgtgtctccgcctccagaaaacgcacaccgcaaatgcaacagtccaccacattctgataccgtgccaccaccgtatccagatcacaggatgcgaaaaagcgtacctgctctgccgtatccgccagatggatcattcgcagctggtattccagattctgaagaaaattacccgtggagaattccaggattgcggcctttactttcgattcgtcttgaattctcggctttctgcgagtctccatcacgatcaacattacaataaatataatgagcatgtaaaacaacgactggaaaaataccggagccagaccaattcccagcatcatggctgcggctgcctttaccgcattgtatccgttcctgcccaacgccaacagcaaaaacataatgccgcccgcacagatggccagtaccgcaagagaaatcgctgtaattcccaccacagcaccggctttcataaagttggaaatacttttctgtcttgcgtcctcctccagagaaaatccggatacctttgtttcaaaatcactgacgagaaactttgccccgcaggcatcacagccatcgatatagctggtcagttttccctcatgtccacagttagggcagataaccatatctccctgcacatccgctttcaaaaagctcgccgctgcaatctccggtgtctttaggaacgcaatcttttttcccttgcggtaataagtccgtctcatttttaccggctgggtacggcggcagctataatcataaccatccttccagggaccatcatagtccgccagtcgtgccggctcctgcatctccatatccaccgtcagttcccgctgctgcagtctttttctgctcaggcgcagactttgccagaaaggctgggttgtctgctccatcaggttctgttccgcttccccgttgccctgatagaatgcttttaattccccacagaagtcttctgtccgtccctcgatctctttccgtgcatcattcagaaactctgttgccatttcgttttttctctcctcataagtgatcctgccgcgcaaaggtgctgatatcttttgtatcttatgtcccaactactttgtcccatatagctatgtatccattatataagttggtacccggtatttcaagacactttcccgtatagaatgatttgcctcatcgaatatctagtgctggtgcagatacttctctctggtagccagtccgccgcggatatgacgctcggatttattcacatccaataccttccgcgcctgcttcgccaacgccggattcacctgcaccagtcgctccgtcacgtccttatgtaccgtgcttttgctgatgccgaaggccttggcagtctgccgcaccgtggcgttgtggtcgatgatatagcccgctatccctatagctcgttcttcaatatagtctttcaaaggaaaacccctcaggatacttttttacagtgtatgaaagtatctgaggggttatgccctgattatgtttatctatttattttattcatttttctaagaatcgcctgccaatacatcctatccttcaacaccctgataacggttaccgttgtgccttcaaccacaaagaaaatcaaatatgtactgtagggtttgtaataaatctctaatccctcaatattatatcctgttttctcatacccttcagcaaaaggatctaaggctttgattgcagaccttattttcttggaaaaattttcagcatattccctatacataaaagtctgcaatatataagtcttcatacttttaatatcttgcaaagcatccttcgacaagacaattttatattttttaggtttatccatatactatatcttgtcgatttcctcccatgcttcttcaatggtgtatacctcaccatttttcatactctgcactccttttgccaattcctgatagagtgcatcgaaagcatctttctccgtatagtcatatgtgcgattatttactgttgtgtctactgctgctaatggtgccatggtatcacttcctttctgattctattatatgcaatatatgtttttatagcaatacacatatttttatttaaaatttttcagattcactttcatctgtggcggattgctattttcatgtaaggtgcctctattaagacctataagattttctaaatcatccgcatttaatgttaagccatattccgaagaaagttcatctaataattccgtcggtgtaaatacaccttgactcaataaaattcccacagcctgctttagtaaagaaggtttagcagtaaccaacgtatcatctaatggttcaaccttccttattccttgcttttgcatatttcgcatcatcttttgatattcatcatttcctatcaatccaagactatacgaacgtctaatcatcgccgcaattgacaccttccacctttttttaagttcaacataatatggaagcttattagcataatttcctatatcagctctaaattcattttcaggcattagaaaagcagcggcaaaatcattcgcctgattttccaattccttgaactcctcttttacctctgataatccctcattccaatcatgtaataaaatgtgtcctagttcatgcgctaaatcaaagtgtattcttgctgctgcatttttattttttgagaaaccaattaaataagtttctgtattgcttgatgatattttatgactatatgcatctacatctcctgtatttgtctcaaagtctgtcaccactagaccatgtgactcaacaagatatatcaaattatcaattggtttatttccaagtttccaatgctttcttagcaaagttgccgcttcctctggtgtacagccttgcggaatttggggcaaatctaaaggttcaaaatccaaatattctttcaaaaactcatacacaattgatataaatgttaccttgctctcttgctcctcaatatattttttgcttgttgttaacaacgatctaaaataagttgttgtttcctccagttcaacattaaagtcctcaacaaaaaatttaaatggaaagtttaaacactcgcttattttttgaatcgttccaatgtctggattctttaattttccattttcgtacattgaaatggtttgacgctttactccaattttatctgccatttcatttgcagatatatctctccataatcttgctatcttcaacctttcgccattaaattgcctatcaggataagttctcctgaaatcaactatgttattcattcttccagctccttaattatctattaagcatttttgctgttttcttttttgtccttcttttcttcaacatttgttctctgttttgcccgctcccttgcctttgcattcaaagcaacagattgattatactgtaaatcattatcttcttcaacaacttctggaactatagactgtctatgtttaatatatgaactccagtcttcctgatccacaatttgtaaatcactgttaataacacagcattttattgaaacaagttcatgattatattcattaaataaaataaccgcataattttcaatggcatctttttctacctgcatatcttttaatataccatctacaatttgtgctacttcttcctcacgatcttgatcttctaaaaaaacactcatctgagaggcttcgcctaatgcaaagttaaaagactgcgcaaaggcttccatataatgcaaccttttccgttttccttttcctctacacaactcaataaatctctcttctcgcataactgagaaaataaaatgtgaagagaaatctaccagtggaaccatattccaaggtcctctttttgcataccttgcgataagtgttccctctttaaatgaattgatgcagttcttattaaataagtcccacttcaaataatgtttaccaacggaatgtctttcatcaattcccatcttctttaatcctatttccagttcatcccccaaggaagaagacaatttgtctactacttctataatgttactttccgaaatgaatttataagtcttttccatagaaacctcctattaagtgttaaatacactataggacttttttcaaaatatatcaactatatatttatatattttttaaaaggtcatattgttttcatttttccaaaacatatatctatttttcattcttttggaaacttttttattcagcgcacctctatcctattatagcaatataaaaaggctgatttctcagccttttccctactctatttcaaccaccacactactgtcggtttttatacatccgtatgtactgtgcttttgctgataccgaacgccttcgccgtctgccgcaccgtggcgttgtggtcgatgatatagcctgctatcccaatagcccgttcttcaatatagtctttcaaaggaaaacccctcaggatacttttttacagtgtatgaaagtatctgaggggttatgatagagattggcactacttcagaatttcgtgtttttattagtctttttcattttgcgcatgttccaattcatatagccgtttaatcattgcatctatgacgcaaccattataacattcactacgactgcaattgcccggtatattacaaatcttataagctccattcaccaaaattcttccttctttatcctttgatgtaagtttttgcatcctaatatcctctatccacaattattttttcataattcttgacaacgaaactgcttcttgctactatcttaagtaagaaatgggttttcaccacacttattgttgtggcttgctcgtttctttttttattgccaaaatatcatacaaatatttgttcccgttttgagcatgattaataagtaatcttgctctaaaaacattatatctgatcaacacatcattctcatacacaggaatcgcaaatcgtacatcatatctataccatccatgcttagcatctttatcatgtttttcttttttgttttcctaataggatggattctttgcaatctggattagttccgggatagctgttgtagcatttgctttcgcttttgcattagctcccagcaataattttttactctctgaacctgtatattcgtccggaagtttattaccaatgtatactttttccgaggtttcttctatttcataatagtcacctacatattgttctaaataagtttttacttcatcccaattaacattccttttccctttaaatacaatgtcattaattaagaccaacctatttccatctgcatccaaaataatatttatctttctattttcaatcataagtatatcccttgtccgacatatctgaatcatgtatttggtttatcatttcatcaaaatatgccttataacgatacgctgtcctgcggctgatttgaccttcctttacaatttccattattgtcattcctgctttgtacttaattgcaaattcctgataagacgacttccatgcctcattatgttttttacgtcctcctaagttacgtgccttaaggcgttctacttcagccttaagctcttcattctccttctccaattctttaatacgcatctttgcttcttctaaagtacttatcacaaatatctctccatcctttatgtgtcaatttggtttatgacatcattataattataagcagcaggcgtgtcaatttgatttttggcacacaaatatctttgcaaaaagtattacaaacatctccttttaaaaacattaaatcaaggttatctgttttcattatagtaaaagcaccccctgatatctactcgagagtgcccttatttcagttctattcaattctccatatgattttgcttttgtatcgtttcatattgttactaccgcatgtactgtgcttttcgagatgccgaacgccttccgtcagtctttacgccaaaatataattctccatacttcctatttcttccaccttttcagtttcctctgattctgctatgtactcactatcctttgcccattgcgatgcagcttcttccatcgcacgttccactttaccggcatttgcttctatcaaaatcttacacaagaaatctgcggtatcttccgctgaatttggattatgaaaacgataatttaatttcatccgtctcaagcgaaagctacacccccttacctcgcctgtccttctctcccatactatgagaaggattcttagattagaccagaccttttatttaatctaagcataatccacttgaaatcaaattacgttcccaaaatactggacttttgtccatttccaccatacttttttaaaaattacaccgatcctgactacatcatattccattcaaagccgtaaaagtgaaggaaaacgcttgaaaagattttatgttactaaaccttttcaagcgtctcaatgccaatcccgtatacaattttataatcggcattctcttctttgccttgttttttctaaattcaaatttaatttcatttctatattcataacttggcaagcagtgcatttgtacacacaaaatgcatttttgcttgttgggagcatctcccaaaccctcagaatcaatcagaaatcggattgggccatattgtaaataaaacctttggcaacatcattaaactcaacatttacaccacgatatcccttgtcggatactttgacactcaacgcttccccattataatatttctgccacatcttatctatgaatgagtacgattagttctttcttattctttctcccctgcggcagccatagcctccagtgtacgataatctatttttcccattggtgtcaatggaatatccggcaaaaaataaaagtgttctggaatacaatggcttgcaagattctctttacaccggagcaggcactctttttcaagtacatcttgatgtattgaacttacaatgaatgcaactggtatctgaccagttaaatttttactgactcttttccccaccacagcacaataatctactcccggcactttcatcaaaacttcttcaatcaaattggggaaaactttaaatccaccttctcggataataatgcgcttaattcttccgtctacataaacaaacccatcttccgtcacatgagccatatcccctgtatgcacccataaagttccatccttatgttgcttaagtgtgcttgcattctcacttacagctctgccacaataaccgttcataatacttgggcctttgacgcaaagttcaccctgcttcccatatggaagttcatcacatttttcatcaaatactgccaatgtcatgtacggcagaggaatgcctatacttcctgccatagagcgattctgcatatttgtacacacactagatccagtttccgtcatgccatatccgtttaaaatattataacttgcattatgcatgtgaaagaaagcattcattgccttttcactctccgggttaattccatctccaccagttgccgccgtaataagaaacgataagtcaacatttttcattttagaatcgtgacttagccgctcccaccatgatggtgctgctattacatgctccggtttatttttcagatattgaggaaatttcttctgtataaactgaggaattaaatttacagcaactccagcagttaaaggaaggtttagacaagtacacaacccattcaaaataaatggcggcaccaaacacaaaaatttttctccacgcttcataggcattccagacaccatatactcaaccgcaacacataccatactgcgattcgagatttgaactcctttaggcactccggttgtcccgcccgtgtgtgcaattactgctatatcatctggcttgcaatgcatttcctgcattgctacaccgtctgtacctaatttgataaactccttatatccaatgaattgtcccttgaagtttgccttattgcaaaaaggaattccccacgactgaagtggagtcatcacaacagcttgcttaacttcagtatctgtgattgcttcacgcatatttttcaaacatgtatccaacagcacgacatagctattcttctgttcattaataacatctctaaactctgaaggtgacaagcgaagatctagcatatttgcaatagcaccgattttgttcaaggcataaaagcaataaaccatttccggagtgttggtaacacacatggcgacaatatcgcctttttttacccctagtgccatgaaagaatttgccaccttgttaatgctttcaaaaagtctgcggtatgaaattttcttaccaaaatacattagtgcaatatcatccaaatggtctttatttttctcccagaggagttcataaactgtgcactccggcaacggcgtgttcagtgctttctcactgtaatatttcaaccacggcttatctatagacgggtatcctgttagctctttttctgtgctttcatttattatcttcattgtttttctcctcgtcttttatcatatctccgcaagaactcccaacatctctactaacgtagttgaaatgttgttattgtcttgtcccagttccactaaagtcttcatttgctcgtatttttcatattttccatgagcgtcctccgtcctgagcagttcccatcttttttctccaatttctacatactgctccttcatgtactgcgtagtcacctcaaacaatttgcgttcctctctttgtcttgcataagcagccacatagaatctcaatgccgtgtccagcgtcttactatcctctgtccctttagataccgatctaaacagcataaccttggaaaaccatttgaatgcaaatgaataccattccatgcgcagataaaaatcccccatgtactgcatctgctccacaacattatccggttgcgagaaaaagtccacacccgttttctttgtatctagtttttctctcttccacagaatacgcagcaatgtttcctctccgtctttctcctccatgctctttaagaagtttattgctccttcctgcggtgtcctttgggacatgagacttctggtttcttcaaggacttctcttccaagcaaacctgcttttcccggttttccgctctcactcagataagcgcatacattgtgataagctttgagcatttttttctgaaattcagtcacaacattattctgtgtttttagacttgtccgcatcaagctgtccagaatacatcggcgcagccagtaagtacggattccatgttgaacacacgcatttagccgtgccatttcctcttcctgatcttccactctcagttctttatcatgcagcatataccacgggaaattgcctctaagattctggcaatccctcataagcacttcccatagcaccttctctttctcattccgggaatccttgaatttccagatttctgcataatccgaacaaacctccgcatagagttcatatggaagctctgtattatcaccatccaccacaaaaaacgtcgacgcttccggatcataaagcttgcaaaaacgttcggcatcttctccataaagctcggcaaacagatctctacacagacatctcatttcatccaggccttgaactgccagttcgtaagcttcatggtagaaatgttccgccgaacaatcataagcggtggcattgattgcttttaccttttgctgccgacatacatagtaccagtctgatgcctctttattctcatttgctgcaattgtttgagtattccaaaattcgatacataatctttcaagtcttcttgcaatattgctttggctgttatttgtatacaaatctgccagtttaaagcagcattccatatagtacagtgtatctttcttgggaagttcacccttcgccggctccacgttttggtcgctgaaatcgtttccaaccatctgaacaaaggggatttcataaacactttttaatttgtcaatataggcagaatataaatggatgaagaactcacctaccgttccgctttccttattcgcctcgtaaatattagccatagcacccttgatgcggttcagtgtttccttctgtgtatctctctgcatgtcaacgtaggcaaatacaatctgcataaaggcataaatgcgctttagttcataccagcgcggatttttccctttcttctctccgtaaatagtaagaaagcattcaaaaaggtactccataacatcctgcttgatataattctgtttgttgctgtataaagcctcacgcaacgcttcatgcagcttgaatccgtcacgccctactttctcaataggagcggtatgttcaagcacatttctggcattgagcagatgattgtccatcttctgttgcacaatcttaatccaatcgtcatcccacacatcaatgcaggacagaatctgaaatgcatttaccatcaggtcagacaaatctttatagaagtaataccccacaaactcatccacatgcgcacattccttaaacacatccggtgttacgttcacacccggcgtttcctgtaatttccagtagaacaaaaccaccatccgcaacaggtgcggaagataataggtttgcccctcgttttcctgtgaaaccacgctcaacattctttccaccaaggcacgttcatccggttccagatcctgcacggtacacattatcgttttccggaaacaattctcaatcagatacctctgtgccaatttttcgttaaaaccatgtaggcatatctcctcattcaaatgcccttcaaataaatctgcaaataattctcttgagggcatgcggctgacaaccacccatagtgcatccactctttccatcaaccgattgtttccggtcagccatgtgtagtctcttccgatttcattgtcacgattcaattgaaaattatccagcacaatgatgtactttatgttcttaggcaatgcagccttgagtttttccaaaaagaaatcctgctttcctgcccggttgttcaatatgtcaagattctgtttcagaacactgtatatttttttgcgctctgcaccctcccctatatccttcaccagattgagtgcctgaattactgttttgagccccgtgagttttcctgccagccccgacaatattttttcaattgccgcttcaatttcctcattttccgattgtccaagagttacatttttgattttatctgtaataaatgttgcaatatcaagtgcagtgtcagcttttgcaccctttttaccaagtgccggtcgatagattccctgaatccattcatacaaagtaaccacgagatcagcttttccctgttctgtttcgttgcccctttttcctgcataatagctctgcaactgcaatgcaatgcgatagtagacctccgtctgatccacacaatccgatatatccaggtagacgcagagaggatcgtcctccctaatctgtttttgattatgctttatcttatccagtgcattcttcaccaagaaagattttccgcttccggcatctccgtaaactgtaaacagtgctctttgttcctcggtgctgtaaaattcttctgcaaaatctacaatatgtccttcttcatctctttcaagaatattgattttgcttgtttcctttgcggtctcataagtttcctgtaacatcccgtccccctctatagcaattttttcatcgactgtaatactgatcttatctcctgcaaataattggctgccgtctgcaaaccactcatatttccagaccattcccttggaaatccgattgtttccacgctgtgtccgtatcgcattcccaatattcttgctgcctcaagctgttgatatggaacataaatctgactggttacaatcaatatgcgttttcctgttccgactgcctttttgtcctgccaaaacaaaaatgtgtccgctgtgtttgctctgcgcttgtccggttccgttgaaggtgccgccaacaccgtgattgtcggttgtcctccatactctgctaacgcccatgcactgtttatattttctgtgttttctatcacctgttgcgtttgttctatgtcaaaaacttgttccattgctctgcacatcaagtcatattccgtgacagcatctttcgcataagtatccgtagcttttctctcagaatccagaatcgggcgcattcctgtcaatcccacaagatattctgctgttatcttctgttgccgaagcagctctccagcataccgggttcgatataaacacgacattcttgcgcctccgagtacaagtaccgcatcataggatgctctcattggttgaacaatatctaccagtccaagactatgggctgccgacattactgccctctcctgttcttcattcagcgctgtatcgtcaatcatccatctggctctctccccggttttggaatcaaacgcagctttctgctttgccctgaaatcccagcgttcactaaattcacaaagccagcagagtttttgttctttaattgtagtcaatggaatctttccattgaacttttctaccaacacctctaattcaggtgtgtcgagccatttgaaacatttttctaaaaacaacattctgctctcgtcacaagaaaattcgaaaatagttaagccccctttatcaaatatcatttttctatttcagcatcacattctttttcaagaacgcaatcaagtcacactgctgttccctctggcgctgaaccagtcttggtgccaacacccatgcattcgccgcattgatctgtaccttatctacaaatttattaatttcctccggagacggaatttttcctttgtaggttgtgagtttctcttcccacacatcgttgtaccagtcctgacattcataaacctgctttcgaacttccatccagaaagtatgcaaatctcccggtatatccattcttttcagtggaactgcataatcttctatcagtttccagagaattgttgccattgcatcacgaagcaacgttcttgcctcttctttttcatataagtctaatcgtatcggtctgccaacacttatataaatatcctttgagtcatagtcattaaagctgataatgggtacgacctccgtcccgcattcttttgccagtagccaaggtccggcaaatagtcggtttatcagcttctcctccgtattgttatatcccccctccggaaacagcatgatactgtttccagcattcaggactcttttcattttttgcactgcctgtcatctgctttccgaatcgcaccggtttacataaatcattccatttgcccataatgcaaggaatttaggattatgctctgtctgatcatctgttgaaccattcaatacataggcattacggtctattgcatacaatgtggagatcacatcttcatcaaaagaatgattacaggcaaaaatataatttttccctttttgtaattgcggataatctacaatatgtatctttcttgttgttccgagtttgagaaaaatgtgccagcttttattcattatttttcttatacgcaatccaggtttagaggtaaaatgctccacatccgcatattcatattcctttaagcctgttcttttcatatttcctcattgtctactttttgtttgtctcaccagtttctttgcatactacaaagccactgcaatatttaaggtgtttcaaaaagtagactttttgaaacaccttagatataattactttgtaaatgttttttcagaaaaatgtgtatatggttacatttatgggttgtttcatgttgtctacaatttggaacaattttccttgtttttctctccttcttttagttccatacaccttcgataaaaagtagaataattcatctgtaagtctgccgctgctttgcgtaaagatatcttgtcctcacaccacagttgataatacttttcaaaattctccggcacattctttttcttacaaccgaactggattcctctcctttgagccgctgcgataccctctgcctgtctctgtctgataaatgccctttccgtttctgccacatatgccaagatctggagcaccagatctgcaatgaatacccctgtcagatctccatgcgctgtgtttgtattcaacagcggcatatctatcacctgaatatccgctccgatttctttcgtgattttccgccattgttccaggatttcttcgtagtttctccccaaccggtcaatgcttttgataatgacgatgtcacctttctttaaccgtttcaatagttgtaaatactgtggccgcacaaaacttttcccggaaattttatccagataaatattctttttcttaatctgttgttcctgcattgcaagaaattgtctttccggattctgatcttttgcagatactctgatatacccatatcgttccattttgtctgcctccttataattgtgtttctcattatagattgcagacacataaacacccatcaaattatatgtacttaaaataagtccacttttgacattatatcacattcagaacttaaaatgtacttatattaagttctgataggagtcttattttctatggaaaaagaaaaacatctaggattaagaattgattttgaaacgcatgaaaaattaaagagccttgcagaatatgaaggtcgatccattaacggagaagtcctgtatttaatccgacaggctattgcacaacacgagcagcaaaaaggggctttaaaataatacatcgcttgctctattttatcacccaaagcaatctctttatcaaccgttctatattgttactaccgcatgtaccgtgcttttgctgatgccgaaggccttggcagtctgccgcaccgtggcgttgtggtcgatgatatagcccgctatccctatagctcgttcttcaatatagtctttcaaaggaaaacccctcaggatacttttttacagtgtatgaaagtatctgaggggttatgcatcctgacaattaagccgctatttgacaattattttgtttcaaaatataatagttgtactttgcaagtatccattttgaacatacgggaggttttttttgtgaaagagtcaaagctccggctgcgttccgccggtttactttctgttgcggcaggatttatgttgtttctttatgctccattggaaatttattttaataacaaatatgaattctggtttgatttttatgatctgatcccgctctgtctgttgatgtttgcggtatttacgggtgtcagcttcctgctggctttcatcgtttcgaagataaataccaggctatatcatggatttctcacagtttatctgattgcgttcctctgcacttatattcagggcaatttcatgataggcaatctgcctcacctggatggaagtacggtggattgggcacagtattccggattgcgtatcggctccgttgctctctgggtggcagtcacggttctggtgatactggcggtgaaaaagctgtcccttacaaaggtggcagatgcagcaggtactgtcagcgggctgatcagtctggttctgttggtgactcttgtaacgctagggttcacaaaacagggcctggaacacaaattttctatgatcaacaccacctatggggaactggaaatgtctaccgatcaaaaccttgtacttctggttctggacacagtagacggagacatcatgtcacaggtgatcgaacaccatcccgaatataaggaaactctttctgattttacttattataataatacgatgtcggcctatccattcaccgtatattcaattccttacctcttctccggcgaatggtatgaggatcaggaagaatttatcgaatatgcaaagagagtctatcgggaagctcctttctttgatgatctggaagccagaggataccgcatgggaatgtatgaggaggacgcttaccgtctggaagaaagcatgttccgatttgaaaatatgatcgacacgacccccacgatctcttccattgcacaatttatgaaactggaaatcaagctggtcggattcaaatacatgccttttgatctcaaacgcttctgcctcaccatcccggcggaattcaattcactggagaagaccgatgatatcagtgattacgaactcttttcttccgacaatcaggtcttctatacctacctgaaaaagacaccggtaacactgaccgatgacaaatgcttcagattcatccatctggtaggcgcccacagtccctggcatcaggatgcacagatgaacgagattgaaaacggcacctacgaacaaagcattgaagccagcatgacaatcgtggctacgtatctgcaaaaactgaaagccagcggtgtctatgataatacggccattatgatcctgtcggaccacggatacaacattgaggatgatgacagttccgagaaacggcaacatcctattctgttcgtaaagggtgtcggtgagcattatgatgaactacagatttcctctgctcccatttcccaatctgattatctggaagcctacacacgacttctggatggcaaacagggggatgccatctttgattacaaggaaggagatgccagagaacgacgtttcctgttctatgattacgatgagcccactcatttttatgagtatatgcagaccggatatgccggagatgtagacacgatgtacttcaccggtgtggaaatcacaccataatggtctcactcggaaataatcacttgcattatcttctctaaaaggtataatgtttataacagccttgtttttaacaaatattacacgtacatacgagatggagggttcttatgaaattatcaaaaatcgaacaggtaaacgagtttcttgctattgttgacagttgtaaaggggaggttactttaagatccgtagacggtgatatttttaatctgaagagcaaactttcccaatatattgccattgctgctttgcttggtcagcatggtgatgaacttgagttattctgctcagacagctctgatgagggaaaattcatgaatttcctgatggaaaatcccggtgtacaatagattcacttataaataatatactataataacaaagcactcccattaaccgggagtgcttttgttgttactttaagatgtagtttcacagcagctgcagcaatctccggttcttatggtagcagaagatccggtcagacagcatctctccttctccgtagacggcattgatatgctgtacggaggaacggatctcctgtacaccggtgcagtctacgggatgcaggattgcttcatgtacgcttggaaagactacatagtagtccccgcccagtttctccgccaggattgcttttaccccgggatagaaaaaggccacagccccatggattctggcagtagtggtgaggagatatcctctctgtccttccctgtggttccaggggctgatccaggtctgacgcccttcctcttccggcagcagaatgccttcctcatagggaaaaaactttctcctgtcatctcccagaaacaatctgggcggcatcttgcggcaggtgttcatcatggcttccgtgatcaactggtcttccgtaagcttccatggcagtaccatacctcgggacacctgtatggtcagactgcttccggtcttctcactggtcaacagatgcagcaccagcgccacatctccaatcttacgatagatggcattgccaagctcctgcctgcaccgttcataattcaccggacgcacgatcatatgccttctgcagatagcatagctcagattctccccggagagtacgatgtcctcttcttcatcgtcctccgtcaggcccgccgagatctccggtaaaatactctgccatccttcctgtccgtatcgctcatacaaaggccgtatcagccagtgctgtatatattctctttttccacgcatccataatgcgcagagcatatcttcacgtatcatgatctgttctcttccatacatacaccggttcataatattcatgatatgaaccgccatcggatcaccgcataccatgtgtcgttccagcaggcgtatggtcttgccccgtgccgtttccatgttctgcacattccaacgcaattccttcttaaattcttcgtatgtcattgatcccccattattttctccctgcaaaagcagagaactgatccgtaaatttgcgtacaaaaataaaaggtactattaaaaaaatcgttggaaatcccggccgaacggcctatttagaattcttatttcagagatttacagtttccgaaaccatccggatttcggataactccaccctatcatagatagattgctttgtctatatgcgatttcaccaaggatatcttttgtcaaatttcacgaaaaaataatttcaaaaagaaaaaaagtccccgttttccgcaaaaacagggactttacaaatgtcaaatatgaaattacacaacgcgtcgcactgccaggatcggacggtaattggcattgctgatcttgataccggtacgctgtgtgctggcatgcacgatcagcccgccgccaatatacatagccacatgaccgtcataacagatcagatctcccggctgtgcattgctgtagtccacaccggtaccgcagcttcgctgctcataagaagtacggggaatgctgtaaccgaaatcactgtagacgcggaaggtaaatccggaacaatccgcaccattcgtcaggctggtaccgcccgccacatacggattacctatgtactgacaggcatattttgcaagacgctttcccatatcactgccggaggcactttcgatgactgaggtataattggtcgttgcataagtgccggtggctgcggcagtatttccctgctgtgccttcgcctgcagctgttttaactgtttttgttcctgctgcaacagtgccttcgctacggaagcctcctgctttgccttcttaatctccgcatcatagttggcggattcctgctttttcttggccagcatcacatccagttccgatttctggttctccagatccgccttatcggcttccagctgatccttatcgacctgcagctgggtcttctcttcttccagctggttccacagcgccagtacctgttccttggtctcttcgtattcctgcagtttctggcggtcatactcgtagacgctctccacgaagtccatccggttcagcataccactcaggccaccaccctgtaacagaaggttcacataattctccgaagaatcattttcatacatcatgcgcatccgactgaccatatcgtcatgctgctgttcttcctgcgccttggcaatattgtactcttcctgggtctgatcaatctggatctgcttgtcggcaagttccgtttccttcgctgcgatctcatcttccttcatgccgatactggtcatggtgttgatgatctccgcattcaggtcatcgatcttctcctgcaccagatcctgttcatcctgcagggaattgatctggctgttgatattgttcagctggttctgatgttctttaatgttgttctgcagatcactcatggaaggtgctgcttgcaccgtctccgcaggagattcccagacagagccggtggctgtcagcgtcaccgctgccagaagaaaataacataaaaactttctttttgctctatttacttttctgccggcagtttttttcttcat

SEQ ID NO: 232 - DNA, 9691 bp, unidentified
  source 1..9691: mol_type = unassigned DNA
  misc_difference 7257: note = a, c, g, or t
  misc_difference 7258: note = a, c, g, or t
  misc_difference 7259: note = a, c, g, or t
  misc_difference 7260: note = a, c, g, or t
  misc_difference 7261: note = a, c, g, or t
  misc_difference 7262: note = a, c, g, or t
  misc_difference 7263: note = a, c, g, or t
  misc_difference 7264: note = a, c, g, or t
  misc_difference 7265: note = a, c, g, or t
  misc_difference 7266: note = a, c, g, or t
ttatattcccccctttaaaagtaatttcctctgaggtttaaacaccatatagttgaataccagaaacaccgtagttcctaacagggcaaaaaacgaaccgatcaatgccgtactttccagccctgccccatgttcgatcgacaatcctccaaaataagcccccacggcattccccaaattaaaagcaagctggaccatcgccccgcccatcatctctccgccaggagaatattgaagcaacaacaattgctgtggagaagaaactgcaaacaggcaaccagtacaaacgcacatcagcaaagcggacaaaaagccgtacgaagcaaaaaaataaatcagcagaagtgatgcaaacatcagaaactgcatggacatcgctacgataccaggtgtaaaacgatcagacaaatgccctcccaaatagttaccgacacacatgctcgcacccgccagcaacatcaatacaggcattgtcccgacactgaaaccggacacctccgtcattaacggattgacatagctataccaacaaaaagctcccccgtttcctaacatggtagcagcaatcagcatccacggttccggccttctcaaaaaacgaaactgccctttcagattcgtcgccggcagggcgggcaaaacaggaacccacctccggataaaccaaatcgttacgccaccccacaacgctgcaatcacaaaaaccaaacgccaggacagaaagtaccccaggaaattcccggccgggacaccgaacaaattggcaatcgtcatccccataatcataatagctacagcagaagtgcttttccctttctccgccaaacggctggcaacaatcgaaccgactccgaaataagccccatgcggcaaccccgatacaaaccgggcacacaaccccatccaataatcggccgacagagccataagcagattcccggcaacaaaaagcccaaccaaagcaagcaagatcgtacgtagcggccaactcctggccaccaccactaccaacggcgctcccacacatacccccaacgcataagccgaaataagatgaccggcttcggataaggaaatatcaaatcctgccgccacatccggcaagatactcatcataataaactctgcaatccccaacccaaatgtgccaaaagacaatgcatacaaacctttcttcataacctaattcaatctttctgtttttccggccgcaaagaaacaacaaaattattaagtgtaattgtcgcagattatgcaattattgtctaattttactgtgttttatcagaaagttcatccgacatgcacgagaaactaaaattcgaacaaatcaaaaaagatagttgtgcctcattacgctacgattattccagcttgtacccgaaagacgaaatgcctcttcattttcatcccgaaatagaaatatgttatgttgtgaaaggttcaggctaccggatgataggcgactttctggagccgttcgaggagggagaagtcgtactggtcccgaccaaccaaccacattgttggatgtataaccccgaaagctgcgagcctgatggaaaacggagatgcatagttgtgcaattcaatcccgacttgctacaaaccggcctgtctttttttaccgaatgggaatatgccgctcaccggttatcggcaattcagcaaggcatcctgctgacaggcgaaacagccggaaagatcaaatcctgcttagaagaaatgaacctcctgaatgcaagcgaaaggatgctgatgttgatccgcatcctgcaacaaatcggaaccacaaccgatttaatccctatcggtttgcaggaaacggtattcaacggcattaccaaaaacatgcaacgcatgcaactgatcttcaaatacgtcatcgagcattacaaggagaaaataactctttcggacgccgcaaacgtaatcagcatgagcacaacagcgttctgctcgtttttcaaacgtgaaacaggcaaaacgtttacaaacttcatcaacgaataccggatagaggccgttggcactttactccgcaactttccggataaggacattaacgaaatagcctggcaatgcggcttcaccgacattccctacttcaatcgctatttcaaaaagatgaaacagatgactccgaaacaatggagatacgaaatacaataaaaaaaagaatatcctaatatgaatgcagaaattatccgattcttagacgatttacgacgaaacaataataccgtttggttccatgaaaatagagaacgatatgacaaacttcgctgtgcttttatcaacgaagtacaagagttaatcgaacgaatcagcgtatttgatcctgatatacggggattggatgcccggaaatgtctgttccgtattaatcgcgacatccgcttcagcctcgacaagtcgccttacaagacttatatgtcagcctgtattgctcaaggaggacgtcatagtatccggggagcttactactttcatcttgaaccggaatactgcgtactgtccggtggtatctggtatcccaaaccggaaatattgaaagtccttcgacgtgaaatatacaataacatagatgaatttgtttccatcatcgaagagccttccttcaaagctctgtacccgtcactcgaaggggacatgctaaaacgtatcccggccggtttcccctccgattctccttacggccatatattaaggcacaaagacttcagcgttatcggtattaagcccgacaggtttttcagccagccggactggatggaagaaaccatcgattgttttcgaaagcttcttccattcaaccgcttcctgaatgaaattgtggatgaatatatgggaaatctgtaaaaatactattttccgcaaatatccttaaacggacaatacatgcaggctttgccgttcggggtttgcacgaatggggtttctgtgtcgaagatttcatccaagcaatttcgcaggctgtcttcaaaatccgtgcgatagttggcgaagtccaaaacctgttctgttttgaaccggtctgtacgatggtaaattccaggatcgaaagaggaagaaaagagggtcctcatataatagatacccggctgaatagcagttgaaagctgaactgacctgttatacatccatgcatacataaagacctgcataaccgctttggaacgatccgtatctgctttgtcgaaaagagcttctacagaggtaaactgcgtcgtcccgcccccactcttatagtcaataatgcggacgacatcgcgtacttcgtctatacggtcgataaatcctttcaactggatattgcttttatccgtcaatggaaaaaggcattttatcttcttttccgattcgatataacggaaaggagtctgttttgcgtcacgttccagcactttctccacatatttgcgaatcatctcgccgatcaggaagttttgtccggtgagtggacgaacaatgtccgttttaaagaaaatttcggcaaaggcacgggcaactgctcccgtcaacataggcgtatcttttcggatcgctttcagcagatcagccgtcaccatctttccacagaatggctgatacaattcttccatcaccttatgcaggatacttccaaaaacattactttcgatcgtctcgcttacctcctcttcttcacgtattccctcgacaacggagaaatagaatttaagcggacaatccagataggtattgactgcactcgccgatatcgcccgcgtcccgccactccggaaatcagccagacggttcatgacttcctccgtcttagctacctgcaaggcaggagtcttggaagaagagacattgtaaacaaccaacttattctgtatcggctcctcataatgataatgcaactgatacacgaaacggctaacctcgcctgtctgcaatccgttgcttcttgtatcataaagcagactgacatggctggcacgataaatcaaacgatagaaatgatacgcccaaacactgtcctgatgttcgtatgtcggcaaaccgaatccacgacgaagattataaggaataaatgaattagccgctttcctcaacgggaaaattccttcattcatcgaaaggataatcaaccggtcaaagtcaagcgcacgagtctccaaaacacccatgatctgcaaaccggaaagaggttcaccatggaaaggaatcgtaattgtgtccgtcacacgtttcagcaaacggaaataggtgtcgattttcatttctacattcgcctcccgcatgacttccttcatccggttaaccgtagcgaaataatggaagataaactcctgttcgatgtcgttaatagttgaaagttgagagttgaaagttgaaagtggctccgtgtcactatttacactttcaactttcaactttccaccttcaacagctttattcagttcctgcaacacgttaatcaaataatcggagaaagtttccaccgcagtcaccggagtaaagaggatggacaacaatggcgtcttattcagatcgtcatacgatatgtaaatcttgttgttttctgaaatattttttaccagattagaaaccacctccggagaagtagtcgagatataccgatggttcaggattggcaagacatcccggaaatagaacaccggcctccggtccacataacgaatattcttttgcaaagccagaatatattccatcaaagatgcgaccggtgtaccggccaacggatatcccatcgtcacattgatccgtttgatctgttcgggaatggcattcagaaccggaatcaacaaatgttcatccggcagaatcacagccgtccgcaacgcttcttccgcactcatttcctcttccttgcaaagctcgttcagaatgctgcacacttgctttgcctgtccgattccggaagggatgccgatcacctcgatcttctttttgtcgtcatcttcattgtcaatagtcaattgtccattttcaattaattgcgacgggaattgccgcaaattgcgctccacgaagtaagaggctttattatctgggtccgtcactttcggagaggcgtaatcccagtaaaaatcagctattccccgtttttgcaatccggaaaggaaacgttcttcagccaccgagagggcattcagtccgacaaatacaacctttgtatagggcaggtcgcaacattcgtctttctccatctgttcgacaacttcccggaaaatcataccttcatatcctttgccttcggtggcaagcgcttcccgcaaatcggtatatagggcatataaaatctgccagaccgccagaaattgttcctggttgggcgtatctcctttcgggtaaaaagaagaccaaaaagtccggatagccgcaatttgttcagggctcagaaaactaaaatcattctctatctcacgcaggtccgtcacattggtgaagagcatacgggcatctgccatatatttatcgatatcgtcgaaatcattcagcagcatttccccccaatacaagaactcgtcgaacgtttcggaagaaccgctatgtctcaaataaatatcatatagtttaaacagcatgctgatccgatcggcagcctgctttccgctcaactgtacaaacagatcgttgatcgtcaggatcgtcggcgagaaaagaggcttctcagatacttccgacaagtatttctggaagaacagcccggtacggcgattcgggaaaacaaaggccagacggctcacttccgccccgtattcagaataaaaaagggatgcaacctgatataagaatggtttcattaattgtttggattaataaatgatgatttatcagtgtatattactgtaatatattttctatcatttgtatttcttccgctgaaaaggctgtattttgtaacgccttcaggttatctatcaactgtgcaaccgaactggctcccaccaggacgctcgtcacccggtcgtctttcaacagccaggcaatcgccatttccgctaacgtctgtccgcgttgtttggcaaggtcattcagttgtcttactttatttattttttcttccgtcacctgttcacgttgaagatggcctgtagatttggccgcacgcgaattatcgggaataccgttcagatacttatccgtcaacatgccctgtgccaatggcgagaaggcgatcatccctactccttcctgcttcaacagaggcaacaagtccggttcgatcctgcgatccagcatcgaataacgcgcttgatggatcaagcaaggcacacgatgttctttcaatacggcaagtgctttttccgtctgtccggcagtgtaattcgatatcccgacatacagggcttttccctggcggacgatgtcagccaatgctcccatcgtttcttcgaccggcgtctgtgggtccggacgatgcgaatagaaaatatccacatattccaatcccatccgcttcaaactctggtcaaggcttgccatcagatacttgcgacttccccagttgccatacggaccaggccacatgtcatatccggcttttgtggaaataacaagttcatcccgatattgtcccagacctttcttcaggatacggccgaaattttcctctgccgatccatacacaggaccgtaattattggcaagatcaaaatgtgtaatcccattgtcgaaagcggcatacgcaatctgaataaagttactgaacacatctacactgccgaaattatgccacaatcccagagagatgaccggcaatagcaatccgctccgcccacaacgcctataagccatatcggcataccggttgtcatttgctttgtacatttccatataaagatatttttattacaatgaatcttttcagatatacaaatataatcaagaataccaaaagaacgggcaattcggataaaatgatcgcttctcggaggaaacaacatcaaccgggtataaacaaaaaaggctatcctcacggacagccaatcttcattgttaaccttaaatctaataccatgaaaaacacagtgcaaatatagagagtttatgttatgcagcataatatttccacaaaaaaaagctttctcttaacctgatttaaccatttcatgttttacaacataatttttcatacacttttgacttagtcattccctgcacaaacaacagacacattatgattgaaacagcctacaatactggataaaaacgatccaaatgcaaaagtaacgaataactcatacaccttaccattttttnnnnnnnnnncttctttcctaccgatctgctaatgatcggaaaattaattcttacttattgaaacgttctttcaatttagccaacatatcctgagtcatggaatccagatcatattccggtttccagccccattcctcacgggcacatgtgtcatccaaagagttaggccatgattctgcgatagcctgacgtaacggatccacatcatattccatctggaagtcaggaacatactttttgatgttgttgtagataatttcaggatcaaagctcatggatgcaatgttgaaagagttacgatgaacgaacttcgtcgaatcggcttccataatttcaatagctgcacgcagaccgtccggcatatacatcatatccatgaatgtaccctgcttgatcggacatacgaacttctcacctttggcagccgaataatagatatcaactgcgtagtcggtcgtaccaccacccggaggtgtcacataggagataagtcccggaaaacgtacggaacgagtatcgacaccgaaacggatattatagtagtcactcaacaattcgcctgaaaccttcgtgacgccatacatagtacgcgggttacggatcgtatcctgcggagtcttgtctttcggcgtgttattgccaaacacaccgattgaactcggagtgaatacagcacaatgcatttcacgcgcaacttccaatacgttaaacaaaccgcccataccgattttccaggcaagctgcggttttgcttctgcaacggctgacagcagtgcagccaagttataaatcgtatctaccttatatttggacacagtctcagcaatctgctgttcgtttgtaatgtcgacaattgcagaaggccctgattccagcagttcgcctttaggctcctgtccggggatgtaacctgctacaatgtttccaccgtagatacctctcaacttcatggttaactctgatccaatctgaccggtagaaccaattactaatacattcttcattgcgtttgatgttcttttaagttttttcgatggcaaaggtatagagaataaaaacattccggtatgaatttcttgtattttttagcctatatattcaaaaaaaatatgacctttgccacatcggcagacaaatcagagacaaagaaaaaatggtttcaagaataatattttgccacttgtctgcgataatagagatataattgtcaacttaattaaaaatactaacaaaaaacaaagttatgtacggtaaactgaaagatttccttactcaggaattggcaaacatcaaagctgccggattgtataagaacgagcgtatcatcaccactcctcaaagagccgacatcaaagtaaacgcaggaagcgacgttttgaacttctgcgcaaacaactatctgggcctgtctgacaaccaacgtctgatcaaggctgccaaagaagctatggacacacacggatacggcatgtcatccgtacgtttcatctgtgggacacaggatctgcacaaacaactggaagccgctatctccgactatttcaaaaccgaagatacgatcctgtacgctgcatgtttcgatgccaacggcggtctgttcgaaccgttgttcactgaagaagatgcgatcatctccgatgctttaaaccatgcctccattattgacggcgtacgtctttgcaaggcaaaacgctaccgttatgccaatgcagacatggccgacctggaacgttgcctgcaagaagcccaggcacaacgtcaccgcatcatcgcaacagacggtgtgttctctatggacggaaacgtggccccgatggacaaaatctgcgaactggcagaaaaatacgacgcattggtaatggttgacgaatcccactctgccggtgtagtgggcccgacaggacacggtgtggctgaacaatataatgtatacggaagagtcgatatcttcacaggtacgttaggtaaagcattcggtggcgccatgggcggattcacaaccggaaagaaagaaatcatcgacatgctgcgtcagcgctcccgtccttatctgttctccaactctgtcgctcccgctatcgtaggtgccagcctggaaatgttcaagatgctgaaagaaagcgatgctttgcatacgaaactgatgaacaacgtcagctacttccgtgaaaagatgttagcagccggtttcgacatcaagccgactcagtccgcaatctgcgccgttatgctgtatgatgctaaattatcccaggatttcgcagccaagatgcaggaagaaggcatttatgttaccggcttctactacccggtagtgccgaaaggccaggcccgcatccgcgtacagttgtccgcaggccacgaaacggaacatctggataaagcaatcgctgcatttatcaaagttggaaaagaactgaacgtaataaaataa

SEQ ID NO: 233 - DNA, 14468 bp, unidentified
  source 1..14468: mol_type = unassigned DNA
  misc_difference 8311: note = a, c, g, or t
  misc_difference 8312: note = a, c, g, or t
  misc_difference 8313: note = a, c, g, or t
  misc_difference 8314: note = a, c, g, or t
  misc_difference 8315: note = a, c, g, or t
  misc_difference 8316: note = a, c, g, or t
  misc_difference 8317: note = a, c, g, or t
  misc_difference 8318: note = a, c, g, or t
  misc_difference 8319: note = a, c, g, or t
  misc_difference 8320: note = a, c, g, or t
gttatgagtatatctgataacttcgagggtggtcttatgaaggctatacgttcacttgaacagcatgttgacagccttatgtcatacgattttacaggacttacagatgaggaacttttagaagatcttgctgtagttgatgacagaagaatctggaagatagcagaaggcttaagaagaggcatagagccagcagttatgcatgacataacaaagattgacagatggtttatagataagcttcagattatcgttgagatggagaattcattaaagaaaggtcctcttacagaagaattattaagagaggctaagagaattgagttccctgataatgttattggagaacttacaggacatacagaaagagaaataaaagaacttcgtgataagtatgatattcacgcagcatttaagatggttgatacttgtgccgctgagttcgcagccacaactccgtattactattcagtatatggcagtgagaatgaagctgcagagactaaggataagaagaaagttcttgtacttggttcaggtccaataagaattggacagggtattgaattcgatttctgttcagtacattgtacatgggcatttaagaaagagggttatgagacaattattatcaataataacccagaaacagtatcaacagactttgatattgctgataagctttactttgagccacttacagaagaagatgttgaaagtattgtagaattcgagaagccggatggagctgtagttcagtttggtggacagacagctatcaagcttacagaagctcttatgaagatgggtgtgccaattcttggaactaaggcagaagatgtagatgctgctgaggatagagagttatttgatgagattcttgaaaagacacagattcctagagcaaaaggacagacagtattcactgttgaggaagcccttaaagctgctaatgaacttggttatcctgttcttgtacgtccttcatatgtacttggtggacaaggtatgcagattgctgtatctgatgaagatgtagtggaatttatgggaattatcaacagaattaagcaggatcacccaatccttgtagataagtaccttatgggtaaggaaattgaagtggatgccgtatgcgatggcgaagatattcttattcctggtattatggaacacattgaaagagctggtattcattctggagatagtatttcagtatatccagctaagtcaatctctccaaagataactgaaatgattgctgattacacaggaagacttgcgagagcacttcatgtaaagggtatgattaatatccagtttattgtatacaacgatcaggtatatgtaattgaagtaaatccacgttcaagccgtacagtaccatatatcagcaaggttactggtattcctattgttaagcttgcaactaaggttattacaggagctaagataagagatttaggttatgagccaggtcttcagaaggctgctgattactatgcaatcaagatgccagtattctcgttcgagaagatcagaggtgctgatataagccttggaccagaaatgaagtctacaggtgagtgccttggtatatctaagagctttgatgaagcactttacaaggcatttgagggagctggaataagacttccaaagcataagcagattattatgactcttgcagataaggataagcaggacggtattgatatagcacagagatttgaagcacttggatacaagatatatgcttcaagaggtacagctaaggttcttaaagaaaatggcgtacacgctattcaggttaataagattggacaggaagctccaacactccttgaccttatattagagcataagattgatcttgttattgatacaccagaaaatggtattgagagagcaaaggatggtttccttataagaagatatgctatcgagacaggcgttcactgccttacaagtcttgatacagctcacgcacttatctcaagtcttgagcatgcatttaataatcaggaactttcaatagtagatattgctacaattgataacagaggttaattgaattaatgcaaatagtataattatgcagagtgatatatatataatgagcacaaatgtgctcatcctaaaagctacgcaaaaattgtgatataatgtttatataatacattttataagtaatattatagtcctccagaagctaagtaaggcgaatgtgccttaaaagcttttgggggacttttataatcagagggattatgttaaaatgcttaatatgtcctgaataatatatttgataatcagggcaaaaaggagaatatatgagattattgaatataggtgataagcttattaatctaaagaataaattgaagttaaaaaatgcagtgtcaatagcggcagctgttatgcttggtgtaacttcacttgcaggctgtggctttgtgtctaacccggttgaatatatgagccaggcagataatgagaatggtacggttagcgataacactgataagataacagataatagtggaaataatgcgggcggtatgaaagataacagctctgatgccggaagtattgttaatggcagcgacaatagtaatggtaataaccagaccagtggtaagagaaaggcttgtattgttgggacatatggaagtgtgagtgagcttgttaatacagcagattatgagaataaaatagatattgaattaattcaggaaaataaagattttgatgaaacaaaggatttaatatcattggcttctaaagtccaggaaatatgtagtggtgatgcggatatagttatcgtatcggcgaggaaaagatttgcagaccagattagatattttcttacttatacaatagatacagataagagtatatatgttgttgaggaagataataacaattataagacagaaatagctgatattgttgataataaagcgaataaggttaatgatagtgcaaaacatcattttgacgtgacagggattaaggatatgggctatgtcggtatggttaatgattatataggcaatgatgtgtatacagcacagaaaataatggcttcatatgagtctgtagtagtagtcagcgatactgctgacggaagtctgtcgccagcaatgacacagcttgtaaaagatgtatcaggttatattaaggtaattgttgttaataattctggcagtgaatatgactatgcggctgatggtttaaatgtcatcacagcacagacaatgacaagctggcaggcaagaataatggcaatgttatgtcttacagataagaatataactgactggcaggagttctttaattaatggcagttgtgaagctgtaatgtggcagtgcaatttgcagatgcggtatattacataattcgtgcagttatatcagggcagctgaattaaataaaacagagtaaagattttgtgagttgaatcattaaataaagttgaattgataattgtacacaaatatgttactattatacatatgatgcaattcggaaagggtatatatattatgaatcagacaaaaatacaggacgtaataagacatatcagcaaagatgaagactacggcgtagatatgatggagaagctttctttagctgatgcagtagaggttatggctgttgtactgccatctttaaagaaaagagccaaggagatgggcaatactaacgatttagcatattttggaagaattgaagagatatatgcaaaggttatagctgataaattaagaaaagaggaacatttatgggttgtatattcaagtacaacatcgtacccatatatggtagacagtgatttatttgttctttttaatcctaagaattcttcacttattgagaaaaagcttaagctcagtggttacgaggtatcagttggtgttgagaataatgatgcgtttgctatggagttatgccatatgtatcgtaatggatataagaatataagacttacagatggcgacaagcttgaatatgtaataccaagagaagcatttggaacatatgatgagttctttagggatgattatgtgactaacccaggtttacagaatacaatgatttcttattttcaggagttcagaaagaatacagacaaagatacaataaaagagcttcttgataagagagaaaatgctatgttaaatgctatggttaattctgaatatatggttccatgtgttaaggaggagacagaggaagaagtatctatagcacatcattttattgatgttacagacagggttaagcataaggaagacgagcaggttatagcaataccggcatttacagatggttttgagatggacaaatgctataagggacagtatgagaatatgctctatacatataaggaacttgttgaggctatagacgagcttggagcttcaggagcaatatttaatccacttggaataagttattatattccacttgaaacacttaagaaaatagaaaaagatttcaataaatagaataatatgtaagcctgcttgtatcgggttttatgattgtatcacaattatgtgatatattgtaagatgtgatactggcaggctttttatgtaatagggaaatctaattaatttaattcattatacataaaaagtcctatatacaggttcgtactgcagtgcaaatataggcacctataatgaaaaatacttatgtaaaaatacttttacaaaattactttatgaaagtgttggcaaattacttgtaatgatgtaaacttagattaacttaagaaatattatgtatgattatggaggtaatgtttatgtggttagctgatttgggcaatggaaattataggaatccgatactttatgcagattattctgaccctgatgctataagagtgggagaagattattttatggtagcatcaagcttttctaattcgccagcacttccaatattacattcaaaagatttagtgaattggaaggttgttaattattgcttgaaacacattccggaattcagatataacaatccgctgcacggatgtggtgtgtgggcaccatctataagataccacgagggtacatattatgtatgttttccaatgccagatgagggaatatatatgacaacaaccaaagatccgtttggtgaatggagcgagcctgttaatataagaccaggtgcaggctggattgacccttgtccattctgggatgatgacggtaatgcttatcttgtggcaggtgttgcaaagagcagaattggatataagagtgttcttcatatagtaagaatgagaccagacggtatggggatatttggagatgaagtaaagatatttgatggtaatgagaatgatcagataacaatagaaggacctaaaatgtataaacataacggatattattatatatttgcaccagcaggcggtgttaagaccggctggcagacaatactccgttccaaaaatccatttggaccatatgaatataaggttgtattaagacagggtgactctccagtcaacggacctcatcagggtgcgtgggtagatacaattactggtgaggactggttcttacattttcaagatgtgtatgccgcaggcagaataacacatttacagccaatgcattgggaaaatgactggccaataattggtgttaataaagagggcaatgattacggtgaaccagttatgcaatatgtaaagcccaatattggaaagacagcagaggagtttaaggacacagataaatatccagtatgtgagccagacacaacagatgaatttgataccgacaagatgatgttacagtggcagtggaattctaattatgatgacagctggtatgtgactaagacagatgcctatggaaagaaaacaccagacggctcatatataagacttaatgcacttgcatcaacacctcttagaccagtgagcgattacagaaatcttctcttacagaaatggcctgcacctgaatttgagtgtgttactaaaatgtgcgtgaatggtcttgaaaatggagactatgccggaattgtgtcattaggcgtggaatatggagcagttggaattgtcaagaatttcggggaatatgcaataaggacagtcagaggcacccagagctttgattgtgaggcggcatattctaaggaagattttaaggactatcctatagctaaggatacatttgctgataaggaaaagactgtatatttaaggtatacagttaagagaacaggaactaaggataccaaggaaatggcactggctgttaaaaatgttcctgtagaagaggtgactttggagataagctttgatggaaaggcttatgagaagcaggtgagctttacagcaaaggcaggacgctgggttggcgttaagaatggaatgtttgttaatcataataatgagattaagaatgagaatcagggggatggatttgtgacggttgattatatcagatatagatgtatagacaacgggagattggattaaattaacataagtaacaaagatatgctttcgctgagtgtcgctatcagcggtactaaagtgctaaagtacagcacttaagtgccggcggctccacatatggctgggacataggatgtatggcaggagttattttagttgttggagatgtttaattaaatagttatgaagagtgtgtattttgctgtagtggcggagtgcacacttttttgtgggaaggtttggaagctgacattagaatatttatgaggattttgcttgcattggagagcagggtggtatatagtatcttaaatgataaattttatgagatttgagtataaatattgcgatttaaggaagtactatgatggttaatttaataagaaagcagtcgcctgcaagaataatagcgtttgggtttatatttgtgattatagcagggtcagtgcttttgtctttgccgtttagtgttagggatggtgttgatttaaaatacacggatgctttgtatacatcaacgagtgcagtatgtgtaacggggcttgtggtggttgactcatatgacacatttacacctgtggggcaatttatactaggggcacttattcagataggtggtcttggtgtgacaactatgggtgccggaataatacttgttatgggtaaaaaggtagatataaaaggacgtactcttttaaaggaagcactgaatatggatacggcaaaggggcttgtaaggcttatacataagatatttattgttacgcttatatttgagggggctggtgcaatagcaggttttctggtgtttataagagattatccattttttagggcattgggaataagcgtgtttcattcggtagcggcgtttaataattctggttttgatattcttggaaataaccagaaccttattaattacagtggtaatatagcacttaatattataacctgtacgcttgtattttttggaggtattggcttttttgtaatatgtgaattgtgggaaaagagatttaagtggaagaaattctcaatgcacacaaggattgtaatatcagtgagtattgtgcttattatcgctggtgctctgcttcttaagattacagaaaatatctcgtggatgggagcattctttatgagtgtatcagccagaacggctggatttgcaacatattcacttgggacattttcaaaatcgggactacttgtgattataatacttatgattataggagcttcgccgggatctacaggaggtggaataaagacaagcacattttttgtcctcatacagggtgttaagtcggcagcaactaataagtcggagaaagcatttcattatgcagtacctaaggaagcgttcagaaaggcttcggttattatgatacttgctatgtgtgttgtgaccgtgggagcttatcttatgggaatatttgagccggatattgattttattgatatattatttgaggtcgcaagtgcatttggaacggcagggctttcaacaggaattacacaacagataggaattgcaggaaagctgttatctattgttattatgtacataggaagacttggaccgcttacgattgctacattgtggcatttctctaagggagagaggattaattatccggagggtaatataactatagggtgatgattgtgaaatatatgtggagagagtattgatgcactgttttggtgaatgttgttattgaaacgaaacagttgtgagggcggactatattgcaagctgggtactgttgaagccgccggcacttagcggctgtattttagccgcttannnnnnnnnntggtttcaagtagcgaaagcgtgcccagcggtaatatagtccgccctcacaacgtccgttagccaacacccaatcatcaatacacacccaacaataatacgtgaattcggaggtaattatgtttaaaactagaatatcaaataaaaatactacttatggaattataggtttaggaagatttggcgagtcgcttgcattatcgcttgctaacagcggtgctgaatttatggttatagacaaagatgaggaaaaggtaagagaaatgcgcgattatacggaaaatgcctatgtcgtgcagacacttgacaagaaaagccttagcgcaacaggaatacagaattgtgatgttgcagttgtgtgtataggtgaacatattgatacgtcaattcttacaacgcttaatcttgtcagtatgggaataaaaaaggttatagcgaaagcaagaggtcttgaacacggagaaatattggctaagcttggggcagaagttgtatatcctgagaaggatatggcagaaagacttgctaaccgtcttatagcttcgcaggttatagatgtcattcaacttagtgagaaaattaatatatctaaggttatgcttcctgacaggcttgagggcaaaacagttgtggatattaatatgcgtaagaaatttaatgttaatataattgcaattgagaataatggggaagttatgcaggttgtaaatccagagtatgtgtttagaaatggggatatattgtatctttcaggtagttcggaagggcttaataagtttggtgagtggataggctagataggacagacaattacattaaatcaacataagcaacaaagacaagcttatgttgatttaatccaacctgacaccttacaggggtgcctttttggcaggagatggttagctaatagaagacatggtcgcctattattgtgccgcctttatcgacagtgctgtcgtagacgtgaaagtacagagcggcgattgttatatgaccattaagaacctcattagcggctctggtacattcagcgttagcacctctggcaaggacaattgcgaaacgtccacttgcgacagggctgaactgggaaggggcgtagagtacggattggattgtgttgccaaatttaggactgtttacacgatttacgataacgcttccaacggcaagcttgccctcataaggctggttggcagcttcacattctatcatagcggataccattgcaaggtcgcttgtatcatatgctataggtgtattattaatgacttcatcaactgatggggtcatttttttgatttcttcaagctgtctttggatttcttcctgacggatacgttcctcgtattccaatgcaagggcttcagctttggcaatattttcagagttagtatctatttttgactgctttgaagctatgagccttttaatattattagactcagctattgactgctcttttaaagacacaagttctgtcatattagtctgtagacttagctggttctggttaagcacagcaataagagaacttaattcttcaagcattttgcggtcatattgggaaatgcgcgaaacatattcgtttctttgcaataaatcagccatacttgaagaagaaagcaatacatcaagaaaactatagtcgctgttctcgtacatatattgtatacgaagcttcatagtatcgaactggtgttgtttctcaatctccatattgcttatgtcttcattaaggctgtcaatctgttcctgtgtatcagcaattctgtcattaatagagttcagcttttcaccagcattatcaagctctgaattaaggtcgttaagttcacttgagagctgcgactgctcatttcttaagcgttcaagttctttgttattatcatcatattctgtcttggtatcagcaagtgaatatacaggtgatgtaacggatatgaaagtcaggcagacaatgagtgccaacgctatgtatttagttactgcattaaaatgtttcaactgcaagttatatcctttctgattctataaatttgatgtcaggagtggctgaaagtcaaaagtcttatcgtgcaggcaagaacaactgtcagacattttatacctgatatcgtattattaatattttttagctataacaccaaaatcttaatatagtataaaatgtgtccacataaattgcaagcagccacaacgggtgttattattaattagcatatcaaattaatggtaatgagatgatgagagttttatcgtggtatactaaattatagaaagaaagaggaattatatgcttgaattaattaatattaagaaagattatgaaaccggtgatacaaaggttgcagctttaaagggcattaacttaaggttcagggactgcgaatttgtatcaatactcggtcagtcgggctgtggtaagacaactatgcttaatattatcggaggacttgataagtatacaagtggtgatttaagaattaatggtgtgtctactaaagattataaggacagggattgggatgcgtacaggaataattcaattggttttgtattccagagctataatcttataccacaccagacagttctttctaatgtagagcttgcacttacattatcaggtgtatcaaaggcagagagaaggaaaagagcagttgaggcacttgagaaggtaggacttggtgaacagattcataagaagcctaaccagatgtcaggtggacaaatgcagagagtagccatagcgagagcacttgtcaataatcctgatattcttcttgcagatgaaccgacaggtgcacttgatacagagacaagtgtacagattatggagcttcttaaggagatttccaaagacaggcttataattatggttacgcataacccggaacttgctatgaaatattcaacaagaattgtaaggcttcttgacggaactattgttgatgactcagatccatatacagaggaacagcttaaaaaagacatagcagagggaacagataagtcaggcacagcaacaaccaatggttcagcatataattcaggcgtgtcaggtcagggaacaagtatatatgtctcaaagactcaaagaaagaaaaagccaaagacctcaatgtcattttttacagcattatctttaagttttaacaatctgatgacgaaaaagacaagaacaattcttacagcctttgcaggaagcataggaattatcggtatagcactcattttatcaatatcaaatggtatccagttatatattgacagggtgcagagggatacattatcaagttatccaattcagttacagtcagaaactgtagatataagtagtatggtttcaagtatgacagataatggcggcagtggtgaaacacatgaggatatggataaaatatatagcaacaatataatgtctgatatgatgaatactatggttgcagaggttcagagcaacaaccttaaggaattcaagcattatatagagaatggtggaagcgatataaaggattatgcgagtgccatagaatatacttatgatattccagttaatatatataagtcagatacatctgataaggtaacacagcttaaccctaatacaatgtttgatgcgatgtatggcggttcttcacagagcagtatgagtggaatgagcatgtactctaattcaagcgtatggtcacagttatttgataataaagagatacttgagtcgcagtatactgtacttgccggacactggccggaaagctataacgaggttgtgcttgttgttaatgagaacaatgaaattgatgattatactttgtattcaataggacttaaagaccctgacgagattacagagatgattaaggctatgatgtcaggaaagagctatactcttgataatgatgaaacaacttacacatttgacgagatattaaatacaacatttaagcttatacttccaactgatgtatattcgtataatgaaagtaatgaaatctgggaagataagtctgataatgatatatttatgaaaaatgttgtcaacaacggaacagatataaagattgcaggaattattaaaccttcagaagaagcagtaagtacatctttaagccgtggaattggttatacaaaggaacttacagaatatattatcaatggtgttaatgacagtgctatagctaaggcacagcttgcagatgaggatacagatatattcacaggtgttccatttgataataataaagatacacctataacaatggatgatgtgcaggcatatcttgagagtattccatcagatgagcaggcacagacaagaatgttcttatcgactatgacagatgagcagatacttgatatgttctcgcagtcagttaaggcacagacaactgatgcgacactggaaactaataaaagcaagcttggaataactgatttggacgatccgtcaggaattaatatatatccatcagattttgactctaaggagcatattcagaacataatatcagattataatacaagccagcagaaagatggcaatgatgaaaatgttatcaactacacagactatgtaggaataataatgtcatcagtaacagttataattaatgctatttcatatgtattaatagcatttgttggaatatcacttatcgtatcttcaataatgataggaattatcacttacatttcagttcttgaaagaactaaggagattggcatacttagaagtataggagcatcaaagaaggatatttcaagaatatttaacgcagagacacttattgaaggctttgttgcaggtgcacttggtataattgtcacacttattttatgtgtgccagctaatgcaattattaaaaatgttacatcgattgccaatgttgcacagcttcctgttgcaggtggagttattcttgttataataagtatgcttcttacgcttattgcaggacttataccggcacgacttgcagcaaagaaagacccggtagttgcattgcgttcggagtagaaacgaggattaatatgagatttacattagatacacatacgcacacaattgcaagcggacacgcatataatacaatagacgagatggcagtatatgctgcaggacatggggttacacatcttgcaataacagaccacgcacctaagatgccgggaagtgcaggtgtattatatttttctaatatgggaataattccaagaaagaaatatggcgttaatatatatatgggctgtgaagttaatattatggattatgacggcagaatagacttatcagagtatggacttaagggctgtgatgtagttatagcaagccttcacattccgtgtattaagccaggaagcattgaacagaatactaaagctttaataaatgctatggataatccatatgttaatataataggacaccctgatgattcaagatacccggttgattatgaacagcttgtaagggcagcgggggaaaagcacgtcttattagaacttaacaatacatcattatcacctacaggaccaagacagggagcatatgataatgatgttacaatgcttaagctttgcaaagaagccggcgtatgtatatctattggaagtgatgcccatattaaagagtcaatatgtgattttgacagggcttataaggtgattgaggaagtaggtttcccgaaggagctgattgtgaacagtaatacagaattatatgagtcatatataggaaaaagacagtaaaattaataaaatgtatttactgtaggactttactgtgttaaactgtacaatatattataaatgcagattagcaaaagttgagggttaatatgaacgataagttaaaatcaaaagaagttgagcaattatttgaggctatattaagtcttaatgatgttaaagagtgctatgatttttttgaggatgtatgcacaattaatgaacttttatctttagctcagagatttgaggtagccaaaatgttaagagaacagaagacatatcttgagatagcggaaaagacaggtgcttcaacagctacaataagcagggtcaaccgttcgcttaattatggcaatgatggatatgacagggtatttgaaagacttggtatattatcagataagcagtaa

SEQ ID NO: 234 - DNA, 7441 bp, unidentified
  source 1..7441: mol_type = unassigned DNA
  misc_difference 4747: note = a, c, g, or t
  misc_difference 4748: note = a, c, g, or t
  misc_difference 4749: note = a, c, g, or t
  misc_difference 4750: note = a, c, g, or t
  misc_difference 4751: note = a, c, g, or t
  misc_difference 4752: note = a, c, g, or t
  misc_difference 4753: note = a, c, g, or t
  misc_difference 4754: note = a, c, g, or t
  misc_difference 4755: note = a, c, g, or t
  misc_difference 4756: note = a, c, g, or t
  misc_difference 6452: note = a, c, g, or t
  misc_difference 6453: note = a, c, g, or t
  misc_difference 6454: note = a, c, g, or t
  misc_difference 6455: note = a, c, g, or t
  misc_difference 6456: note = a, c, g, or t
  misc_difference 6457: note = a, c, g, or t
  misc_difference 6458: note = a, c, g, or t
  misc_difference 6459: note = a, c, g, or t
  misc_difference 6460: note = a, c, g, or t
  misc_difference 6461: note = a, c, g, or t
ttacttgctcgccttcgcggccttgaaggcctcgatcagcatcggggtgaccttgaacaggtcgccgcagatgccgtagtcggcgatctcgaagatcggcgcggtgtcgttcttgttgaccgcgatgatgcactcggactcgctcataccggccttgtgctggatggagccggagataccaagagcaacgtagaccttcgggtggacggtcttaccggtctgaccgacctgatggtcggcagtgagccagccggagtcgatggcaacacgggagccgccaacaacgccgccgagcacatcggcgagctcgtgagcgagcttgatgccgccctcgacgtccttggagataccacggccgacggagacgatgtagtcagcgccgatcaggtcgacgagcttcttggcagccttgacgacctcgacgacctcggtctggagatcggcggcgtcgagcttgacgtcgtacttggtgaccttaacggccttggccttcgcctcgtcgtaagcagccttcttcataacgccgggacggaccgtcgccatggagggacggaagcgcgggcagatgatggtagccatcaggttgccgccgaacgcgggacgggtcatcttcaggtcgcgagagacatcgtggtccttacccatgaccttcgcggtggccatgccgtcgatcttggcctcgggcagcgtggaagcgccgcgcaggaagtccttgtagatgggcatgtcaacgtcgaggtgggtgcagtcggcgcagagaccggtgtgcagacgggctgcgcagcgggggccgaggtcacggccgatgttggtcgcgccgatgaggaaggcctcgggcttcatctcggagatgacgtcgcagatgaccttggcataggcgtcggtggtgtagttcttcagcagggggtggtcgcagacgatgacctcatcagcgccgtagccgccaatgctctcggcgagatcgccgacattgtcgccgaccagcagaccgcagagcttcacgcccagctcgtccgccagcttgcggccttcggagatcagctcataggaggtggacatcatctggccctgacgctgttcgcagaagacccatacgttcttgaactcttcgatcttggaggagtcatagttgggattagcaagtttcacttcgttacgcatcgtattgatctcctttccttaaatgatgtgtttttcgagcaggatgccggcgagcttctcgcaggtagccatgtcgttgccctcgagcatctgaccggcgcccttctgggggggcgtgaaggaggtcaggatgttggtcggggagcccttgaggccgatggtcgtggcgtcgatcagttcatgatccttcagcgcctcgtaatcgaggaccttcatgggcttggaatagcactcaaacacaccggagacgctcatataacgcggggtattgagctccttgatgcaggtgatcaggcacggagtctgagccttgatggtcatgtagccgtcctcgagcatgcgcttgacggtcagggtgttgccttccttcttcacatcggcggcgtaggtgatctggggcaggtgcagcttctcagcgatctgaggaccgacctgagcggtatcaccatcgatagcctgacggccgcagaagacgatgtcgtcgtcatcgagaccgatggtgtcgagagcggcggcaaggatctgggaggtggcgtaagtatcggaaccgccgaactcacgggcggaaacgagatagccgtcatcagcgcccatggccatcagctcgcgcagcataccttctgccggcgggggacccatggtgacgacggtgaccttgcagcccagctcatccttgagcttgagagcggcctcaacggcgttcatatcatcggggttgatgatggtctgcatggaagcgcggttcagggtaccatcgggattgacggcaaccttaccggaggtatcggggacctgcttaacgcaaacaagaatcttcattatatctttacctccttttttagttcacaccaagatacttggcaacgaccatacgctggacctcgctggtaccctcgtagatctcggtgatcttggcgtcgcgcatcatgcgctccacgggatactcacgggtgtagccatagccgccgaagagctgaacagcgcggcgggtgacgtcggaagcggtctcggccgcgaagagcttggccatggcagcgtccatggagtaatcctcgtgattctgcttcttcatagcggcagcgtaaacgaggtactgggcagcctgagtgcgggtgtgcatgtcggccagctggaactgggtgttctggaactggctcaggcggcgaccaaactggatacgctccttggtgtacttgacagcctcgttgatggcgccttcggcaagaccgagagcctgggaggcgataccgatacggccgccgtcgagggtcttcatggcgatcttgaagccttcgccttccttaccgagcaggttctccttggggacgacgcagtcttcgaagacgaggtcgcaggtagagctgccgcggatacccatcttcttctcgtgcttaccggtggagaagccggggaagtccttctcaacgatgaaggcggtgataccgtggttgcccttgctcttgtcggtcatggcgaacacgacgaaagtggaggcaacgttaccgttggtgatgaagcacttgctgccgttgaggacgtagtcgccgttctcgttcttgacagcggtggtctgctggccggaggcgtcggtaccggcgccgggctcggtcagaccgaacgcgccgatcttgcggccggacagaaggtcaggcagatacttcatcttctgctcctcggtgccgttctcgaaaatgggagcgcagcagagggaggtgtgggcggaaacgataacagcggtggtgccgcaaaccttagcgagctcctccacgcacatggcataactgagaacatcgccgccggcgccgccgtactgcttcgggaagtaaatacccatcatgccgagcttggccatcttttcgacggtctccatggggaagcgctcttcctcatcgagttcctcagctaaaggcttgacttcattttctgcaaattcgcgatacattttgcggaccagcagatgttctttggacagatggaaatccatagtcttttgctccttcactataaaaataattggattgtctaattattcacaaatcagttccatgactctcattatatcctgtgcgtttcattttcgcaaggggaactatcattcctttttggaattcgtgctttttgccgaattcattaaagtctttttgacatttccgttccttttatgacagttttctgtcattttcaggaatcctttccattccaaaagagaaaaggggaggcagtttttgtaaactgcctcccctttttatccttttagggacggattacttcttgctgtaatcgtagaagcccttgccggacttcttgccgagctggccgccgcggaccatcttcttgagcagcagagcgggacgatacttcggatcgccggtctcgctgtagaggacgttcataatggcgaggcacacgtcaaggccgatgaagtcgcccagggcgagggggcccatggggtggttcgcgccgagcatcatggccttgtcgatatcctcgacagaggcaacgccggtctcgaccaggccgatagcctcgttgatcatcgggatcaggatcttgttgacgacgaagcccggagcctcagcgacctcgacaggctccttgccgatctccttggagaggttgtagatgaagtcgaaggtctcctgcgtggtgttggcgccgcggatgacctcaacgagcttcatgctgggcacggggttgaagaagtgcatgccgatgacggcgtgcttcaggccgagacccatctcggtgacagacagagaagaggtgttggtcgcgaagacggcgctctccttgcacatctcgtcgagctcgccgaggagctgacgcttggtgtccatgttctccgccacgcactcgatgacgaggtcggcgtccgccgcggcagacttctcctcgacgaggatgttgttcaggatggcgtccttggcctcttcggtcatcttgcccttctcgacacgcttctgcagggaagcggcgagcttatccttgtggcgctgagcggaagcgacgctggaagcgtacatcagagcggtgtggcccttggccgcgaagacctgagcgatgccgctgcccatggtgccggcgccgaaaactgcaactttcattgtgtgtatcctcctacaatataaatagataattctatggaatcacttgttgataaagggctcgtgcttgcgcttttcgaggaaggcgcccatgccctcctgctggtcggcgctctggaagcaggagccgaaggccttctcctcgatcacgacggcgcggtcaatatcgacctgaagaccgtcgttgatggcctgcttggacgcgcgcaccgcgatgggcgcgttgccagcgatctggccggcgagcttttccgccgcggcgtagaggtcagaaagcggatagaccgcgttgacaaggccgatgcggtaggcctcgtccgccttgatgttgcgggcggtgtagatcatctgcttggccatgccggggccgacgaggcgggcaaggcgctgtgtgccgccaaagcccggcgtgatgccaaggcctgtctcgggctggccgaagacggcgttatcggagcagatgcggatatcgcagctcatgnnnnnnnnnngacgccaggcgaatatcgcatgccatcgaaagctcgcagccgccgccgagggcatagccgcccaccgccgcgatcgtcgggatggggaacgcttcgagcttgcgcatgacgtcgttgccctgcttgccgaaggcctcggcctcctccttgctgagctccttcatctgcgcgatgtccgcgccggcgacaaaggacttctcgcccgcgccgcggacgatcaggcagcggatctcgcttaagtccaccgcgtcgagcgcggcatcgagatcggcgagcacctgagaattgagcgcgttgagcgccttttcgcggtcaatgatgagataggcaatgttgcccttgggttcatatttgacaaaagacatcgtgtgtctcctcctgtcttcttcaactgccccctattatatgggcggcaaggcatatttgcaagagaaaaatcacttttttcaaaaaagtttcacacttttccggtgtcattgcaagaaacgttgcatttttaatgatcttttctcccaatgcagcaactcttgtataaaatttttaaaatgacttgtctcttgcaccaattttcgatatgataggctttaattataggaaaacgaggttcattctatgcgaatgcgcaaaaagaaaaacctgcttccccgcatggagcggtgcggggcgtatcagatcaaggacccctacgagcgcaagggccgctggcacgacttgatgcccgaggcgaaggagatccgcgtggagctcggctgcggcaagggccgcttcaccgtcgagacggccgcggcggagcccgacgtgctgctcatcgcggtcgaaaaggtgcccgacgcgatggtcgtcgcgatggagcgcgcggcgaaggcagagctgcacaacgtcttcttcatcgacatcgacgccaaccagctccctgagatttttgatcagggcgaggtcgaccgcatctatgtcaacttctgcgacccgtggcctcccaagcggcaggccaagcgccggctgacgcacggcaatttcttgaagctctaccgcaaggtgctcaaggacaacggccaaattcatttcaagactgacaacgacccgctgtttgagtggtcaatcgaggagatcccgcagtttggcttcgaactctctgaggtcacacgcgatctgcacgcgaacggacagcgcggcgtgatgaccgactacgaggccaaattctatgccgagggcaagaacatcaaccgctgcgtcgccacgatgcagccgtgggaagagcccgaggaagaggatacgcccgaagaggcggacgaaacggctgaataagataaaaggaaggttgactttgtcagccttcctttttgctttcttccagatacggcgaatacatcatcaccgcgtcgttcacggcgacaggcgtctccgcgagcagattgccctgcaaatccaacgtctgccggtagagctcattgtggcggatgtagccgccccagtactgcgcgcgcatctcatggctgcgctcgacgaccgcatagcgctcggtcggctcggcgctcacgcgccactcgccctcaaggtctgttttgccgacgcggacgcgcatctgataggtgtcctgtgtgtcgttgcggatcatcaggtcaagataggggtaaaagcaggtcgcaccgctgccgaacggctgcgtgcgggtcgcgtcgggaaagacgtcgtagcnnnnnnnnnnggcggtggcgctcgacgaccgtgagcggcgtgtgcagcgtcatccagtagatgaggtttgagagctggcagagcccgccgcccgtcgcggccagatacccgccgttgcgcaggatcataccgggcagataccccttccccgccgtcggctttccgatgagataccagtagctcatcgtttcaccggggcgcagcaaaagcccgtcgagccgcgcacaggcgaggcggagattcgtcaccttgttgcgctggagctgcatgtcgacgtccttgagctttcgcatgagcggcgtatggtgggaaaacgccggatatgctaagtcttccccgctgcgctcgcgcgcaaaatgcttccgcatcgaaagccatctgagttttcgctgcgcgctgaaatacgcgccgccgagcttcagccgcaaattagagcgttttttcggttcgcggacggtcatatgcttccctcccctgtttttctgcttttatagacgcaaaacggcgggaaaaagttccaacattttcttatttcaggctcatcacgtagatttgacacgggttccactcgtcccagagcgtcgggaatacctcaaactcgccaaaaccgagggcgagatagaagcggttcgtcgcgtcgtactcagggtacttccccatctgcacggtcttgacctgcaaaaacgagtagccaagctccttcgcccgctgcttcgctgcggcaaagagcatcttgccgacgccgcggcggtggtattctttcagcacgcccatgacatagagttccgccgtatccctccccgtttcggcaaggtaaaggaagccgacggcgttctcgccgtcgaacgcggcgaaaaacggctgcttaacactcttttcgatgtattcctcgcgcgcctctggaatgccaaaccagtcgggcagcgattctaaaatcaagcgcgtaatgcgccgcttttcatcgggagtcgtaatttctctgatctccat

SEQ ID NO: 235 - DNA, 12288 bp, unidentified
  source 1..12288: mol_type = unassigned DNA
tcagcggaacaatgcctccccgttcaccggttccccgttgtgggtcagagcaaagtatacgttgcttccttcggtgctgtagtatttcgtgggcgctgccacactgccgatggtgtcgccgggattcacataggaattctctttcactgtgatctccgtcagctgtccataagtggcctcatagccgtcacccagatccagggtcaccgccttgccgatctcctcattttcgaagattgaagtcacttttccctgtgcacaagcggtcactgccgtaccttcttccgcggaaaaaatggtggcgggattgtatttatactgatccagtgtagcaaaataagtgctcttgtccatagagtaatgcatcagaatatcactctgcaccggttgctgtaatccgtcgctttctgcaaagtgcagtgtcttctcaacgaccacatccccgcctgctgtctgctttctctcttccttttgtcggtcggcatcggaattctgctgctctttctgtgcggcctccagcagggtctcctgatccgtcagccccggaatctctacgttgccggagcctacctcctggggcatataatccagatcatcctcggtgacaggagctcccgcgatctcatttcccgctgtattatttgccgtcagtccggggatgttctcgtcctccttcagaagatgttcgtcgctattctccgtgatctcctgtaatttgtcatccgcattgttgggaagcgcagtgaagtccaaggtataaccatcatccctggactccacattctgccccttcatatagacccctgtcatggtcaatgctgccagtacaaaggctgaagaggctaacattataatacgttctttgttaataccgctctttttatttcttctcatatcctatccgcatccttcctgttccctgagtcaactgcctgctatacaatcgtttcaaccactttccctggtttatcctatagtcttgcccgattcatgggttttattcagaatgtcttcgatatgaaatttgcatttatttggaactattcagagccatgtaaatagcgtcgaatgtttgcattcgtaagaacatttgatgctatttatagggcgaagtaactgaatagttatatttattctatgcctgtgcggcataggcagccatatccacgtgctgtaccgtacccacatttccgttttcgtataagaaaataccggtcttgcggaccacagcattggtcgcattggcattggtagtgccgtcctgagccttacggtctccctgcagggtaaaatccgtagaagcgttttgcagacagatagcaccgacacccttgtcagaaagtttgtacagtacgtcgttgccgttttcatccttgcaccagatttttaattttgaccagatggaatcgttctcatcgatccagccattgccatcctcatcatactgcgccagatctgcaaagccatccccattccgggtgccgaacagctcactgccgtcgttgatagtgccgtcaccgttcttgtccagtgccagatagccgctgccattcagcacggagatctcttcttccttgccatcggcatccagatcaaaataaaaggtctgatccgacacttctgccacatcagtatccaggttgatcaccagcggatcatggagcgtgaattctgctacattgagttgctctttgtagtattcctcgcatctgcggctcatatttacatttacattaaaattgatctctctgccatccttggtccgtacgcttcccacggtggaaaaactggtatcctcctgttctatgttccaggtctcgctcacatagttcaaaattttcacacgggacgtgaccagattgaacacgtctgacgcaggtgttgcggttccctgtgtgctgccggaattcgtctgggtattatttacgctattccctgtattccagctgtttccggtctgattaccgctgctccatccgttttcctgcatccagtcccgcaaagtgctgttcctggacgggaataataaatcaaaaatataacgcaccgtatattcccggatggtagacaatgtctgttcactggcactgcttcgcatatcccatctggcagaagataccagcaaacgactctgccagtctttggctgtcatcgtggtgttctctgcagtgttctcctgttcctccgtgttctgtgtggtatcctcaccattcggtgtcttctgtcccttagtggatacatctgtcagacctgcctgataatccgttatctcaaatcgtctgacgcttgtcttagaagcgtgatagcttctggcggaatccattcctatgcttgcggaatcaattctcaaatctgtaattttctcctttccccgacctcaccacgaaccaacagggcgcgcttcctgtaacgcttaacagttcaccgtcgcatgtattcataaaagcgcctgctccgcagtcgacgccgctaagcggctcatcttttatttcatacatgcggcgctccgctcatgcaatatcatatgttctgctttgtgtgccagcacccacgcagaacatatgatattgcatggctgaactgttaaactaaaaaaaatggtaaagaaacagaatacatataatatgcctctgtctggttaccatccgtggtgtcattatcaaactgtaaaaaataagtagcaggaagtgactggccatgtcacctctctgctacttatatcgtccgctatggacattttatttagtgttaatttactgctgtttgggctgagtgggagcgccaggggttccgggtgcgggaggcaccggtctgccggctgctttcagctttgctgcgatcatgctggctaccatttctctggtcaccacgatgttgccaccgaagggattgatcacgaatcccagcgccgggctgatattgccctgtgcatctttgcgcagcagcattcctgcataatcgtcaaagttcatggcgaaagtctgctgattctcctcatctctccactttttcagctctgtccagtcagtgaacgccatgaagaacttccgaccgtcctcggtggacagcatcgggaactgtactttggcatctcttgcgatggtcacccggccgttttcatcgggcacaggcaccggatcgatcacgaccggagacaggaactttgctttctgcagttcatccaggaacatctgtctgtgttccggggtgtcctctgcttttaataattcaatggatcccaccatcatggggttggataccggtttgttaaattccatattttttctccttacttctcattgtaactattcagcctctcttcgcaaaacgcatctgcgctggttagtcacatgtctctgaatagttacactcggttatagttgatcaggcatcccttcaggatgatctgacgttcttcgtcggtcagctctcccagcttcagggtgaattccttcatgccttctccgattgttaccacatatgccttaatttcctcggccttgtcttccacggctttcttaataccaggaatgaacaggtaatccagattcttgaaaggcaggtctccgggctggatcaggaaaggaagcatgccccagttgatcaggttggaacgataacgcttggtggcatactcgttggcaatatttgcccagccgcctaataccttctggcaggaagcagcctgctcacgggcagaaccgtctccgggcttcactgcgaaaatagtggaaccgaatccggtgttctcacgacttgcatcgggatactgtttctttacttcacccataacatccttcagtaccggaactgcctgacagggatgtccgccgttcatacgctctttctctgccttctggatctccttggcacgtcctacatactgcggatccttacggcttaaagtgaactctgccagtcccagaggattggagcggtaggaagaggtctcaccggatggaatcagctcatcggtagtagttacgggatcgtggatctcggatactacctgcagtaccagattctcaggcagggcacccatagcgggccagtccttgatattgggaccgaactggatctctacgctctcgtctgccacaccgtgggaatcgaagacacggttcttgtaaatattgctatcgaaatgatatttgtattttccgaaatctccatcgaagtccgttgcggaagtcagcacacccttgttggctgcggtggctgcgatggaacgggcatccatcagagctacggaagcgatctggccgttctgcagcttggagccttcacggttcgggaaatttctggtagagtgacggatactgaatgcgttattggcaggtgtgtcaccggcaccgaagcagggaccacagaacgcagtcttcatcactgcaccggtctctaagatggtagccgcacagccgttgcggatcagctccatgtatacgggcatggatgcgggatatacgcttaaagtaaactcatccgcaccgatgtatctgcccttcaggatgtcggcagccgcacagatattctcgaatccgccgccggcacagcctgcgatgataccctgatctacaatgaacttgccgttctttactttattcttcaaagtaaagtctacggcaccgtccagacttactttcgcacgcttctccgtctcatccagaatatccatcaggttcgcattcagctcttcgatggtgtaagtattgctgggatggaacggcatggcgatcataggacggatcttgtccagatccacctcgatcagtccgtcgtagtatgctacctggccgggattcagttccttatagtcttcggtacgtccgtggatctcatagaactcacggatctggtcatcggtcttccagatggaggacagacaggtggtctctgtggtcattacatcaatgccgatacggaaatcagcactcagggaagccacaccgggacctacgaactccattactttatttttcacatagccgttcttgaatactgcgccaatgatagcaagtgcaacgtcctgaggacctacacccttcacgggagcaccctttaagtatacggctaccacgccgggcatgttgatatcataggtctggttcaacagctgttttaccagctcgggaccaccctcgcccatagccatggtacccagtgcaccgtaacgggtatgggaatcggaacccaggatcatcttgccaccgccggctaacatctctctggcaaactgatggataactgcctgatgagggggtacatagactccgccgtattttttcgcacaggtcagaccaaacatgtggtcatcctcgttgatggtaccgcctacggcacacagggagttatgacagttggtcagtacatagggcatggggaacttctgcagtccggatgctctcgcggtctggataatacctacaaaggtaatatcatggctggtaagcttgtcgaaacggatcttcagcttgtccatattgccggaggtattatgctcctgcagaataccatatgccatggtgtttttcgctgcttcttctttggagatcgtaatgccggtcttcgcctgtatctgactggctgcttccggggtatccgctacgatgtccgtaccgtttaccaggtaagcgccgccctgtgttaactgaatcatgctcgtcctcctgttattccacttcttatgcatagatagagtgcatcttgtgtgcacttctttcattatactggattgttttctcagatgcaatgatcttataggatgtttttgccactgtaccacgctaaattttatttttctccgggaaccattcctcttttgttccggtgttgctataatatcctcagaaattatgccattttccgaaaatctatacgaaaacgacagttgtcggccgaattccggcggcagcggaaaggaaccttatgaatgtagtaatagctatcgattccttcaagggaagtatgacctccatgcaggcgggtttgagcgccgccacggggatcaaacgtgtttataaagatgcacatattaccgtccgtcctctggcggacggcggggagggcaccgtcgatgctctggtaaacggctgtgacggccgtatgacacaggtgcaggtcacaggcccttccggtcaccccgttgtctgtccttacggcatcgtcgacgagacccataccgcaatcattgaaatgtccggtgccgccgggattacccaggtcagcggagaggaaaagaatcctctgaacaccaccacttacggtgtaggcgaagtcatcaaagatgcaatccagaacggctgccggcattttattgtcggtatcggtggcagtgccaccaatgacggcggtgtcggaatgctgcaggcacttggctttggctttctggataaaaacggaaatcagatccgcttcggagccaaaggactggaggatctggaatccatcactacggatcatgtgcttcccgaactcaaggaatgtactttccgcatagcctgcgatgtctccaacccgctctgcggagagcagggatgttccgccatctacggaccgcaaaagggcgctacttccactatgatcctgcagatggacaaatggctggcttattatgccgctctggccagagaacagtttcctcatgccgatgccaaatatcccggtgccggtgctgccggcggtatggggtttgcttttcttaccttctgcaatgccacactggaatccggtattaagatcattctggaagaaacccatctggaaaaatatatccgggatgcagatgtcgtgatcaccggggaaggccgccttgacggtcagacggttatgggaaaagctcccatcggtattgccaagattgccaaaaaatatgaaaaaccggtacttgctttttccggctgcgtggccaaagaggccgttgcctgcaacgcagagggcattgatgcctttttcccgattctgcggaacgtggtatccctggatgaggctatgcataccgacaatgccatgaccaatatgtcggataccgtagagcaggtattccgggcgcttcagatttttcaccgttaagaatcacaaaaggacatgacccaccggccatgtccctttgtatgtttcaatattgttttattattcttcatatccattcggattgttcttctgccatctccaggagtcttcgcacatctctttgatgccgttctcagccttccagccaagttccttctctgccagagaagcatcggaatagcaggtggcgatatcgcctgcacggcggggtttgatcacgtaaggaatcttcacgccggtagctgcttcgaagttcttcacgatgtccagaacactgtagcccacaccagttcccagattgtagatcttcagtcctgcattctcctcaatcttcttcagagcctttacgtggccctttgccagatcaacgacatggatgtagtcacgtacaccggttccgtcgggggtatcgtaatcatcaccgaagacacccagctctttcagcttgccgactgctacctgtgtgatataaggcatcaggttgttggggataccgttgggattctcgccaatggtaccgctcttgtgagctccgatagggttgaagtaacgaagcaggatcacattccattcgggatctgccttctggatatccgtcaggatctgctccagcatagatttcgtccagccgtaagggttggtgcactgtcccttggggcattcctctgtgatgggaacaaatgcgggattaccgtatacggtagcgctggaagagaagatgatgctcttcacaccatgttttctcatgacatctaccagagtcagggtaccggcaatattgttctcataatattcccagggcttctgtacggactcaccgactgccttcagtcctgcaaaatgaatgactgcgtcaatctgttccttgctgaagatctcttccagagcttcacggtccagaatgtctgccttatagaaaggaaccttcttgcctgtgatggcttctactctggggatcactttctcacttgcattgcagagattatccaatacaacaacatcatagcctgcctgctgtaattccactacggtatgactgccgatgaatccggcaccacctgttaccaaaattctcatacactctctcctatccgccgtgcataggacaatactatttgttcactatggcggctgcacaatctctcatctgtcagagccggatgaaattttttcttcgtttcttacagtatcagattactgtaattctatcgattcctcaataaccttatgttgtgaaaatctgtcgaaatgtttacagcaccacaccattctcggtgagcagttctctggcactttccacagagtccacaccggtcttgttcttgatcggcgcaaattcttttcttctgactacctcgaagggcaggcagctgtccatctgatggatcatatccagcaccagactctcgaatttataaccattgggagtatccggctttaccaactctcctgcagcatccagataagggatcttcttctctacgatatgcagcggcatcttctctgccatgatcttttccagatcctgtaccttgaacagataattcaggatcacaccataattatacgcgggttctcccttctcatccttagcattcatcagttcatcagtcagctcgtagtactccacgatggaaggtctgccgtcctccaagcacataactcctactttttcatccggtgcattcttacggaccaccttggagcctacgacacagcctctctggatcgtagcaccaataaagcagggatcagcgatccgctgcagtacattgtctaccgcaaacacattcagccactcaatgccttcgttatgtacgatatccagcatgccgttatttttcatggaaatgaaccagccgccgttaccgttgggagaggtggacagcttgcccttctcctccagataaatcttgccttcataatcggttgccgcagccatctcctgtttgaagaagtggacataatccgcgttgtatccgaagaaatcatgctcttttaaaaatgcgatcgttgcgtcattgttcttatcgctggtcatcacaaacaggtggatccagctgtctgcctgatgcacgacttccatcaggttattgatcaggcattcaaagatgtacagttcacgggtcagacccacattgtacatgcccttgggattatcggaacccagtctggtacccatgcctccggcaagaagaacagctgctaccttgccctgtttaattgcgtcaatacccgtccttgtaaagctgtcacgatttgcctcgatctcgtctaactgcattgcagccaacggtgtgatcactcctttttttgccagatcttctttatgcttgcaagcttccagaatgctcatatccgtagtttcgatctgattcagaatcccctgcttctcttcctcgttgagctccccgtaatacttcagaacatgttcctgaccatactttgcaagcttctccttagcctgttccagtgtcatactcatattcctacctccgttttattttctccgactattccaccccgggtaacagtcaattttctctattatacttgatatttcctgtgattgcaaaccttactcccgggatcgttcccgcccgtaagtcctgccgttaagattctgtaaacgtgttgcaaagattttgtaaatatcccgacaaaatggtgttaagggtcgctcaaaactattcacccgggggtatctgtttactataatacggtatgtgaagtttttaaggacttcatcgaatgttgtacagaatgacagaaagttgaggaattcattatgaatattggaattttaatcattgcaatcgtaggcggtgttaccggacttttatccacagcatatctggcagtcagtttccctgctgtgctcctgtggaagctctatcgcagagtagttcacagaattcctgtcacccaatagtaatcagtcagctacaaacactttccctctaaaaaggacccggaagcttttgcccgggtcccttgtcgtattcactattctgttttactcctgcaccggttcccaattttcatccaccaaggtcgcagttactgtaattccctccggtgcattttctgcgcagatcacaagatagaacattccttcttccgaatccacggcatattctgacggatcctccggcaaaaagacagaaaatccctccgggtactgctgcatctccagaaatcccttttccagcagtgcagttttgtaggcttcttttactgcatcccggtccccacaggagtacacctttattgaagtaaaagttccatcttcgctgtctgtctccgtacaatctgaaatcacagcatcgggatagataatatcctgctgcaccgctttcagatattccgttgacatccggacactctgtaagatctcaaaagtatcttttccatcctcggaatgcgccatgagtaccagactcaaaagcaaaatgagcagataacttcccagtgctcccgccagtattttcgcaaaaggattctctggctgccccagatttgtataagaagtgatgatccagccaaaatttcggtagtccactgcggtattacagtattcgcagactccgccgcccaaaatgtccacactgcctccgcagttggggcatttgtattcccggagtgccctgctgtgctgcgttaccacatcctgtctgccttccagttccagccggatctcctcataacggttccagatcttctttcctgtatccagtgtcaatcgggtcctcacttccacgctgattctgtaagactctccccgtgtctccgcctccagaaaacgcacaccgcaaatgcaacagtccaccacattctgataccgtaccaccaccgtatccagatcacaggatgcgaaaaagcgtacctgctctgccgtatccgccagatggatcattcgcagctggtattccagattctgaagaaaattacccgtggagaattccgggattgcggcctttactttcgattcgtcttgaattctcggctttctgcgagtctccatcacgatcaacattacaataaatataatgagcatgtaaaacaacgaccggaaaaataccggagccagaccaattcccagcatcatggctgcggctgcctttaccgcattgtatccgttcctgcccaacgccaacagcaaaaacataatgccgcccgcacagatggccagtaccgcaagagaaatcgctgtaattcccaccacagcaccggctttcataaagttggaaatacttttctgtcttgcgtcctcctccagagaaaatccggatacctttgtttcaaaatcactgacgagaaactttgccccgcaggcatcgcagccatcgatatagctggtcagttttccctcatgtccacagttagggcagataaccatatctccctgcacatccgctttcaaaaagctcgccactgcaatctccggtgtctttaggaacgcaatcttttttccattgcggtaataagtccgtctcatttttaccggctgggtacggcggcagctataatcataaccatccttccagggaccatcatagtccgccagtcgtgccggctcctgcatctccatatccaccgtcagttcccgctgctgcagtctttttctgctcaggcgcagactttgccagaaaggctgggttgtctgctccatcaggttctgttccgcttccccgttgccctgatagaatgcttttaattccccgtagaagtcttctgtccgtctctcgatctctttccgtgcatcattcagaaactctgttgccatttcgtttttctctcctcataagtgattctgccgcgcaaaggtcctgatatcttttgtatcttatgtcccaactgctttgtcccatatagctatgtatccattatataagttggtacccggtatttcaagacactttcccgtatagaatgatttgtctcatcgaatatctagtgctggtgcagatacttctctctggtagccagtccgccgcggatatgacgctcggatttattcacatccaataccttccgcgcctgctttgccaacgccggattcacctgggccagccgctccgtcacgtccttatgtaccgtgcttttgctgatgccgaaggccttggcagtctgccgcaccgtggcgttgtggtcgatgatatagcctgctatccctatagctcgttcttcaatatagtctttcaaaggaaaacccctcag

SEQ ID NO: 236 - DNA, 19401 bp, unidentified
  source 1..19401: mol_type = unassigned DNA
atgccgaatatgtcacctaaaaaagctcctatgcctacacaggagcctaatgtaagaaataaaaactttcttgaggtagctacaggctacacagaggaagttgcaatcgaagaggcacagcgttgccttaattgtaagcataagccttgcgtatcgggctgtccggtacatatttcaattcctgattttattaaggaagttgcacagggcaacttttcgggtgcttatgatgtaatttcaaaatcaagctcacttcctgcagtttgcggccgtgtttgcccacaggaaacacagtgtgagtcaaaatgcgtaagaggtattaagaccgaacctgtaggtatcggcagacttgagagatttgttgccgactggcacaatgctcagacagatgttgttgtaaataagccggagccaaacggtcataaggtagctgtagtaggttcaggcccttcaggtcttacttgcgcaggcgatcttgcaaaaatgggttacgatgtaactgtttttgaggcactccaccttgcaggcggcgttcttgtttacggtattcccgaattcagacttccaaagtcaatcgttcagaaagaagttgatacacttaaggctctcggcgttaaggttgaaacaaatatggttatcggcagagttatctctattgacgagcttatggacgatatgggctttgaggcagtatttatcggttcaggtgcaggtcttccgagatttatgaagattccgggcgagaacctttgcggcgtttattccgcaaatgagttcctcacaagaacaaaccttatgaagtcttataaagaggattccgctacacctattatgcacgctaaaaaggttgctatcgtaggcggcggtaatgttgctatggacgctgcccgttgtgcaaagcgtcttggtgcagatgaagtttacattgtttacagaagaagtgaagaggaacttcctgcaagaagagaagaagttgagcacgctaaggaagagggcattatctttaagctccttaacaaccctgttgaaattctcggtgatgaaaacgagtttgtaacaggtatgaagtgcgttgatatggaactcggtgagcctgacgaaagcggcagaagaagacctgttgttaagccggacagcgagtttgtacttgatgttgacgcagtagttatttctatcggtacatcaccaaacccacttatcaaggctactacaaagggccttgaaacacagaagtggggcggcattatcactgatgagcacggtcttacatctcgtgagggcgtatatgcaggcggtgacgctgtaacaggtgctgctacagtaattcttgcaatgggtgcaggcaaaacagccgcagcagctattgacgagtacattaagagcaaagagtaattcttatataaaaaacatttacccgattatagcaaaagctatagtcgggtattttttgtgtgtttcatctctaagattaataattaaggctctttatcaaaagttggtgtaattatggtttggtaaaataattaaaaaatttaggtcaagcctttttaaaggcttgcgggtttgggcagagcccataaaaagtttcccttacatcaaattatcgggcgcaaacagcaaagctgttttcgtgctaagacaatgttttgaaaacaggcgatagccttaaaaaggggaatagataaaataatgtgccgtcattgcgtagcaatgacggcacaattatagggagtatcttttctctgttgctgtcgcattggctttcgccattgtgttcaagccgccaaacggcaagccatttggctatcaaaatttgcgatagcataaagtatttgtgggcgttgcccacacccacaacctttgaaaaggttgaccaaactttttacttcgggacggagagtttagtttttgctttactttgttgcccgactgaaacttagtcataatttataattttgtcattttcttaaaaagttagtctgattttccccaccccatcactgcaaaacagcaaacaaaaacccgattatagcctttgctacaatcgggtatcttaatacttttctaaatcagcttaccgcttttttataaagctttttataaaccaagaacaatgccaccgatactattaaaaagaacagtgagcacgcaagcacgcacattataatgttatttgcacacgatacaaacagcatatatgttgctcttgacgctatgttaaaggtttcaatcttctttgacagcaaaattactatcggcaataccaatgttgtcaaaaatgtggcggctgttgcataataaatatggcgcactgccctatgtttccattttgttgataatacaaatattacgcaaatcagcgccgaaagcactgcacatattgcaattacaaacggcaacagctttttaacattctgaaatctgcccgctaatgttccgaaaaacggcaattccagcgactgcttataaattttagccgcctcttttataaggtattccctgttttcgctcgaaacactgtcggcgcttatgcccttttgctctatataatcgtcaagcgctgtattaaacgcctgtttaaaagctgttttatcaatcacactgccctcgcccgaataataatcctgtatatacttttcagtatcatcgtgaatcattatttcatcaagcaagccgttgaaaaagtcctcttcaagtccgcttgcataaccgaggtcggtcaaactgcttgttatctcgtcctttttctcagttatgtaattgcaggtgttcatattgtcaagcataaagctgtcattaaacagtgtaaactgcaacgaaacagcatacgcaagcactgttaaaagcaccgcaagcacaagtgaaagcaatatattaactatctttttaactgttgacatattcagccctcctttgatgttttatcaatctgaggacctgaaacatattttgcatacacaaaaaatctctgatctgtaagaccaagctcgtcaaacggataacaggtatacattatgagattttcttcatttgcgtttaaatcatacgcagaggtgtctgtcgctttctttacagccgtatcggtaatttcgtatgtgtaattgccgtagcttgtcttaatggtaacagtctgccctgccttagcgtttttaagtccgttaaaatatgtattgttgtgtccggcaacaagaattgtttttccgtaacccggtataaaactgccgttatatatgcctacgccgtttcgcagcgcaacatttccgtcaccgaagaaaaggttattgtcaatagagcaatcctctatgataagttcgccgaactgctcacctgtctttgggtattggatttcacttataggcagttttttatttgaatcggtttcattttcgttttctgacaccggcacaaatatattgttatattctgtggaataatctcttgcagagtccgaaaacataagacctgctgccgaaattaaagaagatgacggcataagtacaaggtagcctaaaagataaattaccacaaaaaatatagagggaagaattaaaaaacccttcccaccaatttttttatgcctgtgtctggtatttttcatatcagacatttacaatcaagctctttctctttttttaacagaaagaacaactgtagcacctgctgcaagagcaactgctgcgcctgcaactgtagcaacagcgaatgtgtttacattagcgcctgttgtagcaatagcattgcttgtagttgttgtgttacccttactgtcagttgtaacctttgtgctaacaattgcgttgccgttcttgtcagtagcagaaacagtcttagttgccttgtcgtaagaaactgtaacaccgattacattagcagccttctgaccataagtgaagagctcctgcttctgatctttgttaagatccttaacagttgaagcaccctgtgacttaaggtaatctacagcatcattgatgtccgcaataatctccttagattctgcgtctgtcatgtcaatagtgttgaagtagttttcagcctggttgagcatctcatcagcattagtaacaaaaccaccgttgtagcttgtgtttacttctgaaagcttgtcaagtacagcctgttctgcgctgttgataccagcggcaaaagccggcacgctagccatagcaataactgttgctgatgcaaggattgcagataactttttcattatttataccgcctctctaaagtatttagcaaatcgttgaacaaaattatatatataaaattttgcccaattatctactttgaactatattttaacacaataattcttttttgtaaatactttacattaaattactgtcgaatcttagtttttttatttttttgcagtaaacaaagttgtttatcttgcttgtttttggtattattcacgaattttcttgtctgacatacattcaacaagaacagctttttgcgcatgaagtctgttttctgcctcttcaaagatttcattggcatgctcttcaaatacatcggcagtgatttcttcgccacggtgagcaggtaagcagtgaagaaccatacactccggatttgtaacagacataagctctttgtttacctgatagccggcaaatgcctgttcacggattttcttttcttcttcctgtcccatagaagcccaaacatctgtgtaaaccacatcggcattcttcgctgcctccatcgggtcttcaacaatttcaaatttgccgttgccgtactttttaccgaattcaataatgtgttcaggcggcatatatccctttgggcaagctgcagagaaagacatacctgtgctgagtgcgccgacaatgagagagttcatcatattgttgccgtcaccgataaagcacattttaagtccctcaagtttacccttgaactcacggatagtcataaggtcagcgagtacctgacaaggatggcagtagtctgtaagaccgttgataatcggaatagaaccgtgctctgcaagagcctcaacttcttcctgcttaaatgttctgatcataataccgtcaagaaaacgagagagaactcttgctgtatcctgaacaggctcgcctctgccgatctgtaaatcattggatgaaaggaagagcggataaccgccgagctgtgtcatacctacttcaaaagaaactcttgttcttgtgcttgacttctcaaaaatcataccaagtgttttgccggcaagaattttgtgctcaatgccgtgtttctgctcatatttaagctggtcagcaaggttaagtgtattgatgatttcatctgttgaccaatcttcaagtttaagtaaatgcttcattttaattctcctttaatgttttttcaagaatatcaagcgcaaggtcgatttctttttttgtaatgttaagcggcggcaacattcttaaaagtgactttgcggtaatgataataagtccgttttcaacgcattttgccgcaatgtcgtgtgcgtcgccgtctttaagctcaatgccaatcataagtcccattctgcgaacagcctttacgccgtccattttgaggactttttcttctatatatttaccctttgactcaacctcggagagaaactccggctttgaaattttatcaagcacatagtttgcacctgcgcaaacaacagggtttgcaccgaatgttgtgccgtgagtcgaaggtgacattacatcttttagtttttcgccgcaaacgcataagccgatcggaagtccgccgccaatgccctttgcaactgtgaaaatgtcaggttttacttcaaaattctggaaagcgaacagcttgcctgttctgcctgcacctgtctgtacctcgtcaacaataacaagaatatccttttcgttacagaacttaacaaggctctgaacatagtctttatcaaggatatttacaccgccctcgccctgaataagctcaagcataactgcgcaggttttgtctgttacggcattttcaagagcgttcatatcgttggcgtcaacatatgcgaatccctgtgtaaacgggaaaaagtagttgtggaacacatcttgtcctgtagccgaaagtgtggttactgttctgccgtggaaagaattgttgagtgtaataatctcattgcggtcagcaccgtacttatcaaagctgtattttctcgcaactttaatggcacattcattagcctccgcaccgctgtttccgaagcatacctttgaaaagcctgtaagtgtacagagtttttcggcaagattacttgcctgcgggcaataaaagtagtttgacatatgctgaattgtgtttgcttgttcgcttacggcttttacccagccgtcctcgcaccagccgaggctgtttacaccgatacccgatgcgacatcaacatattttttaccgtcctcgtcataagcagttgcacccttgccgctttttaaagctacattgtatctgccgtaggtgtgcattatgtactgcgaatctttttcctttgtattcatcataccaccccttaagtgttatctacatcttcgttattaaaggaaaaaacaaatatatcctcacgctttttaaatccgaaatcctgccagaagctctgacccgtggtgttgttctgatagcagaagatatgagttttatcaattccttggtctttaatcgctttgatagcgctttttgcaagttcgtgaccgattcggtttcttcggtaatcgggcagaaccgccatatggtgaataaatcctcgtctgccgtcatgacttgcaagtacagtacctacaattttaccgtcaattacggcaaccttgctcataccctcgcttcttgtcagataagattctatttttgctttttcgtcagccttggacaaggctctttttgaggtaatctgccagagggcaaatacttcttcgtagtcatcgattgtcatttctctgattatcatatctgtttttccttatcaactgcccgtaggcaaaatatttgcaaatctattaatagaacattgtgccgataccctcatcactgaacatttcaatgaggatagagtgttcaattctgccgtcaataatgtgtgctctgcttacgccgcttcttacagcctcaacacagcagtcaattttcggaatcataccgccctttatgatgccctcacgcttgagcataggaacttcgctgacatttacaacagatatgagcgagtcttcgtcgtttacatcttttaaaagacctctgatgtctgtcataagaatgagctttttggcaccgatttttgcggcgatgtgagctgcggcaatgtctgcgtttacattataaacatttccgtcataaccgcttgcaacggtagccacaatcggaatataaccgttgttgataacattctgcaaaggttccggatttacttctttaatctcgcctacatagccgaggtctgcacttgtaacaagtttttccgccataagcatattgccgtcaagaccgcaaagaccgattgcctttccgccgtgtttttccataagctgaacaaggtttttgtttaccttgcctgcaagtaccatctgcacaatgtcaatagtttcttcgtcggtaacacgcataccgttttcgaacttgctttctttgccgactgccttaagcattgcatttatttcagggccaccgccgtgaacaagcacaacattaacgcctacaaggcgcataagtgcaatatcgctcataacggcgcttttgagtttatcgtttatcattgcgttgccgccgtattttacaacaattgtttcaccgctgaatttacgaatatacggcatagcttgtattaagacttttgctcttttattaatatccatttttcatttcccctgatataaatttaatgcccgtttttcagataaattatggtttggcaaattactttgccaattaggttctgtagtcgccgttgatttttacataatcataggtgaggtcacagccgtaagcctcggcatagccaaaaccgtcatttaatgatacaagaatgttgatttccttttcaagcagaatttcctttgctttttcttccgaaaactcaacccctgcgccgtccttgcatacaagaatattgcctttggcggattcaaaagaaacatctacctttttaacatcaacatcagcgccgctgtaaccgattgcacacaatactctgccccagtttgcatctgagccgaacattgcggcttttacaaggcttgaaccgataatgctctttgcaactttaacagcgttgggcttgctcttagcaccctcaaccttgcaaacaagaagttttgttgcgccttcgccgtcacccgcaagtttctttgcaagtgctctgaaagctgcggtaagtccgcttaagaatgtatagtaatcttcgtttttgttggtaatcattctgttgcctgccttgcccgatgccataatagcaagggtatcgtttgtagatgtatcgccgtcaacgcttaccatattgtaactgtcctcaacagcctcacgcagagcctcacgcagcatatccgaagaaacagccgcatctgttgtaacaaaagagagcatagtacccatattaatgtgaatcataccgctgccctttgcaatgccgccgattgtaacggtcttgccgtcaagctccatctgcatagccatttctttttttaccgtatctgttgtcataatagcctcggctgcgtctgtgccgccctctttggtgaggtgacctttcatataaacgcaagcctttaaaataggctgaataggcagaggctgaccgataacacctgttgatgcaacgataacatcttccgcttttacaccgagagtttcgcctgcgataaggcacatatgatttgcaatgtcatatccgtttgcgttgcaggtgtttgcattgcctgaatttacgataacagcctgtgcaatgccgttttcgaggtgctttttggttacctcgatagccgaacttttaacaaggtttttagtataaacagccgccgcagtacagggagtgtcgcaataaatcagcgcaaggtcacgctttgttttatttgacggcttgattgacgcacaaataccggctgctgtaaagcccataggagaagtaactgtgccttcgataaatctgtagtttcccataataaagcctccgttttatagttttgcttaattattaattaaaaagcaggcggaacgattataaggcctgtcttttcgtcaagtccgaaaataatgttcatattctgaattgcctgacctgctgcacccttaaccatattgtcaatagctgcgcaagccacaagcttatttgctcttttatcgtgatgaattgaaacatcacagaagtttgaatagcgtacattgtgaatgtcggcgcatttgccgtcgtcaagaagtcttacaaaaaactcgtctttgtaaaaatcctcatacgcttttctgatttgctcaaaagtaacgccctcgttaatatccgcataaacagtggcaagaatacctctgtttacaggtaaaaggtgcggcacaaatgtgattgttacatcttcgcccgaaagttttgaaagtgtctgctcaatttcgggtgtgtggcggtggcaggctaccttataagcgtggaatccctcgttaagttcagggaagtgattgccttgtgtaggttttctgcctgcacctgttacgccgcttttgcagtcacagatgataccctttgtgcttacaagtccgtttgcgattgccggagcaatggcaagtggggaacaggtagtgtagcagcccgggtttgcaattaattttttacctttaattttatctctgaaaaattcaggaagtccgtaaacagactgttcgtgtaactttttgtcaagaaaagtaccgccgtaccactctgtatattcttcttcgctctcaagacggaagtctgcgccgaggtcaatgaaagccttgcctgcgcttatgcacttttcggcaagttcctgtgaaagaccgtggggaagtgcggcgaagataacatcgcttttctcaacaacagcgtcttggtcttcacagaccatatcgtttaaaaatgtatatgacggataaacatcgcttaacttctgaccttcaaaagaaaccgagctgatagctgaaatttcagcctcggggtgacttgtcagaagtcttacaagctcggcgccggcatagcctgttgcgcctacaatacctgcttttatcattttaatcaatcctttatgaatatatatctaacaattcttatactgatactaatagtctatatctaaatcaatccgccaaacattaactaaaacaaacaaataaaagtttgaagtttccaaaggtcactgacctttggtcgtctaaggaaaaaggattcttaagggaaaagggactcgaaatcccttttctcttgagcgtgctttcttttggagcttttcttttcacgcaaaagaaaagcggaattggcaggaggtttaatttaagacaaaaattgttttcaacaactgcatttataaaatcaattataaattcttagcaatttcagccacacgctttgcctgtgcctttacattttcagaggcagggccgccgaatgcttttctttcgtttgtacaagtttcaagtgaaattgctctgtaaacatcatcgttaaatacatcacaaacctttttgtactcctcaatcgggaggttttcaaggtctgtaccaagctcaatgcatcttgcaacgagttcgcctgttgccttgtatgcatctctgaacggtactccgttctttgtgagccagtctgcgcagtcggttgcgttaataaatccgcctgctgccgctttacgcatattctgcggaataactttcattgtgtcgagcattggagtaaaggctgtaaggcacattttaactgtatcaacagcatcaaaaattgcctctttgtcctcctgcatatctttattgtatgcaagggcaatgcctttcataattgtaagtaaggtcatattgtcgccgaaaactctgccgctcttgccacgtacgagttctgcgatgtcaggattctttttctgcggcataattgaagaacctgttgaaaaagcgtcgtcaagctcaatgaatttaaattcccagctgcaccacataatgatttcttctgaaaatcttgagaggtgcaccataataatagaaagaacagacgcgaactcaatgcagtaatctctgtcggatacaccgtcaagcgagttgtttgtaattctttcaaaaccgagcagctcggctgtaattgttctgtcgatagggtatgttgtgcctgctaaagcacaagagccgagcggcatttcgtccattctcttaaggcagtcctcaagtcttgacacatctcttaaaagcatttcgccgtaagctaaaaggtggtgaccgaaagtaatcggctgtgctctctgtaaatgagtgtagccgggcataacggtttcgctgtacttttccgccttgtcggcaataaccttgataaggtcaacaacgagctttttaacatttacaacttcctttttaaggtaaagtttaatgtcaacggctacctggtcgttacggcttcttgatgtgtgaagtcgcttgccgttgtcgccgattctttttgtaagctcgccctcaataaaggtgtgaatatcctctgcttccatatcaatatggagagtgccgttttctatgtctgcaaggattcccttaagaccctgaactatgtcgtcagcctcttcctgtttgataatgccgcatctgccgagcattgttgcgtgggcaatactgccctcgatatcctctttatacatacggctgtcaaatgagattgagctgttaaaatcgttagtggtttttgaaagttcctttttaaatctgcctttccaaagctgcatataatcacctcgggttaatgaatgattgttaatttgtgtattatttataattgatattgctgtttaaaaatatccgtataaacaactgtcagggacagagaatttccctgtccccgaaccggaataattattttaattcatacaaaagtctttgagtaaaaattacttaataagaccctttttagcacgaaccttgattggaagaccgaagaggttgatgaaacctgcactgtcattctgatcgtaaacctgatcctcgtcaaaggttgcgatttcttcatcatagagtgaatatgggcttgtaacgcctgcgtcaatgatgttgcccttgtaaagctttaacttaacatcacctgttacatactcctgtgtgctgtcaacgaatgccgagagagcctcacggagaggtgtgtaccatttgccgtcataaacgagttctgcaaatgtgtttgaaaggttcttcttgtagtgaagtgtatccttgtcaaggcagatttcctcaagcttgttgtgagctgcatagaggattgtgccgcccggtgtttcataaaccccacgagccttcatacctacaagacggttttcaacgatatctgtgatacctacgccgtttctgccgccgattttgttaagctctttaataagctcaacagagtcgatttcttcgccgttaagttttgtaggaacgcccttttcaaatgaaattgtaacatactctgccttgtcgggagcctgctcaggagaaacgccgagttcaaggaaaccttccttgttgtacataggctcatttgcaggatcttcaaggtcaagaccttcgtggcttaagtgccagaggtttttatccttagaatagtttgtttcacggttaatcttgagcggaatgttgtgcttttcagcgtactcgatttcgtcctcacggctcttgaattcccaagttctccaaggagcgataatcttcatatccggagcataagccttgatagcaagttcaaaacgaacctggtcgttacccttacctgtgcagccgtgacagatagcgtcagcgccctcggctttagcgatttctacaagtcttttagcaatgataggacgggcaaatgatgtaccgaggaggtatttgccctcgtaaacagcgcctgctttaactgtaggaatgatgtactcgtcaacaaactcctttttaaggtcttcaatataaagtttagatgcgcctgtcttaatagccttttcctcaagaccgtcaagctctgtgccctgtcctacatcacccgaaacagcgataacctcgcagttgtcatagttttcttttaaccaaggaataataatagaagtatcaagtccgcctgaataagcgagaacaacttttttaattttattgtcagccattttaatttcctccatagaaatgatttatattactcttacattatacgctttctgacggaaaaatcaagtgttttttgaataattattcaatacaccgtaaaattgtgataaatgcacttaattctaaataaaacccaaggtttttacagcaaaatcaaccttgatttcaacataaatcttcaatatatgtataaaaatgcatatatgcagaaataatgaatattcattttttgcgcttgattttgcataaaatgtatattttaatgaatattcaatgcagatattcattttggcttgcggcaaagcaaaaaataaacagccgattggatatttaatcaaagtaaaacaggtcttaaaattttttgtccaatgaaatgcataaaatcagagcaagttttattgtcaactttattatacatatgctaagtaaacttgttaatagattttttgatttatttatatcactaaatacaagcaagtaaaaaagcccgactgtttttacatagtcgggcaagtattataaaatatcaagatttcttttccaaattaaaattctttttacagactcgtcgagtctgtctgctgtaatttctccgctttgtacggcattaagcaatgcggtatattcgctttcaatatcgccgcaacagaggaagtcattgcctgctttaaaagcgacaaccgagagtggttcgtaaatgtcaagggcgtcaacggcaaacatatcgaggtcatcggtcataacaactccgtcaaatttaagcgtatctcttataacctcatgcacaggctcagagagcgaggcgggattttcgctgtcaatcgaatttactgttacgtgcgacacaagaatactgtctgcgcctgcggctatacctgcctgaaacggcagaaaatcattgttctgcaagtccgagaaagttctgctgtcagtagcgctggaataatgtgtgtcgccgttatctccgtatccggggaagtgctttaatacagtgccgagttttttctctttgcttgcttttacaaccgtatccacaaatctgcttgtgcttgcggcgtcacttgaaaacgacctgtaatacataaatgaatcggggttggaagtgatgtcgcagacaggcgccatatttacatttacgccgagcgaaagcagaaattccgctttatcgtatgcgtcgtcttcaatagcgctccaaccgccgttgttaaatgtatcgctcggtgaaaggtatgcgctgtcccttaggtttggattatcgctcgctcttacaaccgttccgccctcttcgtctgtgccgataataagcggaattttggcattggactgcatagcttttatatcggcattcacttcttcttttgtcttgccgtcaaaatctacgccgaacagcaaaacgccgccgatgtggtattcgtttattgcgtcgctcatatcattgccacgacaatttacataaaacagctgtccgactttttcttcaaccgtcatttttgaaatcatatcgtcaatgtctgaatatgtgtcgggaggagcggtggtttctgtcactgctgcctgactgttttgctcgtcatttgtcgactgcgcttttgaagcttcgctcgtgttctgacagcctgcaagcactgttgccaacattgctgcggtgagaagtgatgtaattgttcttttgattttcattttatccctcatttaaaaatttcgacagtcgtattttctacaaatctgtccttaaaagttttcatcttttgcatatgcggtgtgttaagatgttctttttgcaatttttcggactgccatttttcaataagcagtacctcattgctttttccgaatgacggcacaaagtaatcgtattttatacagccgttttcattttgtacaatctgcggaaagccctcgtttttaagagctgtcaaaaagtcattaaccataccgtttttaacggaatattttacgataagcgtgatttctttcattttatctccttgtcggcctttttaagtgttttgtaagtttcaaaataaaagaatttgtctgtatatgtacctattataccaacgactttgcccattgtaaaggctgcaagtacagttcctatgctaagtccgtcaaggtagccgaggcagaagaaagtaagcgcagcggttataaaaatcttccgatataacaaattattatgcacactgacagcctgctgtcagtgtgcataaaacaaaatttgaaaaaacaggcggtagccgttgtaaccgaaaatgcccaaaatataggcaacgcattgcgttgcctatgaaggttaagtatgttttcttttattgctctcgcattgacttccgcccagtcgttcaagccgccaaacagcaagctgtttggctatcgttagattgcataaacggaaagtatttgtgggctttgcccacacccacaacctttgaaaaggttgaccaaacttttataatactttgcaaaattattttgttaaactttaattatcgttttgctattgcttgctgtaaggtggtaacatcccttacatcacggtgaccgtcaaagtttgtatctgtgtaataatactggagcgaatcaagctcaaccgatccggaaatgtactgttgcagaaaagtaacatcgtttacatctactgtgccttgaaggtcaatattgccgaatctcaatatgtatatattcgaaccggaagtaccgcctccgccgccgactacataagctttgcggtaagaaaatgtagtgcagtaatctgttggttcattaattttagtagacagataaatttccacgcagccgtccttatccggaactacgcccgttacagcgccgccgctctgaaagtacaaggcggagtcataataaccgccgccgtctgctttttcgtatttgaacttataatcatgactgccgatacttgagtattccattgtatgcgagccgtccttgttaaaataattcggagctaactcgtgaagatttatttttgctttaacataccttccgcctttattgtcaaatgtgtaacttgcgtatgtgtttcccgaaccgcttacaaaatagcgggcatatttttcggaagacggcataaagagtgttttgtcaccgcctatacaatcggcaaatttcattgagtagtttttttgagtatcgcctcccgtaaataatactccgtttgtataatcggacggaatattgtacgcagaaaccaaaagcgtgttgttgccgatgttttttgccgagttgtaaatcttaacacccttatgcggcttaacggtttttgcgtttgcggtcactgctgcacctgcagtcagcaccgcacaaagaattaaacatacaaatttttccattttatactcctttataattatttggtaatagcttgttgtaagtctgtaacatctttaacatttgttttactgtcacggtttatgtcggaataaaacatctgaagtttatcaaattccgcatcgcccgcaaggtatctctgcaaaagggttacatcgtttacatttgtactgcctttaaggtcaatattgccaaaacaaagcatcggcacatacatacttattattccgctgtaattaggcaggtaggttgaaaatgcggttttcacaccgggttttgcttttatataaatttccacacagccgttctcgtcgggtgcaacaccgtttaccgcaccgccgctaaagaaagtgagattggatccattttccctaagagtgtaggttgctccgtttccgtctgtatcggtatatgaaccgtcactgttaaaatagcttgaaacatcgcttaattttacctttagttttgcatattcgccgcctgtattcgcaaaggaatagcctgcataagtatttccggtgctaccgccgtttgccgaaacaaagcgagtatagctttcgcttgacggcatggaaataacggtatttttacctatacaatccttgtattgtacagcatatggttttcctgtgtttttgccgtaaaaacacactccaccaagcgtatttttgctaagattataagtaaacacatttaaggtgttgttttcaagttttacccctgaatcaagcacctgaacgctcttattctcccgaacaactgccgcattggcagaaactattgagcatgttgccataacagctgcaagtgctgtacttaaaagttttttcattgatttcctcctcgctttaaaactaaattaaaattaatatccatagtattcggcaacggctgtctgcaaagcggtaacatcctgaacatttattttgccgtcacgattaatgtcggcatggtacatttgcagagaatcaaactctgcattgcccgaaaggtactgctggagcaatgacgcatcgtttacatttacgctgtaatctaaatttatattgccaaaagtaagcttatatatctctctgccgtttgttccgccgccaccgccgcttgtcagccccacatcaaggccgtattctgtaaagtaattcacactatggtttacctttgtactcacataaaattccacatatccgttgctgtcgggaactgcaccggtaaaaactccgccgctctggaaaaacaaaacagattcatagtagccgtcctttaccgtttgacgagtaaaattatatgtatgtccgtcttgggtgtgtgtgccgttacttttaaattcatttggatttatatccgacagcttggctcttaccttaacatattctccgcctgcctgtcttaaatccaaattagtagttccgcccatactgcttgaaagacaagtccaaatattatatttttcgttagacggcatagttattgttttgggtgccgataaataattcttaaatatatatttgtatctttttccgcttttttgaccgtcaagtacaaatccgccgtctgagcctgtattcttcatattgtatgtgtaaatacttatagtgttgtttttagttgttatttttgaactcaaaatttgataatccttattttgttttaccgctgcgttggcagataccgctccacctgccgccattaaagcaacaagtgcgatactgattaattttttcattatttatcccctcaatataaaatttttgtaaaataataaatattacatacagtcaagtaatattatacaatattttaaaagataaagctataacgcaaaaagccgaatttttaattcgcttatagaaaagttactgcactttgcacatacaactctgttttaacttgttatcacaaagaatttatgctattattctaataatgaaaggcggtaataatatgttgaatttctgctgtcctgtctgcaaagaagaattaaaacttgacggtcgaacctacagatgtataaataaccattgttttgactgtgcaaagcagggttatgtcaatcttttgcagagcaacaaatccaaaagcaagcgtcacggtgacgataaacttatgatagaggcaaggaccgagtttttaaatacagattcgtacaagccgctgtgtgaccttatgtgcgaacttttgcaaaaatatattccacaaaatgcctgtgtgcttgatgccggctgcggcgactgctattatacaggaaaaattgaaaaagctcttgcagacaaaaacgcaagtatagcgggtattgatatttcaaaatttgctcttattgcagcggcaaaacgcagtaaaaatattcgtttggctgtagcaagcgtatttgctttgccgacagcggatttttcctgcgatgcggtgcttaatgtattttcaccttttgcgccggaagagtacaaccgagttttaaaaagggacggagtgcttttgcgtgtaattccgcttgaaaatcaccttttttctctcaaaaaggcggtatatgacaatccgttaaaaaatccgaaagaaaacaccgatattgacgggtttattcttgccgaaagcaaagaacttaaatacagcataacgcttgatgataacagagaaattgaaagcctgttcaaaatgactccgtactactacaaaacatctcgtaccgaccaacaaaagctggagaaattaaactcacttacgaccgaaatcgaattttgcgtgcttgtctataaaaagctgtaa

SEQ ID NO: 237 - DNA, 5398 bp, unidentified
  source 1..5398: mol_type = unassigned DNA
atggagatcagagaaattacgactcccgatgaaaagcggcgcattacgcgctttattttagaatcgctgcccgactggtttggcattccagaggcgcgcgaggaatacatcgaaaagagtgttaagcagccgttttttgccgcgttcgacggcgagaacgccgtcggcttcctttaccttgccgaaacggggagggatacagcggaactctatgtcatgggcgtgctgaaagaataccaccgccgcggcgtcggcaagatgctctttgccgcagcgaagcagcgggcgaaggagcttggctactcgtttttgcaggtcaagaccgtgcagatggggaagtaccctgagtacgacgcgacgaaccgcttctatctcgccctcggttttggtgagtttgaggtattcccgacgctctgggacgagtggaacccgtgtcaaatctacgtgatgagcctgaaataagaaaatgttggaactttttcccgccgttttgcgtctataaaagcagaaaaacaggggagggaagcatatgaccgtccgcgaaccgaaaaaacgctctaatttgcggctgaagctcggcggcgcgtattttagcgcgcagcgaaaactcagatggctttcgatgcggaagcattttgcgcgcgagtgcagcggggaagacttagcatatcaggcgttttcccaccatacgccgctcatgcgaaagctcaaggacgtcgacatgcagctccagcgcaacaaggtgacgaatctccgcctcgcctgtgcgcggctcgacgggcttttgctgcgccccggtgaaacgatgagctactggtatctcatcggaaagccgacggcggggaaggggtatctgcccggcatgatcctgcgcaacggcgggtatctggccgcgacgggcggcgggctctgccagctctcaaacctcatctactggatgacgctgcacacgccgctcacggtcgtcgagcgccaccgccacggctacgacgtctttcccgacgcgaaccgcacgcagcccttcggcagcggtgcgacctgcttttacccctatcttgacctgatgatccgcaacgacacacaggacacctatcagatgcgcgtacgcgtcggcaagacagaccttgagggcgagtggcgcgtgagcgccgagccgaccgagcgctatgcggtcgtcgagcgcaaccacgagatgcgcgcgcagtactggggcggctacatccgccacaacgagctctaccggcagacgtttgatttgcagggcaacctgctcgcggaaacgctcgtcgccgtgaacgacgcggtgatgatgtactcgccgtatctcgaagaaagcaaaaaggaaggctgacaaagtcaaccttccttttatcttattcagccgtttcgtccgcatcttcgggcttatcctcttcctcaggctcctcccacggctgcatcgtggcgacacagcggttgatgttcttgccctcggcatagaatttggcctcatagtcagtcatcacgccgcgctgtccgcttccgtgcaggtcgcgcgtgacctcggaaagggtgaagccaaactgcggaatttcctcgatcgaccactcaaacagcgggtcgttgtcggtcttgaaatgaatttggccgttgtccttgagcaccttgcggtagagcttcaagaaattgccgtgcgtcagccgacgcttggcctgccgcttgggcggccacgggtcgcagaagttgacatagatgcggtcgacctcgccctgatcaaaaatctcagggagttggttggcgtcgatgtcgatgaaaaagacgttgtgcagctctgccttcgccgcacgctccatcgcgacgaccatcgcgtcgggcaccttttcgaccgcgatgagcagcacgtcgggctccgccgcggccgtctcgacggtgaagcggcccttgccgcagccgagctccacgcggatctccttcgcctcgggcatcaagtcgtgccagcggcccttgcgctcgtagggatccttgatctgatacgccccgcaccgctccatgcggggaagcaggtttttctttttgcgcattcgcatagaatgaacctcgttttcctataattcaatcctatcatatcgaaaattggtgcaagagacaagtcattttaaaaattttatacaagagttgctgcattgggagaaaagatcattaaaaatgcagcgtttcttgcaatgacaccggaaaagtgtgaaacttttttgaaaaaagtgatttttctcttgcaaatatgccttgccgcccatataatagggggcagttgaagaagacaggaggagacacatgatgtcttttgtcaaatatgaacccaagggcaacattgcctatctcatcattgaccgcgaaaaggcgctcaacgcgctcaattctcaggtgctcgccgatctcgatgccgcgctcgacgcggtggacttaagcgagatccgctgcctgatcgtccgcggcgcgggcgagaagtcctttgtcgccggcgcggacatcgcgcagatgaaggagctcagcaaggaggaggccgaggccttcggcaagcagggcaacgacgtcatgcgcaagctcgaagcgttccccatcccgacgatcgcggcggtgggcggctatgccctcggcggcggctgcgagctcgcgatgagctgcgacttccgcatctgctccgataccgccgttttcggccagcccgaaacgggtctcggcatcacgccgggctttggcggcacgcagcgccttgcgcgcctcgtcggccccggcatggccaagcagatgatctacaccgcccgcaacatcaaggcggacgaggcctaccgcatcggccttgtcaacgcggtctatccgctttctgacctctacgccgcggcggaaaagctcgccggccagatcgccggcaacgcgcccatcgcggtgcgcgcgtccaagcaggccatcaacgacggtcttcaggtcgacattgaccgcgccgtcgtgatcgaggagaaggccttcggctcctgcttccagagcgccgaccagcaggagggcatgggcgctttcctcgaaaagcgcaagcacgagccctttatcaacaagtgattccatagaattatctatttatattgtaggaggatacacacaatgaaagttgcagttttcggcgccggcaccatgggcagcggcatcgctcaggtcttcgcggccaagggccacaccgctctgatgtacgcttccagcgtcgcttccgctcagcgccacaaggataagctcgccgcttccctgcagaagcgtgtcgagaagggcaagatgaccgaagaggctaaggacgccatcctgaacaacatcctcgtcgaggagaagtctgccgcggcggacgccgacctcgttatcgagtgcgtcaaggaagagatgggcaccaagcgcgagctgctcggcgagctcgacgagatgtgcaaggagagcaccgttttcgcgaccaacacctcttctttgtccgtcaccgagatgggtctcggcctcaagcacgccgtcatcggcatgcacttcttcaaccccgtgcccagcatgaagctcgttgaggtcatccgcggcgccaacaccacgcaggagaccttcgacttcatctacaacctctccaaggagatcggcaaggagcctgtcgaggtcgctgaggctccgggcttcgtcgtcaacaagatcctgatcccgatgatcaacgaggccatcggcctggtcgagaccggcgttgcctctgtcgaggatatcgacaaggccatgatgctcggcgcgaaccaccccatgggccccctcgccctgggcgacttcatcggcctggacgtctgcctcgccatcatgaacgtcctctacagcgagaccggcgatccgaagtatcgtcccgctctgctgctcaagaagatggtccgcggcggccagctcggcaagaagtccggcaagggcttctacgattacagcaagaagtaatccgttcctaaaaggataaaaaggggaggaagtttacaaaaactgcctccccttttctcttttggaatggaaaggattcctgaaaatgacagaaaactgtcataaaaggaacggaaatgtcaaaaagactttaatgaattcggcgaaaagcacgaattccaaaaaggaatgatagttcctcttgcgaaaatgaaacgcacaggatataatgaaagtcacggaactgatttgtgaaaaattagacaatccaattatttttatagtgaaggagcaaaagactatggatttccatctgtccaaagaacatctgctggtccgcaaaatgtatcgcgaatttgcagaaaatgaagtcaagcctttagctgaggaactcgatgaggaagagcgcttccccatggagaccgtcgaaaagatggccaagctcggcatgatgggtatttacttcccgaagcagtacggcggcgccggcggcgatgttctcagttatgccatgtgcgtggaggagctcgctaaggtttgcggcaccaccgctgttatcgtttccgcccatacctccctctgctgcgctcccattttcgagaacggcaccgaggagcagaagatgaagtatctgcctgaccttctgtccggccgcaagatcggcgcgttcggtctgaccgagcccggcgccggtaccgacgcctccggccagcagaccaccgctgtcaagaacgagaacggcgactacgtcctcaacggcagcaagtgcttcatcaccaacggtaacgttgcctccactttcgtcgtgttcgccatgaccgacaagagcaagggcaaccacggcatcaccgccttcatcgttgagaaggacttccccggcttctccaccggtaagcacgagaagaagatgggtatccgaggcagctctacctgcgacctcgtcttcgaagactgcgtcgttcccaaggagaacctgctcggcaaggaaggcgaaggcttcaagatcgctatgaagaccctcgacggcggccgtatcggtatcgcctcccaggctctcggccttgccgagggcgccatcaacgaggctgtcaagtacaccaaggagcgcgtccagtttggccgccgcctgagccagttccagaacacccagttccagctggccgacatgcacacccgcacccaggctgcccagtacctcgtgtacgcggctgccatgaagaagcagaatcacgaggattactccatggacgctgccatggccaagctcttcgcggccgagaccgcttccgacgtcacccgccgcgctgttcagctcttcggcggctatggctacacccgtgagtatcccgttgagcgcatgatgcgcgatgccaagatcaccgagatctacgagggcacttccgaagtccagcgtatggtcgttgccaagtatcttggtgtgaactaa

SEQ ID NO: 238 - DNA, 7851 bp, unidentified
  source 1..7851: mol_type = unassigned DNA
aaccaggaggttgccaaatatcctaattattcagtgcattacgctgttaaagccaatgccaacccgaaagtacttaccattatccgtgagagcggaatgggagccgattgtgtgagcggcggagaaatccgtgccgctatccgtgccggattccctgccgataaagttgttttcgcaggagtcggcaaagcagattgggaaatcaatctcggactggagtatggcatcttctgtttcaatgtcgagtctatccccgaactggaagtaatcaatgaattggctgctgctcaaaataagattgctaatgttgctttccgtattaatcccgatgttggcgcacatacacatgccaatataactaccggtttggcagaaaacaaattcggtatcagtatgcaggacatggacaaggtgatagacgtagcacaagagatgaaaaacgtaaagtttatcggtcttcactttcacattggctcgcagattctggatatgggtgattttgtagccctctgcaatcgtgttaatgagttgcaggacaaactggaagcacgaagaattttggtagaacatatcaatgtaggtggtggtttgggtattgattacggacaccccaaccgtcaggctgtcccgaatttcaaggattactttgctacctatgccggacaattgaaattgcgtccttatcagacattgcattttgagctgggacgtgcagtggtaggtcagtgtggttctttgatatccaaagtcctctatgtaaaacaaggaacacggaagaaatttgccatccttgatgcaggtatgaccgacctgattcgtccggctctgtatcaggcattccataaaatggaaaatattacttccgaagaaccattggaggcatacgatgtagtaggaccgatctgtgaatcgtcggatgttttcggaaaagcgattgacctgaacaaagtgaagcgtggtgacttgatagcccttcgttctgctggtgcttatggtgaaataatggcttccggatacaactgtcgtgaactgccgaaaggatatacttccgacgaactggtgtaagtaaaaaatgaaccgctacaatcaaaatgtgaatgtagtttaaaaatatagggtgcatggaacaattttaactgaaagcgtgttatttttgtaatgagttcaaaaagaaactacattaacaacttaataaaaaaatacgattatgatttcagaaaaattacagaatgcaattaacgaacagattactgctgaaatgtggtctgctaacctgtatttagcaatgtctttctattttgagaaagaaggtttcagtggttttgctcattggatgaaaaagcaatcccaggaagaaatgggacatgcttatgcaatggcagattatatcatcaaacgtggaggaactgctaaagtggataaaatagatgttgttcctaacggatggggtacacctctcgaagtattcgaacacgtttacaaacatgaatgtcatgtttctcaattggtagacaagctggtagacgtagcagctgctgaaaaggataaagcaacgcaggatttcttgtggggatttgttcgtgaacaggtagaagaagaagctacagcgcaaggcattgttgataaaatcaagaaagccggtgataccggaattttctttgtagattcacaactgggacagcgttaatgatgctactctgaaaaatagttctttattatacatagaagctgcctgaatttttgttcagacagcttcttttttttcacttatttggcttatgttcgaaaataaactacctttgtattacgagtcagagagaaattaatcccgattattataaatgaatggtgtgaatagaggaatttttagattgctccctatatttttattgctctttttgggggtgagcagttgttctcaaaaagaggaacggcgtattttagttatccactcttatgaggagacttacgcggcttatccggaatttaaccggatgatagcggagcaatttgagaaagagaaaatagatgctgatatccgtaccgtttatttagattgcgagtcctattgggaagaaccggagttggaacgaatgcgctttctggttgattccgtttcgaaagactggcggccggaagtgattctggtgaatgaagaccaggctacctattcattgatgaaatgtggggttcagttgggcaaagaagtacctgtggtttttggtggtgtcaattacccgaattggggcttgctgaaacgccatcctaatgtgacgggtttccatgataagatcgcctttaatgaaaatgtcagtgtggcaaaagaacttttcggtgaacacgtccggttgtttaccatgctcgataccacttatatcgataaacaaatcagaagagatgcaaaggaacagtttaaaggtcataaagtgaccggattcatcgataaccccgaactttctcttgaagaacagatacgtttaacgcaggaggaaggttatactcgtttcatggctattcctttacgtaatgccagaaatcattcggacgccacctttatgtgggtgttgaacagaagctatcgcgatcaatgttatattcagctgaaacgtgattatactaccattaatattggaagcatctgtggcagtcccagcttgacagccatcaatgaagccttcgggtttggtgagaagttgctgggtggatacatcacttcgttgcctattcaggtggaagaagaggtgaaagcagccgttcgtatattacacggtgcgagtccggcggacatgcctattgttgaaagccggaaagagtatgttgttgattggaatacaatgacgcaaataggtttgagtaaggaaagtattcctgctaaatatcgtattatcaatattccgtttagtgataaataccctttgttgtggggaatttcagtcgcatcgttcattcttatactaattattcttttcgcttctctttggtggctataccttcgggaacagatgaggaaaaagcaggctcttatagcattggctgatgaaaaagaaacattgtcattagccattgagggtggaatgacgtatgcctggagattggataacggttgttttgtttttgaagatgcattctgggcgtcgcaagggttaaatcccagacaactttcgtttaaggaattcatgagctttatccatcccgaccattgggaaggagtgaagttcaactggcgaaatctgaaaagtgctcataaaaagattgtgcaggagctttgtaacttcgacggcaaaggctatcagtggtgggagttccgttataccaccaaacagctacctggaggcgaatataaaactgcaggtttgttgcttaatatacaggatataaaagatcgtgaagaagaattggaagcagcacgcttattggctgaaaaggcggaattgaaacaatcattcctcgcaaatatgagccatgagatacgtactccgcttaattcaatcgttggctttgccaatatactggcattggaagatggattgagttccgtagaacgcgaagagtatatcagtactattaacaagaacagcgagttattactcaaactgattaatgatatcttggaactttcccgtatcgaatcaggatatatgtctttctcattcaagagatgcaaggtgagagagttgattgacgatatctatatgacacatcaggttctgattgctccacatttggaattcctgaaagaagtggataatacacctttggaaatcaatgtggacagagagcgcttgatacaagtcctgacaaactttctgaataatgccggtaagtttacggaaaccggatatatcaaattaggatatagttatctgccggatgaaggcaaagtacagatttatgtagaagataccggaagagggattccacgagaagaacaacggatgattttcagccgtttctacaaacaaaacgaattttcgcagggagcaggattgggactttctatttgtcaggtgattatagagaagctgggtggaaagatcgaactcaagtccgaggtaggcaagggaagccgctttacggttattcttccttgccgggtggtatcttgataatgatagactttaacgggaatacgaacaatcttatttcttgtgttttcctttctccatcgttcccaggtaaatctccagtgaacgggtggaaatctgtatttcgcggaaagatacgcctaaagaagctatcagcagaatcaatgccaatccgaatacataagcagagaataattgaagcccgatataaataaggaacatgctgactacacagaaaaaaaggcttgcaatacctagtccttgcatcctacgggtcaggttcaaccgtttccgtagattctcgatttgcgcttcagtgatatccgaagggttttccatgtagcggtcacgcagttggcgcacaagttgggcatacgataagaaacggttggtataagccagcaatatcaatgaaactgccgagaaaagtagggcaggagtagtgagagtcaattcttccataatcttttttttatagtcaagtagcggttcaaaattcattttataaaagagatttttttggcacgggttacatggatttcacggttttagaaatatgcttgcataaagcaacagcgtaatctgtgtaatccgtgcctaaaaatggatgctgcaagtaaaccttgccccggagttattccgttttcagcacattaagctctttgcctaccttgataaaggcagcgatgcacttgtcaagatgtgctttctcgtgtcctgcagagatttgcacacggatgcgtgcctgatctttcggcactaccggataatagaaacctgtcacatagatgccttcctcctgcatacgtgcagcgtaaatctgggacaacttcgcgtcatacaacataacggcacagatagcgctttgtgtcggtttgatatcaaatccggcagccgtcatcttatcacggaagtagtttacattctcaacgagtttatcatgtaatgcattgctctctttcagcatcttgaaaacttcaaggctggcaccaatgatgcccggagccaaagaattcgagaacagatacgggcggctgcgttgacgaagcaaatcgataatctctttacgaccggtggtgaaacctcccagtgcaccgccaaaagccttacctaatgttccggtataaatatctacccgtccatgagtcttatacaactcgcttactccatgccctgtggcacctaccacaccggcagagtgtgactcgtccaccattaccagtgcatcgtatttctcggcaagatcgcaaatctgatccatcggagctacattgccgtccatagagaacacaccgtccgtcacaacaatacggaaacgttgtgcctgcgcttcttgcagacatctttccaagtccttcatgtcagcgttagcataacggtagcgttttgccttgcaaagacgtactccgtcaatgatagaagcatgattcagagaatccgagatgatggcatcctcttcagagaaaagtggttcgaatacaccgccgttggcgtcgaaacaagcagcatataagatcgtgtcttccgtctggaaatactccgagatggcagcttccagttctttgtgtatatcttgcgttccacaaatgaagcggacggacgacattccgtagccacggttgttcatcatttcttgcgaagccttaatcaatcgcggatgattggataatcctaagtaattatttgcgcagaagttcagcacttccttaccttttacagtgatggcagcttgctgcgcactttcaatcagtcgttcttctttataaagtccggcttccttgatttcagccaatgtttggcagagatattcttgcattttaccgtacatagtgtttgggtgattaagttatattgcaaaggacacaatttttcttggaataacaatgtctttttgattaaaatctgaaaaaaaagtgcttactttgcgcactatttaagcttgatattctaagtcagaagaaaaaatggaacacattttgattattggagctaccggacagatagggtcggagctaacgatggagctacgtaaacgttacggaaatgcaaatgtagtagcaggttatattccgggtgcagagcctaaaggggaattaaaggagtccggaccgtcagcaattgctgatgtaacggatggagaagcgatcgcatctgtggtaaaagagtatcacatcgatacaatttataatttggctgctctgctgtccgtagttgccgagtcgaagcccaagctggcctggaaaataggtatcgatggattatggaatgtattggaagtggcacgcgaacaaggatgtgcagtgtttactccgagttctatcggttcgtttggcgctagtacgcctcatacgaaaacaccgcaggacactattcagcgtccgcgcaccatgtatggagtcaccaaggtaacgaccgagctgctaagtgactactattttaataaatatggtgtcgatacacgtgctgtccgttttccgggcattatttcgaatgtgacccctccgggaggaggtacgaccgattatgctgtcgatatttattactcggcggtgaaaggagaaaaatttgtgtgccccattaagcaaggcactttgatggatatgatgtacatgccggatgcgctgaacgcagcaattacgctgatggaagctgatccgacaaaattgatacaccgaaatgctttcaatatcgcctcaatgagtttcgacccggagacgatttatcaggctatcaggaagcatgtgccgcagtttgagatgatctatgatatagatcctttgaaacagcgcattgccgatagctggcccgatagtctggatgacacctgcgctcgtgaagagtggggctggaagccggcctacgatttggaaagcatgacggtagatatgcttgaaaagttaagagagaaactaaaataatgaaaaaactaattgtaggggtcatgttgctcggtatactgggtgcttgtggaaacaagaaaacaaacattgaccccttcgcatctatcacaaaagaagtggattctatccggcgggtagccgattctattcactgtgatgaatcgccggaagatccgcaacctatacaggcagatgaatctttcgatgattttatctacaattttgcttccgatgacgtgttgcagcgtcagcgtgtgaaatttccgttgccttactacaatggagataaaaaaacgaatatcgaggagcataactggaagcatgatgacttgtttaccaaacagcattattatacgcttctgtttgatagagaagaagatatggatttagtaggagatacctccctcacttccgtacaggtagaatgggtgtttgtgaaaacacgaatggtaaagaaatactattttgagcgtatcaaaggtgcatggatgctagaggcaattaatctgcgtcccattaagcaaaatgataatgaaaatttcgtggagtttttcggacactttgccgcagatagtctttttcagagtaagcgtgtgtgtgagcctctggcttttgtaaccaccgatccggacgatgatttctctattctggagaccaccctcgatcttaatcagtggttcgcttttaaaccgggacttcctgccgatcgtctttctaatatcaattacgggcagcggaatgacgatgattcgccaacgaaaattctggcgttgaaaggtatcggtaatggtttttccaatatcctctatttccgtcgcaaagccggggaatgggaattgtataagtttgaagatacaagcatttga

SEQ ID NO: 239 - DNA, 5793 bp, unidentified
  source 1..5793: mol_type = unassigned DNA
  misc_difference 4186: note = a, c, g, or t
  misc_difference 4187: note = a, c, g, or t
  misc_difference 4188: note = a, c, g, or t
  misc_difference 4189: note = a, c, g, or t
  misc_difference 4190: note = a, c, g, or t
  misc_difference 4191: note = a, c, g, or t
  misc_difference 4192: note = a, c, g, or t
  misc_difference 4193: note = a, c, g, or t
  misc_difference 4194: note = a, c, g, or t
  misc_difference 4195: note = a, c, g, or t
ttactcagcaggggaggggacgtcctctatctccggctccgtccattccaccatggtggccacgcatcggttgatgctcttgccctcgccgtagaacttgcgctcatagtcggtcatcacgcccaccggcccgtccgcgtgcagatcccgcgtcacctccgacagcgcgaacccgaactgtgggatctcctccagcgaccactcaaacagcttgtcgttgtcggtcttgaagtggatctgtcctccctcagccagcacctgccgatactttttaagaaagttcccgtgggtcagccgccgttttttctggttgctcttgggccatgggtcgcagaagttgatgtacagccggtcgatctcccccggggcgaacatatccggcagcagcgcagcgtctccgtccacgaaccacacgttccgcagcgccgcgtcccgcgccttctccatggccaccaccatggcgtccggcaccttctccacggcgatcagcagcacctccggctctgccgccgcggtccccacggtgaagccgcccttgccgcagcccagctccacccgcagctcccgcgcctccggcatcagctcccgccagcgcccccgcagggcgaacgggtcccggatcaggtacgcgccgcaggcttccatccggggcgccagattttttttcttccgcatccgcatattcatgtcctcgccattttacgattttctcccatcataccccatcttgcgccgggatacaagcacgtttttccctgatatccctgtttgctgcgcccctgcccgaaaaagtgtgcaaattccggtgcccacttttgtggaaaccgctaaaaaagtaaaaagccggtgggttggacttgataaatttctaacgggacactataatgtgatatgtatgaggaggcgtatgcccacctgccggccccgtgccgtttccgggcgctgcgcccacggaaaggaaccataaggaggaacttgatatgaccaacattctgctggaaaagaagggcctcatcgccgtggcgaccatcaaccgtcccaaggcgctgaacgcgctgaattccgaggtcctgaccgacctggacgagctggtttccgccgtaaaggcggacgcggatatccgcgctctggtcatcaccggcagcggtgaaaaggccttcgtggccggtgccgacatcggcgagatgagcaccctgaccaaagagggcggcgaggccttcggcaagcacggcaacaacgttttccgcgccatcgagacgctgcccatccccaccatcgccgcggtcaacggcttcgccttgggcggcggctgcgagctgagcatggcctgcgatatccgcatctgcgccgacaccgcggtcttcggccagcccgagaccggcctgggcatcacccccggcttcggcggcacccagcgtctggcccgcctggtcagccccggcatggccaagcagctgatctataccgccaagaatatcaaggctgacgaggcctaccgcatcggcctggtcaacgccgtttatcctctggaggagctgctgcccgccgccgagaagctggccgagaccatcgccaagaacgcgcctatcgccgtccgcgcctgcaagcaggccatcaacgagggccttcaggtggacatggacaaggccgtcgtcatcgaggaaaagctcttcggcagctgcttccagtctgccgaccagatcgagggtatgtccgccttcctggagaagcgcaagcacgagccctatcagaataagtaagttaattgacaggcacaccgcctgataattaagcaattcatgtaaaaatttaagtaggaggaactatcatgaaagtagcagtattcggcgccggtacgatgggcagcggcattgcccaggttttcgcagcgaagggccacaccgccctgatgtatgcttccagcaccgccagcgcacagcgtcataaggacaagctggccgcctccctgaacaagaaggtcgccaagggtaagatgacccaggaagccgcggacgatatcatgagccgcgttctggtcgaggaggttgacgctgccgccgatgccgatctggtcatcgagtgcgtggccgagaacatggccgtcaagaaggaactgctgggcaagctggacgccatctgcaaggacgagaccatcttcgcctccaacacctcctctctgtccatcaccgagatgggccagggcctgaagcatcacctgatcggtatgcacttcttcaaccccgtgcccgccatgaagctggtggaggtcatcgccggcggcaacacccccgccgacctggtggactatatcaagaacctgtctgtggagatcggcaagacccccgtggtggtcaacgaggcccccggctttgtggtcaataagatcctgatcccctactgcaacgagggcgtttgcgttctgcaggaaggcgttgcctccgcggaagatatcgatattgctatgcagctgggctgcaaccatcccatgggccccctgcatctgggcgacctcatcggctgggacgtggtgctgaacattatggacgtgctgttcaacgagactcacgatagcaagtatcgcgcaaacgtgctgatccggaagatggttcgtgcgggcaaattgggtattaagtccggcgaaggcttcttcaactacaacaagtaaaatcagaaaaaggagaaaaaagtatggatttccatctgacgaaggaacagctgctcgttcgcaagatgtaccgcgatttcgcggagaacgaggtcaagcccctggccgctgagatcgacgaggaagagcgcttccccatggagaccgtcgagaagatggccaagctgggcatgatgggcatttacttccccaaggagtacggcggcgctggcgctgatgtgctctcctacgccatgtgcgtcgaggagctggccaaggtctgcggtaccactgctgttatcgtttccgcccacacctccctgtgcgccgcccccatcttcgagaacggcaccgaggagcagaagatgaagtatctgcccgacctgtgctccggcaagaagatcggcgctttcggcctgaccgagcccggcgccggcaccgatgcccagggccagcagaccaccgccgtgctggacgagtccggcgagaactacattctgaacggctccaagtgcttcatcaccaacggcaacgtagctgacaccttcgtggtcatcgccgtcaccggcaagaccgttgacaagcgcggccgcagcatgaaggagatctccgcgttcatcgtggagaaggacgacaagggcttctctcagggcaagcacgagaagaagatgggtattcgcggcagttctacctgcgacctgatcttcgaggattgcgtcattcccaaggaccgtatgctgggtaagaagggcgagggcttcaagatcgccatgaagaccctggacggcggccgtatcggtatcgcctctcaggccctgggcctgggcgagggcgctgtcgaggaagccatcaagtacaccaaggagcgcgttcagttcggcaagcgcatctcccagttccagaacacccagttccagctggctgagatgcacacccgtatgcaggccgcgcagttcctggtctactccgccgctatgaagaagcagaaccacgagccttactccatggacgccgccatggccaagctgttcgccgccgaggccgcttccgatgtgacccgccgcgccgtccagctgttcggcggttacggctacacccgtgagtatcccgtggagcgcatgatgcgtgatgccaagatcaccgagatctacgagggcaccagcgaggtccagcgcatggtcatcgccagcaatctgggcgtgaagtaaggtaggaggtaaaaggaaaatgaaaattctcgtaactgttaagcaggtccccgatacctccggtaaggtggccgtcaatcccgatggcactctggaccgtgcgtccatgcagaccatcatcaaccccgacgatctgaacgccgtcgaggccgccctgtccctgaaggacgagctgggctgcaaggtcgtggcgttcaccatgggtcctcctcccgcagagggtatgctgcgtgagctgatggccatgggcgtggacgagggtgttctggtcaccgcccgtgagttcggcggttccgatacctacgctacctcccagatcatcgctgccgctatnnnnnnnnnncatcatcctggctggccgtcaggctatcgacggtgataccgcacaggtgggtccccagatcgctgagaagctgcatctgccccaggtcacctatgccggcgagatcaccaaggacggcgacaccctgaccgtcaagcgcatgctggaggacggctacatgaccatcaaggtcaagactccctgcatgatcacctgcatcaaggagctgaacaccccgcgttacctgtccgtgggcggcgcgttcgagtgctacagcaagcctctggttactatgacctacgagaccctgaaggatcaccccctgatcgacaagagcaccatcggtctggccggttctcccaccaatattctgacctccttcacgcctcctcagaagggcgcgggcatgatgctcgagggcgctgacaaggctaccaccgacaagctggccggcatcctggccgccaagcacatcatctaaggaaggagaaaagaaaatggcttttaatagtgctgataccgctgccttcaagaacgtatgggtgttctgcgagcagcgccagggcgtgatgatgcccaccaccttcgaactgatctccgagggccggaagctggccaatgagctgggtgtcgagctgtgcggcatcctgctgggcgacaacgttgacggcatcgccgccgagctgggcgagtacggcgccgacaaggtgtacgtgtacaactcccccctgctaaaggacttcaccaccgatgcctacaccaaggtgatcgtggaggccgttgaggagctgaagcccgaggtgctgctgttcggcgcctccaacatcggccgtgacctggccccccgccgcgcggcacgcctgcacacgggtctgtgcgcggactgcacccacctggacatcgacatgcccaactacaagggcttcctgaaggaagcttccaccctgcccgaggagcgcatcgagaagctgggcaccgtgatgatcaaccgtgagccccacgatgtgtcccgcgacctgaagatgacccgtcccgctttcggcggtcacctgatggcctccatcatttgcccccgcttccgccccgctatggcgaccgttcgccccggcgttatgaagaagcgcgagtgcaagaagaacgtggagatcctgcatcccgcgttcgctctggaagccgctgacatcaagaccgaggtcgtggataccgtcaaggccgccaagaagctggttgacctgatcggcgctgacttcatcgtgtccgttggccgtggtatctccaaggacgtggagggcggcatcaagctggccgaggagctggctgaggttctgggcggcgtcgtgggttcctcccgcgcctgcgtggacgccggctggatctccgctgaccatcaggtcggccagaccggcaagaccgtccatcccaaggtctacatcgctctgggtatctccggcgccatccagcacaaggctggtatgcaggactccgagtgcatcatcgccgtgaacaagaacgacaccgcccccatcttcgaggtggctgactacggtatcgtcggcgatctgttcaaggtcgttcccgagctgattgagtccatcaaggctgccaaggccgccaagtga

SEQ ID NO: 240 - DNA, 19168 bp, unidentified
  source 1..19168: mol_type = unassigned DNA
atgttcaacaaacaccctaaaggtctgattgccgcatcctttgctaatttgggcgagcgtttcggcttttataccatgatggccattcttgtactttttttgcaagccaagttcggactggatggaaaagaggcaggtttgatctactcaacattttatttttctatttacattcttgcattgataggtggtattattgccgacaagacccgtaattacaaaggtaccatttttgccggtattgtcctgatggcggtaggctacttgatgcttgccatcccgtctcctacaccggttgccaataaaaccttgtttttggtgattacttgtgcggccttgtttgtcattgctttcggaaatggtcttttcaagggaaatcttcaagcgctggtagggcagatgtacgacaatccccaatattccagcatgcgtgattccggtttctccttattctatatgttcatcaatgtaggtgccatctttgctccgtttgccgcagtaggcgtacgtaactggtggctgtccacattcggctacaattatgatgccgacctgcctgccctttgccacggacatctggcaggaacgctgactcccgaagctgtggacacttatagtgcactggcaacgaaagccactatttccggaacacccgtaacggatatgacggtatttgccaatgaatatctgaacgtgtttaccaccggtttccattatgcattcggtgtagctatcttggctatggttctctctttggtaattttcgtcatcaacagaaagaaattccccgatcccagcaagaaggtggctgcaaaagcgggcgatgccactgcagtggagatgagcgcacaagaggtaagacagcgcatgtatgcattgtttgccgtattcggtgtggtaattttcttctggttctcgttccatcagaatgggttgacactgacgtattttgccaaggaatatacagatttgaatttgttcggcatggctatttccgctgagctgttccagtctttgaacccgattttcgttgtatctctgacaccggtcatcatggctgtctttgcagcacagcgtgccaagggtaaagagccttccactccgcggaagattgccatcggtatgggtattgctgccaccggcttccttataatggctatcggttcttatgtaagcaacttgccgatgcacaaggatataatcgctttgggtacctctccggtgaaggtgactccgctgttgctgatggttacctatctgatattgactgttgccgaattgtacatttctccgttgggcatttcattcgtgtccaaggtggctcctcccaaatatcagggtatcatgcagggcggttggctcggcgctactgccattggtaatcagttgctcgttatcggtgctatcctttacgaaagcattcctatctggatgacgtggacggtatttgtagtagcgtgctgcatttccatgttcaccatgctgttcatgctgaaatggcttgaaaaggtggcgaagtaatcggaaacgaaagataaaactaaaggctgcgcaatgttcgtaatgaactgcgcagcctttagtttttggagggcttttaatgccgggactcagatttccagtcccatgatgtagtcattcatgtaatatccgtttcctatcgggaaatccccttcacggagtttccgcattcccatatgttcgtaaaactgcagtgccttgttgttacggttcacattcaattccatcagacaagggccgggatgcactttcttgatgtacttgatggcttcgcgaaagaggaaactgccgcaatgtgcaccctggtaataggggagcacataaatcttttgcaggtggaataaatcttctccttgctgctgtacggacacatagcccgccgcttcacattcttcgtaagccaggaaatagacgtggccttcctcttccatttgtttacggatattgtccaatgaatacatccattccatcatgtagtcggtctgctcgggagtaaggatatccttatacgtgacgggaaatatttgctgcgcaagtttctgaatcagtgcgcagtctgctgtcgttgcttttcttatggtaaacatatcggttgtatttatactgtttggggtgtaaagttaagccttttttgtgaaacaatcgttatctttgcagaccgttaccgaactaactaattctgattttaaaaattatggcatttacgagcaacattatgattgtccgccacagattgctgaaggaactggtaaagctgtggaataacaacgaacttgtggataaaatagaccggctgcctatcgagctgagtccgaagaggtccaagcacgcgggacgctgctgtgtgcacaaagagcgcgcggtgtggaagtacaagtcattgccgcttctgggactcgatatggaggacgagacggatgagctgacccccttgtcggagtacgctgcccgtgcactggacagagcggaaaatggcaggccgaaagacaacatcatgtgtgtgattgacgaagcttgttcggcatgtgtgcagattaactacgagattacgaacctctgccgcggatgtacggcacgcagttgccaggtgaattgtcccaagaaggcagtgcacgtcaaggagagcgggcaggcatggattgaccatgatgcgtgtatcagttgcggcatctgccataagagttgtccctaccatgccattgtttatattcccgtaccttgtgaggaggcttgtcccgtgaaagccatcagtaaggatgagaaggggatagagcatattgacgaaagcaaatgtatctattgcggaaagtgtctcaatgcatgtccattcggagcaattttcgaaatatcgcaggtgttcgacgtgttgcacagaatccgcaagggtgagcaggtagtggctatcgtggctccgtccatcctggggcagttcaagacgactattgaacaagtgtatggcgcattgaaacaagtcggttttacggatgtcatcgaggtggctcagggagcgatggataccgtcagcaacgaggcgcacgagctgattgagaagctggaggagggtcagaagtttatgacgacttcctgctgtccgtcttatatagaattggtgaacaagcatattcctgccatgaagccttacgtgtcgggcaccggttcgccgatgttttatgctgcccgcattgctaaagagaagtatccggatgcgaaggtggtcttcataggtccttgcgttgccaagcgcaaagaggcgcagcgcgacgaggcggtggactttatcatgactttcgaggaggtggcttccgtgcttgccgggttggatattcagatggagcaggcaaagccctattccatgagtttcacttccgtgcgcgaggcgcatggttttgcgcaggcaggaggcgtgatgggtgccgtgaaagcctatctgaaggaagaggcagataaaatcaatgccgtacaagtggctaatctggataagaaggctatcggtgcgttgcgtgcttacgccaagtcgggcaaggctccggggcaatttattgaagtgatggcttgcgagggcggttgtattaccgggccatgttcgcataatgaaataactgccggaaagcgccagctgacgcaggagttggcaaagagaaaagagacgtattagccctttgtccgtttatatgaagcatttgattgacaaactgcggagcaatcgcaggctgggtgccgaagagtataaagccttgcttctttgccgggacacagaacttgcagcctacctgcaggagcttgcccgggaagaagcgcttgcccgctttggcaataaaatcttcattcgcggactgattgagataaccaaccgttgccgcaataactgctactattgcggcatacggaaggagaaccggaacatagtccgttatgagctggcgcaggaggagattctttcgtgttgccatgaaggctatcggttgggcttccgtacctttgtgctgcaagggggcgaagcgccggcggtgaaggatgaggggatggtggagacagttgccgccatccggcaatccttcccggattgtgccattaccttatctttgggcgaaaaatcgcgggaagcctacgaacgtttcttcctggcaggtgccaaccgctatctgttgcggcacgaaacctgcaacgaagggcattatcaccggcttcatcctgctgagatgtccctttcccatcggttgcaatgcttggactggctgaaagagataggctatcaagtgggaaccggaatcatggtgggcagtccttaccagacggtggaccatttggtagaagacattctcttcatcgaacggtttcagccggagatgataggcatgggaccttttcttccacatcacgatactccgttttcctcttttccgtcgggagatatggagttgacgttgaagttgctttctatcttccggttgatgcatcccgcggcactgatacctgctaccactgccctgggcacacttgctccggacggacgggaacggggaatattggctggcgccaatgtcgtgatgcctaatctttcgccttctcatcagcgggcgaagtactccctctatgataacaaagcttctgcgggtgccgaagcggcagaaggtttgctaaaattggaggaacaactgaaagggataggctatgaggtatcaagagagagaggagattatgagaatggagaattgaccgttgataattgataattttcaaatcttcattctttattttaattaccaattatcaatttacgaagtgtataacataaagtcaagacaagcagaagaattcatcaatcaccaggagatattggatacattggagtatgcgcaggcaaaccgcaacaaccgtccgctcatcgaaagtttgattgacaaggctgctttgtgccaggggctttcccatcgggaggcggccctgctgctggaatgtgacgagccggaactggtgcagcgcatctatcatctggcatgtgaaatcaaacggaaattctatggcaatcgcatcgtgatgtttgccccgctttatctttccaactattgcgtgaacggttgcgtctattgcccgtatcatgccaagaaccgtaccattccccgcaagaaactctcgcaagaggagatacgccgcgaggttatcgccttacaggatatggggcataaacgccttgccctggaagccggagaagaccctcgaaacaaccctatcgactatatcttagagtccatccgcaccatctacagcatccaccacaagaatggggccatccgtcgggtgaatgtcaacatagccgccactacagtggaaaactatcggttgctgaaagaggcaggcatcggcacttatatcctttttcaggagacttacagcaaagagcattacgaagccttgcatcccacgggaccgaaaagtaattatgcctaccacaccgaagcgatggaccgtgctatggagggtggcatcgacgacgtaggtatcggcgtattgttcggtctgaacacctatcgttatgacttcgtaggactgctgatgcatgccgaacatctggaagctacctttggcgtgggtccgcataccatcagcgtgccgcgtatctgtccggcagatgatatttcgaccgaggattttcccgatgccatctcggatgagatgttctgccgtattgtggcggttacccgcattgcggtgccttatacgggaatgattatttccacccgtgagtcggaagccgtacgccgtcgggtgctcgaactgggcgtttcgcagataagcggcggttcgcgcaccagcgtgggaggctatgccgtgccggaagccaaagaggaagattcctcccaattcgatgtgagcgaccggcgcacgctggatgaagtggtgagttggctgctcgacctggggcatatccccagcttctgcaccgcctgctatcgcgagggacgtaccggagaccgcttcatgtcgctcgtcaagcgcggacagatagcaaactgctgccagcccaatgcactgatgacattaaaagaatatctggaggactatgcctcctccgaaactaaggagaagggcatacagctgattcgtgaggagatggagcatatcccgaaccccaagatacgggcgatagccgaacgtaatcttcaggagataggggaggggaaaagagactttagattttagatttcggatttatgaataatacacctcgttccaaccgcctgcacattgccgtctttggacgacggaacagcggaaagtccagccttgtcaatgccttgaccgggcaagacacggcattggtatccgcaacgcccggcactactaccgatcccgtaaccaaagccatggaagtatatcctttgggcccgtgcctctttatcgatacccccggttttgatgacgacgaaggcgaactgggcggtatgcgcgtggagcgtaccttaaagacggtggagaaagcggacatcgccctcttgctttatgaagctgacggaacgctggaacagcaatggctaaagctgctggcagcgcgcgaaatctccgtgatactgatactgaataaagccgattcccgtcaagacaccgcttccgtggtgcttcggattgaaaaggagtgcgggcaggctcccgttgtggtcagtgccaaagagggtaccggcattcaaggtatcttcgatgctatcctcgaaaagcttcccgagaattttggtgagcagactatcacgggcgatttggtgcgtgaaggagatgtcgtcctgctggtgatgccccaggatatacaagcccccaaaggtcgtctcattcttccgcaagtgcagaccatccgcgaactgttggataaaaagtgcttagtgatgagctgcaccaccgacaagctgcaagcctccctgcaagcccttgtccgtccgcctaagctgataatcacagactctcaagtgttccccatcgtctatcaacaaaagcctgccgagagtagtcttacttccttctcggttctttttgccggttacaaaggagacatcaatgcctttgtagagggagctgccgctattcatagcctgacaccccaatcgcgtgtactgatagccgaagcctgcacccacgccccgctgaccgaggacatcggcaccgtcaaaattccccgcctgctacgaaagcgcatcggcgaggaattgcagatagactttgtatctggaaatgactttcccagagacttgtcccgatatgatttaattatccattgcggcgcttgcatgttcaaccggaagtacgttctcaatcgtatagcccatgcccgcgcacagcacatccccataaccaactacggagtagcaattgcgagtctgaccggtatattggataaaattgttatccatcggtaaatatccctctccctctttgttcatgttactgatgtaatagagtagtgtgaactactttttttgttaattatacttaatataaggtactttgtaatgcaaggtactgatataatacatatatttgtgccatacaaggaacaacaatagaatgaatgaggacactcattactctattgcgcagccaaatagtaaatcgtaaattgtcaaatagtaaataccattatggatgtaaacaatgtaaagtcgcaaatgcgcaagggcatgcttgaatattgcatcatgctgctgcttcacaaggagccggcttacgcttcggatatcattcagaagttgaaagaagccagactgattgtagtggaaggtacactttatccgttgctcacccgtctgaagaacgacgacttgctgggttatgaatggattgagtctacgcaaggtcctccacgtaaatattaccggttgacggaaaaaggagaagtctttctcggtgaactggaaatgtcctggaaagagttgaacgagacggtgaatcacatcagcaattcttgaaatgaccacagagaatatgctgcattcgccgaatggtaaatagtaaatcgtaaatagtcaaattgtaaataaatagtgtgttatgaaaaagacattaactgtaaatttaggtggaaccgttttcaatattgatgatgacgcataccgtcttttggataattatctgagtaatctcaagatgcacttccgcaaggaagcaggtgccgacgagattgtagatgatattgaacgccgtatttccgaactctttgccgagaaattgtcggccggttcgcaagtaatcacgatagccgatgtggaagaggtgattgcccgcatgggaaagccggaagatatggaggcggaaggagagagtgctagtgccgattccggcagcacgagtgccgggggcggctatggtgccggtgcttggaacagcaataccgcttatggcactacacgccgtcgtctataccgcaatccggatgacaaaatgctgggtggtgtcatcagtggaatggctgcctacctgggatgggatgtaactttacttcgactgttactgcttgtcatcttgatttgtggggtagggacattgataccggtctatatcgtgtgttggctggttataccggaagcccgcacagcagccgagaagttgagtatgcgtggcgaggccgttacggtggagaatatcggaaagacggtgacggacggttttgagaaggttgccaatggggtgaatgattatatgaggtcggataaaccccgtactttcttgcagaagttgggagatgcattggtgatgattgtcggctggttcttgaaaatctgtctggtgatattcgccattatttgcagtccgatactgtttgtgtttggagtggtattcgtggcgctgttgtttgctgcgatagcggtggctgttggtggtggtgcagctctcatttcccttttcccgatggctgatgtggtactgcctacttctccgctgtctgccattgtgatgtacattgcaggtatcttgttggtaggaattcctttggtcagccttgtgtgggccatctttagccagatattcaagtggcagccgatgaactccggcttgaagtggacgctggttatcctttggattgtaagtgcagcttgcttcggaatctgttttgcagtgcagggggctactttcccggaattgggtatctttaatttctgagaatagtaatttcttttttaattgatatcgtgtttgtggaaatcagatttctataaacacgatatttttttattgggtgtaattggttgttatacagtgaaatattgcgtttggaaaaggcgttttttaaacgttcgtttaatgaacgcaaagataacgtgtatttttgaatctcgcaaaatgtttaataaaaatattctataaatttctttttagtgagtataatactttgtcagtaagcctattgcattgtatttctctaacttcttccttttactaatttttaagtaatcttccctctttaattttcttaaatattgacgttcaaaaaacgaacgtctattgaacgctttttgcttgcaatagattcgtttacagcattttacctgtcaggtaatgaatgactgcaaaaaatctgttgacaagaagggcataaagcttgtcgtattctacataaagtgtccgcaagtaattgaatttcaagtgtatgcaagaggttcaaagccccaggagaacacccttgtctgaacaaaagcataaaatgggaatagagaaagaggccgaaatctggtatgctatgcgtgccacctaccgcagagaaccggatgccatgcgtctgctaaagaaagaaaatttgggctgtttcattcctatgcaatacaagatatgtataaaaaaagggaaaaaagtccgtgctctggttccggtcgttcataatctgctttttgtccatgcccgtccttccgatgtgcagcgtgtcaagtctcaagtcacttatctgcaatatatcaccgatacccgcagtgggcagaagattattgtcccagacggtcagatgcagcgtttcattgccgtatccggcacttacgatgatcatcttctttattttcaaccggatgaattgaacttgtccaagggtaccaaagtccggattaccggcggtgaatttgaggggcaagaggggatatttctgaaggtaaagggcgcacgtgaccgtcgcgtggttatcgaaatacaaggtgtcatagctgttgccatggccactatccatcccgatcttatagaagtaatcggctgaactttaatttttaatttttaattctataattgcttatgtctctttccgaagaagcaatcactcttcagcgtgctgcgcacgaactgatgtatttgggtatggacggcagtcccgtctatagcgatgacttgtcacggcggaacggtgaggtctaccgtcttaccatggctttgtaccggtcgggtgtaaaaggcactaccatcgaagagcaggcaaatgtctgtcttgcccttcttatgggttacagcgcctcttttgtggaccatggcgaaaagcagcggcatgtccagaaagtgctggactgttgttgggatgtgctcgatgcccttcccgcttccttactgaagctccgtctgcttaccgcctgctacggtgaagtgttcgacgagtctttggccgacgaaggccgttccatcatcgcctcctgggattccttatcacttactcccgaacagcaggaagcggttgatgagtttcagaatgtgacagacaatccctatccgtgggaatatatcgatgaataaaacttttcattataatgcttaacaataaatccgtattgattaccggaggaacgggttccttcggaaagaagtttgtggaaaccatcctccgtgattatccgcaagtaaagaaaatcattatttactcccgcgatgagctgaagcaatttgagctgaaacagaaatatcccggtcataagtatccgcaactgcgtttctttatcggtgatgtccgtgacctcgaacgcctgacgcgggcttgcgaaggagtggacgtgattatccatgcagccgccatcaagcaggtggataccgctgaatacaatcccgaagagtgcatcaaaaccaatgtacacggtgcgcagaatgtgataaaggctgctcttgccaccggtgtacagcatgtggtggccctttctaccgacaaggcatgtgcccccatcaatctttatggcgccaccaagctcacttccgacaagctgtttactgctgccaacaatatcagcggttccaagaacatcaggttctccgtagtccgttatggcaatgtgatgggttcccgcggttccgtaatccctttctttatcaacaagcgtgacaacggggcgaaggaacttcccataaccgatatgcgcatgacccgtttcaacatttcgctggaagccggtgtcgctttggtcatgtatgccatcggacatcacctgggtggtgaaatctttattcctaagattccttcctatcatatccaggacgtggctaccgccattgcacccaatctgccgcaggtggaagtgggcatccgtccgggagagaagctgcacgaggagatgattactgtaaccgatgctcttgatacaatcgatttgggcagatattatgtcattcttccttccgtatctttcaagcacagtcgcgaagagttcatcagacatcacaatgcagtacccgttcccgacggtttccactacagcagtgacaacaatacggagtgggagacagtagagactatgcgcgagaatataaagaaatacgttgaccctaatttcgaggtgaaatgataagcaagcctattccatacggtcgtcagcatatcacagatgaggatatccgggcagtcatcgataccctgaaaagcgattacctgacacaaggtcccaaaatcagggaatttgaaacgaaatttgccgaatatgtaggtgcacaatatgccgtagcggtgaacaatgccacttcggggcttcatcttgcagctaccgcactgaatgtaaagccgggcgacaaggtgattgtcactcccatgacctttgctgccagtgccaactgcatccgctattgtggcggcgaggtggtattctgtgatattgacaaggatacttacctcatggatattcgtaaactcgaagccatgcttaaagcttctccccgcggtacttacaaaggtattgttccggttgattttgcaggctatcctttggatctggaagagttcagaaagcttgccgacgagtacggcttgtggattatcgaggatgcctgtcatgctcccggtggctatttcatggacagtaaaggcaagaaacaacattgtggcaatggttgttttgccgactgtgccgtattctctttccatcccgtgaaacatatcgctacgggtgagggaggcatggtgaccaccaacagcaaggagctctatgacaagctttgtctttaccgtacgcatggcattacgaaagaccctgctttattgcacgagcatcatggtggctggtattacgagatgcaggagttaggctacaattaccgtctgactgattttcaggctgccttgggtatttctcagctggagcgtgcgaaagcaggtcttgaccgccgccatgaaatcgtgagacgctataatgaagcgttttccggaatagatggtatcaagactccgttcaatgctgccgatgtctatcatgcttatcacctttatatcattcaagtagctgaccgcttgggcctttataattatctgcacgagaacaatgtctatgcgcaggttcattatgctccgcttcatctgatgccttactatcagcagtggagaaataggaaaggcgatttacctatagtagaagagtattacgaacattgtctgagtcttccgatgtatcccacgttgacggacgaggaacaggagtatgtgattgaaaaggttatagaatatataaaacaatgattacttccattcctattgaagctattgaaaagcagcttttgcagcaactttcctcttttttcttcttgagtgaagaagatgagatgttaataaatatgaaaatgggggggtgatatctcgttgtgaatattgtttttcccgtacgaaaaataagtattactcatgcgacggagagacatacttcaacccttatcaaagtgcacaatatacaatttttctctatttttttgctaacaccatttctcaagatactgataaccgtttattggcagataagttgtattatttgaataagataatgaatgggtgtgatttgtatcatgaggtaaatcttcctcattattttacgttggatcatccggtcggtagcgttatgggacgggctgaatatggtgaaggattcagttttgggcaaaattgcacggtgggaaacaataaaggaatttatccggttttaggtgaaaatgtgcggatgtgtgcaaattcttctattatcggtaactgccggataggtgacaatgtgattatcggggcaaattctggtgtgaaagatgaggatgtgccggacaattcaattgttttcgggtattctccccatttaattataaaggctaaacgatgaaaaatatctgtattattcctgcccgtggcggcagtaaacgtattccgcgtaagaatatcaaaacctttatgggcaagcctattattgcatactccattgaggcggctttgcagagcggactttttgacgaagtaatggtttcgaccgatgatgaagaaatagcggagatagcttgcggatacggggccaaagttccttttatgcgcagtgctgagacctcgaatgattatgccggcacggccgatgtaattcttgaagttttagagatgtataaagagcgaggcagggaatttgatacagtttgttgcatttactcgacagctccttttgtcactcctgaaaggcttcgggaagcatacggaaaaatgaattcggagattgactccgttttcacttgtgtggcttattcctatcctatacagcgtagccttcatattgtagacgggagaatcggtatggtttatcccgaatacatgaatacacgttcccaagatttagagccgatttatcatgatgccggccaattctatttctctcgtactgctccttttgtggagagccggactttttgggggaagaacacagccggactggtactttccgaactcgaagtgcaggacctcgatacgctgaccgactggacattggcggaaatgaagtatgagttacttcatagatgatgtaatgcagaaaatctatttccgtgccgacgcaagcgctaccatcggctacggtcactttatccgtactctggctttggccgatatgctgaaggacgatttcgattgtaccttctttacttgccatcctacctcatatcaggtaagtgagatggagaaggtatgtcctttcatccccttgcaagaggaaacgcattctgctgatttcctttcccatttgcaaggtgatgaaattgtggtgctcgacaattatttcttcactaccgattatcagcgtgccatcaagcaaaaaggctgccgcctggtgtgcattgacgatatgcacgacaagcactatgtggctgatgtcgtgattaaccatggtcagaccaattctgcacttttcgacgtggaaccttacaccaagctctgtttgggatttgattgggcattactgcgtagcccgtttatagaggctgtaaacaaactctgttcttgtgcaaaacgtagtacggaaagtataaccattacttttggtggtgtggattcctttgactttactggccattacattcgtgaagctatgcaattgcctactgtcagccagataactgcagtggtaggtgatgcttatcaacctcaaaagccgagggtacgggataggcgagtgtcttattgctccaatttaacagctcaacagatggccgaacttttttgtgcttccgattgggtaatctgttcagcaagtactgtgagtctcgaggccattgcttgtggtgccaagttggctgtaggttggtatgtagataatcaggctgattattattcactgttaacctctactggaggagttcttcctttaggaaatattaaggataatcccatacctctgacatctttagagattgctggggttgataacttgcagatacaaggtggtattcgtgaacgctatattaatctgtttgaagaattgggaagaaatgtgcattgacgataatcgcattctttttggaaaaattctcataatggacaattgatgcaggaatagaacagataattttaattatttagcaattgaatgatacaaatagacaaacaagcggtttataaatataatggttatgttttccaacacttctctattttgtcggaagaactcctaaagcaaatattggattggaggaatacttttgagataaggcagtttatgtataatacagatgtaatatctcttgaaaatcacttgaattttacgaaaacccttgctcaacgagaagattgttactattggttagtaacaaaagataatgttccctatggagtcttcaatctgaccgatatagaccatgaaagaagaatcgctgaattaggctattatatggcaccttcccaaatgaaaagtggagggggacttgattttgtttatactatcatctgtttttcttttgaggttgcaaaatgtataaaactggtaggttcaattgatataaacaataccgatgcattgttattggatgagtttttaggctttgttttgggtgatacggtggaatccgacggatgttgtcataaccggaaattcattgaatgggagctttcagaacttcattatagaagtactacagtatatagaaatgatatacgtaaattggtccgctttattagagataaacgcaaatagagaatcatgttatcaaattttcattttcaccatataggatacgctgttaccagtattgaaaaaacaatgtattattacattgatgggggatattcttgttcatctgtgatatttgatccaatacagaatgtaaatatctgtttccttacaaaagaaggagagcctatgattgaacttcttgaacctgttgatgagaattctccaatcaataaaaatcttgagaagaatggagtttgtccgtatcattgctgttatagtgtagaaaatatagaagatgccatcgcacggcttcgtaaaatgaggttcatggtggtaagctatccggcagaagcagtagctctcaataatcatcgggtagcttttctctataataaagatatcggtttaattgaattattagaacaaaaatgaaattctttatttttagaaacaatacgctggaaaatatcttcggcacagacgaagtggagtattctggttacgaagatatatcatatatacctcaaaatacatctttgtatttgtggatgtatcaaatacccataagatggaatcagaagcaactggctgacgaaattgatgcatatattagaaaaatgcagcttgttttctcgcaggttccacaagggaaagaatttgtagcattcacattggtagacatctttcctacgagatttactgatgccaattttattgtaagggaggctatcgtccggtataatacccaactgtataatatggctggaacgaatgtaaattttaaggtgattgacttttctgagtttacttcccgttataggtcagaggaattgattggatggaaattctattttatttctcaaatgtatatatcttctaaaattactagtgaatttgctacatgggtagactctaaaatacagaatatagctttaaagagaaagaaatgcctcattcttgatttggataatactttgtggggtggagtccttggcgaggaaggcattaatggtatacaaattggcggggattatccaggtaaggcatttttatattttcaggaagcgctgtctgcgttaagtaaagagggtattattttatctgtttgtagtaagaacaacgaagaagatgtattcgaagcttgggagcaaaatccgtttatggttttaaggaaaaaagattttgttgctattcgtataaattggaatgacaaggcttcgaatatcgtggaactgtctaaagagctgaacataggtcttgatagtatggtgttcattgatgacaatccggcagagcgtgaattagtaaaacagaccttgcctatggtggctgtcccggactttccaaaacaagcatatatgttaccgcagtttttcatgcaattagttcgtgattattttgaagtttacgaaattaccggtgaagataaaaagaagacggaacaatataaggcaaatgcggaacgtacacgcgaacaagccaaattcttaaactttgaagattttcttcgttcattagaaattaaaattgagcttcagaaggtggactcattcaatatatcacgaattgctcagatgacgcaaaaaacaaatcagtttaatttaacgacccaacgttattctgaagctgatgtcagacaacttctggataatcaatggaaaatctattgcatcagagtttcagataaatttggtgataatggtatcacgggagcagttttcatcgctgataatagtattgagaatatattgcttagttgtcgtatattaggtaaaggtattgaaacggctttcattaaatttgtatttaaattgttggttgaggatggtgtgtcagctttagaagcaaaatttattcctactctcaaaaacagacaagtggctgatttttatgaccggcttggcttttctgtgatgcgagtagaagagggtgttaaatactatatggcgaatattgacaaattagatttgtcaatacctgattattattcaataacagttaaacaataaagttatgattacgaatgaagaaataatggatgtgatgagagctgttttaaaaacagatgtagatgagaatacctctcagaataattgcgaaaagtgggatagtatgaaccatttgaatctggttatagaattggaagatactttcgaagtagagcttgagcctaatgaaatcagtttgatgaaatctttctctgacatcaaaaatattatttcaaacaagttacaataagaaccattatgggaaaaacatttatcatagccgagatgtcggcgaatcataatggcagcaagcagataggcatagaaacaattcgtgctgccaaacgtgcaggtgcagatgctatcaagctccaaacatatacagctgataccataacgttggataatgataaaatggagtttatggctgattctacaagtgtttgggccggcatgcgtttgtacgatctctataagcaagcctataccccttgggagtggcacgaagaattgtttcgtgtggccaaggaggaaggacttatctgtttttcatcaccgtttgataaaactgcggtagatttcctggaatccttgggcaaccccatttacaaaattgcctcttttgaaattacggatattcctttaatagagtatgccgccaagaagatgaaaccgatggtgatgtctaccggcattgccactgaagaagacattcagttggctgtagatacttgccgtgcggcgggcaatgatgatattacgctgttgaaatgcacctcctcttatcctgcccccattgaggaagccaatctgtgcatgataaaggatttagccgagcgctatggagtgaagtccggtttgtccgatcataccattggcagtgtgtctgccgtagtggctgtgacacaaggtgcaaccatgattgaaaagcattttattatcgaccgtagtattggcggccccgatgcctcattctcaatgaacgagcaggagtttgcccaaatggtgaaagatatacgcatggccgaagcggctatcggctcagtatcgtatgaacttactgataagatgaagtcgggaagggagttctcccgttcgctctatgtagccgaggatatgaaagccggagaagtgattacagagcagaacgttcgctccgttcgtccgggcttcggtttgcaccctaagtatctgaaagatatattgggaaagaaagtaaatcaggatttggagaaaggaacgagatttgcatgggagttcgtgaatagttag

SEQ ID NO: 241 - DNA, 9427 bp, unidentified
  source 1..9427: mol_type = unassigned DNA
  misc_difference 1395: note = a, c, g, or t
  misc_difference 1396: note = a, c, g, or t
  misc_difference 1397: note = a, c, g, or t
  misc_difference 1398: note = a, c, g, or t
  misc_difference 1399: note = a, c, g, or t
  misc_difference 1400: note = a, c, g, or t
  misc_difference 1401: note = a, c, g, or t
  misc_difference 1402: note = a, c, g, or t
  misc_difference 1403: note = a, c, g, or t
  misc_difference 1404: note = a, c, g, or t
ttattcaggttgtttgtcagccattagtctaaccataacagccttttgagcatgaagtctgttttctgcttcttcaaagatttcatcagcatgagcttcaaaaacatcggcagtaatttcttcacctctgtgagcaggtaggcagtgtagaaccatacaatccttgtttgtcttttccattagttcagcattaatctgaataccggcaaatgccttttcacgaatagccttttcttcttcctgacccattgatgcccatacatcagtatatacaacatccgcattttcagcagcctttagagggtctgttgtcatttcaaacataccagggtaattgcctgcaaagtcaagaatgttctttggaggttcataacccttaggacaagcaatagcaacgctcataccacactttaagcaaccaacaataagtgagttagccatattgttaccgtcaccgataaatgctaacttaagaccctttagcttacccttaaattcacgaattgtcataaggtcagctagcacctgacatgggtggcaatagtctgttaaaccgttgataacagggattgaaccgtattcagcaagtgcatcaacttctgcctgagcaaatgtacgaatcataataccgtctagcattcttgaaagaactcttgcagtatcttctacaggttcacctctgccaatctgtaaatcatttgatgacaagaatagtgggtggccacctagctgatacatacctgtttcaaaagaaactcttgttcttgttgatgacttttcaaaaatcataccaagtgttttaccctttaggtgatgatgttcaataccatgctttagttcatactttagctgatcagcaaggttaagaatatccttaatttcttctgttgatagactttcaagtgttaataaatgcttcatcctttattcctccattaccttctttagtatagcaagtgcttcatcaatttcatcatacttaatatttagtggtggcaacattcttagtaatgtttttgcagtgattacaagaagaccgttttctgtacatttctttgcaatatcacctgcgttaccctcaacttcaataccaatcattaagccttgttgacgaactgacttaacacctttgattttttctagtttttctttaaagtaagtacccttcttatttacttcttcaataaattcaggagtgtttactgtatcaataatatagttagcaccggcacaaacaacagggttactgccaaatgttgtaccgtgagttgatggacccataacatcctttagtttgtcgttaaccatacaaattccaataggaagtccaccaccaagaccttttgctgaagttacaacatcaggcttaatgccactgtgcatatagccgtaaannnnnnnnnnaaagtttgcctgtacggcaaacacctgtctgtacttcatcaacaataagcaaaatgtctttttcatcacaaatctttcttacctgttgtaaatattcaaagtcaaggatatttacgccaccctcaccctgaactgtttctagcataacagcacaagttttgtctgtgattgtatcttttagactttcaatatcattagcaatagcattatcaaagccatctacaaatgggaagaagtaattatggaaaacatcctgacctgttgcagacaatgttgcaatagttctgccatggaaactgtttaccaaagtaataatatggtctctacctctaccgtatttatcaaatgaatattttctcgcaaccttaattgcacattcatttgcttcagcaccactgttgccgaagaatacctttgaaagtcctgttgccttagttagcttttcagcaagaacaccggcaaccttattgtagtaatagttactaatgtgctgaattgtaccggcttgttcactaactgcctttacccaaccgtcatcacagtaaccaagacagtttacaccgataccggaagaaacatcaatatatttcttaccgttatcgtcataagcatacacacctttacctttagttagacaaacatcatatctgccgtatgtatgcataatattttcattatctaattctttaatctttttattatccattgtaatcaatcctatcaatcaaatgagaatacatcaatgtcatccctctttgtaaagcccattgctttccaaaaaggctgacctagttgattgtttttgtaacagaaaatgtgagttttcttaataccggcttgttttattcttttgtcagcctcagtagcaagacttctgccaacacccattctacggtaatcagggctaactgccatatgatgaataaaacctcttctgccgtcatgacctgcaagtacagtagcaataatcttaccgtcaactatgccaacaagcgacatacccttgttgtgttcaaggtactttgcaatattttctctactatcggcatcagacaaggctctctttgttgttacttgccaaagagcaaaaatctcatcatagtcttcaattgtcatttctctaatctgtaaattatccatatatatttccttattaatagaacattgtaccgataccttcatcggagaacaattcaataagaatagaatgttcaattctaccgtcaataatatgcgctcttgatacaccttgacgaactgcctcaacacaacaatcaatcttaggtatcataccaccactgatgatgccttctctctttagctgactgacttcacttacatttactacagagataagtgaatcttcatcatccttatcttgaagtagtcctctaatatcagtcataagaataagtttcttagcaccaatctttgatgcaatatgggcagcagcaatatcagcattaatgttatacacattacccttatagtcaccggctacagttgcaataataggtacatagccgtcactgatagcatcgttaataacttcactgtttacttctgtgatttcgccaacataacctaggtcatcacctgtaaccatcttttcagccataagcatattgctgtcaagaccacaaagaccaatagccttaccacctgcatggttaaggtgctgagttaagcttttgtttaccttaccggctagaacttgctgaacaatatccattgtttctttatcggtaacacgcataccgttaatgaatttactttcaatgccaactcgttttagcattgaagaaatttcaggaccaccaccatgtacaagaacaacatttacaccaacaagttgcattagtacaatgtcactcataacagcagcctttaaatcttcgttaagcattgcattgccaccgtattttacaacaattgtttcaccggcatatttctgaatatatggcattgcttgtgtaagcacttttgctgttaaactactatccatttctcaaacttctttctctatcttatttttctaaaacaatcatcttcccataataacggattgctttttatatcaaaattataattatcaggttctatagtcaccgttgatttttacataatcatatgttaagtcgcaaccataagcttcggcaaagccttcaccgtcattaagttcaatgttgataataacagtatcgcaagaaaggactttctttgcttcatcttcatcaaagccaacaccggcaccgttctcgcaaacaagaacctcgccaccttcacttttgaaagtaactttaaccttgctaatgtcaacatccataccactatagccgatagcacatagcactctgccccagttagcatctgcaccaaacatagcagtctttacaagtgaagaaccgataactgtctttgcaacacctactgcatctttctttgttttagctccactaacatcacagataagtaactttgttgcaccctcaccgtctttagcaagttgctttgcaagtgacttgaaagcctctgttaaaccggcaacaaatgtcttgtaatcttcattcttagttgtgatttccttattaccagctttaccactggccataatagcaagtgtatcgttagtagaagtatcaccgtcaacagaaaccatattgtagctgtcctctactgcttccttaagtgcttcttccaacatttttgagctgatagcacagtcagttgtaacgaaagaaagcattgtacccatattaatatgaatcataccactgcccttagcaataccaccaacagtaacagttttgccgtcaatagtcatttccattgccatttctttcttaactgtatctgttgtcataattgcttcggcacagtcagagccattttcgctactcatcattttcttcattaggtaaagtttctgttcaaatggttcaagtggtagtggcacaccgataacacctgttgatgcaacaataacatcatcttcggcaatattaagtgttgatgcacaaagtttgcaaacatctgatgctttcttataaccatcagcgttacaagtatttgcgttaccactgttagcaacaatagcctgtgctttgccgtttttcaaatgttcctgagttactaggatagcatctgactttacaaggttttttgtataaacagcagcagcattacacaaagtgtcgcactttaccatcataatatctttcttagttgtgttaccctctttgataccaccacagatagctgcaccggtaaagccttgaggagttgtgatagttccatcaataaatctaaaatccataaatatacctcattttttatttattattacgattacgccttgtaaagaagtatttgtaaatattagaatgcaggaggaacgatttccaaacctgtcttttcgtctaaaccaaaaataatattcatattctgaattgcttgaccggcagcacccttaaccatattatcaatggcagctactgcaacaagcaagtttgctctcttgtctaggtgaagagaaatatcacagaaattactgtacttaacattgtgaatatcagctacttgaccatcatcaagaagtctgataaagtattcacctttgtaaaaatcttgataaatctttcttagttcttccattgtaatgtccttctttaaaggagcataacaagtagcaaggatacctctgtttacaggtaacaaatgtggaacgaaagtaatagttaccttttcatcagcaaaagaagtaagtgtctgttcaatttcaggtgtatgacggtgacaagcaaccttataaggatggaaaccttcgtttagttcaggatagtggttactctgagaaagtgaacgacctgcaccggtaacaccacttttacagtcacagataatacctttagtgtcaataacacctgcattaagtgcaggaacaagagcaagtggtgagcaagttgtataacaacctggatttgcaataatcttagcacccttaatcttgtcacgataaaattcaggtaaaccgtaaactgccatatcgtgaagttccttgtgtacatattcacctttgtaccattctttgtattcttcttcactctttagtctaaagtcagcacctaggtcaataaacaccttgtcattgtcataacatttctttgcaagttcttggcttaaaccatgtggtaaagcagcaaagataacttctgccttttctacaacatcatctgcattttcgcaaatcatatcgtttatatttacataacttctatatacatcactaattttctgaccctcaaagctaactgagctaatagccacaatttcagcctgtgggtgagttgtaataaggcgaacaagttctgcaccggcatagcctgttgcaccaataattcctaccttaatcataaattaatcctcaatcttctttagcatatcttctgcttgtttcataacattctgtggagcaggaccaccaaaggatgttctgtctgcaacacatttctctaggttgatagcttcataaacaccatcatcaaaagcagaatgtactttcttgtattcttccataggtaaattttcaaggtcagtaccaaggtcaatacatcttgcaaccaaagcacctgtagccttgtaagcatctctaaatgggatacctttcttagttagataatcggcacaatcggtagcattgataaatccaccggctgctgcacttctcattttattctttaacactgtcatagtgtctagcattggagtaaaggaaattaggcacatttttacagaatcgactgcatcaaaaatagcctctttatcttcttgcatatccttgttgtaagctaatgcaatgcccttcatagcagtaagcagtcccattgtatcaccaaatacacgaccactcttacctctgacaagttctgcaatatcagggttcttcttctgtggcataattgatgaacctgtagagaaagcatcatcaagttccacaaacttaaattcccagctacaccacataatcatttcttcggaaaatcttgataggtgtaccataataattgacaagtcacttgcaatttccaagcaataatctctgtcagaaacaccgtcaagtgaattgtttgttggagcatcaaaacccaaaagttctgatgtcatatgtctgtcaatagggtaagttgtaccggctaatgcacaagaaccaagtgggttaatattcattctcttgcgacaatcctgaagtcttgataaatctcttaggaacatttcaccgtaagctaataagtgatgaccgaatgtaataggttgtgctctctgaagatgagtataaccaggcattactgtgtcataatattccttagccttagatgcaataaccttgattaggtcctttagcaaagaaataatctcttctacttcgtgtcttaaatatagcttaatatcaacagcaacttggtcatttctacttcttgctgtgtgaagtcttttaccgtcatcaccgattctctttgttagttcaccctcaataaatgtgtgaatatcttcacattccatatcaaagtgaagtttaccggaaagtaaatcttcaagaataccttttaggccttcaacaatatgaagtgactcctctttcttgataatgcctgtttcacctagcatagtagcatgagcgattgagccttgtatatcttctctaaacattcttgagtcaaaagaaatggatgagttaaaatcgttagttgttttagaaagagatttcttaaatcttccttgccataactgcattgcttacacctctatttttgcaaaattataggtatttttatgtaaaaacaccgaaaaataggagaaaattcatacccctagaaaatgacataaagtccgtatgggtcatacggactttataattacaatttaaagaaatttcatcaattatttgatgaagcccttcttagcacgaaccttgattggaagaccgaataggttgatgaaacctgcactgtcgttctggtcataaacttcgtcttcgtcaaatgttgcaatatcttcatcatatagtgaatatggagaagtaacacctgcatcaataatgttgcccttgtaaagttttagcttaacatcacctgtaacaactgtgtttacctgatcaacgaaagctgttagagcttctcttagtggtgtgtaccactgaccataataaactaattcagcaaaacggtttgaaacaagttccatatagtggaatgtatctctgtcaagtgttagttcttctagtttcttgtgagcatagtaaaggattgtgccacccggagtttcataaacaccacggctcttcataccaacaagacggttttcaatcatatctgtaataccgataccgttagcaccaccaacttcgtttagcttcttaacgatagaaacgccgtccatttcaacaccgtcaatagctgttggaacacccttttcaaagtgaattgtaatatatgtatccttatcaggagcctgttcaggtgatacacctagttctaggaagttagggtcatcatacttaggttcatttgcaggattttcaagatcaagaccttcgtggcttaagtgccataggttcttatcttttgagtagtttgtttctctgttaatctttagaggaatacccatcttttctgcgtattcaatttcgtcttctcttgacttaaattcccaagttctccaaggagcaataatcttcatatcaggagcataagctttaatagcaagttcaaaacgaacctggtcgttacccttacctgtacaaccgtgacaaattgcatcagcaccttcagccttagcaatttcaactaatctctttgcgataataggacgagcaaaagaagtacctagaagatatttgccttcataaactgcatcagccttgattgtttcaaaaacataatcttcaataaattcttttgttaggtcttcaatgtatagcttactagcacctgtcttgatagccttttcttcaaggccgtctagttctgtaccctgaccaacattaccggaaactgcgataacttcacagttattgtagttttcctttagccaaggaataatgattgatgtatcaagtccacctgaataagcaagaacaacttttttaatatctttatctgccatgataatatttcctttcgtcctcaatgaggttaataattaatttatgtttttattatacaccaattatacagaaaatcaagggttatttgcatatttattcaaatttccaataatttgtagaattaagacaacaagtttgcatatacacagaatattgcagtaaatttatacaatcacaacaaagaattatacaaatatatccttattcagcctagattttccttgatttttaaaatgaatatatgcaaattttatgcataattatacatttttaatgtatgttattcattttcttgcaaaagatagccataatgtgatatatttatcttataaaataatcaaaggagataataaaatgtttaaagaaatatctgctaaagaactaaaggaaaacccatttaagcttattggtgatgattggggtcttgttactgttgacactaaagaaaaggtcaatatgatgactgtttcttggggtggtgttggcattatgtggaataagcctgttgcatttactttcattcgtccccagagatacacatttgactacctagaaaacggtgagtactttgctatttctttcctacctgatgaataccatgatgtacacaaaatttgtggttcaaaaagtggcagagatattgacaaggttaaggaaacaggtttaacacctgtaaccgatgaaaaagcaccttactttgcagaaagcaaggttgtactgatttgtcgtaaaatgtatggtcaaagtctaaattccgacagtgttgttgatgaaagtgtattgtcatcatatgcacccgacggtagtgactaccacaaaatgtacatttcagaaattgaaaaggtacttgttaaagaataa

SEQ ID NO: 242 - DNA, 11664 bp, unidentified
  source 1..11664: mol_type = unassigned DNA
  misc_difference 4574: note = a, c, g, or t
  misc_difference 4575: note = a, c, g, or t
  misc_difference 4576: note = a, c, g, or t
  misc_difference 4577: note = a, c, g, or t
  misc_difference 4578: note = a, c, g, or t
  misc_difference 4579: note = a, c, g, or t
  misc_difference 4580: note = a, c, g, or t
  misc_difference 4581: note = a, c, g, or t
  misc_difference 4582: note = a, c, g, or t
  misc_difference 4583: note = a, c, g, or t
ttaaattccaatcattaagccaatattgaacactctctgtataggatagccgagtccatttcctgccatttccggatcccacattttaaacttactgatgacgaacaagtttgaagcgttcagatagaggcgcaagtttctcagaccacacttggtaaatagtttttctggtatggtatatcctacttccaaactctttaggcgaagaaagcgtccgttacgcagccaccaactagatcctcgattattgttatctataatttttgaagctaagcgaggccaaaatgcgtaaatatcgcgattgtcttccgaccaatgatcttctgcaattacttctaataatccattttgatttccaccattgatatggaaaggggttatatttccgggattaatcataaatgatcgccttccaacacctgtaaagaagaagctgaaatctatatttttccatcccatagaggcaccaaatccataattaatttcgggtacattggggaatcccatgcaaacgttatcatcatctgtgatctttccatcgccgttcatatctttatacttgatatctcctgccatatattcaccaaatccctgctctggagagttcgctacatctgccttatcgataaacaagcgttcggcaatcaagccaatattcgcatttgctgtcctaccaattgatgaacgataccattcgttaataggatagccaggctcgtctaccactctcatttcattgtgagcatatgtaaagttaaattgtccttccagccataaaccgttcatgaaatttttctgatatttcattgatagatctacaccttgattgaatgcttctcctatattcgcttgtacttgagccgttaaccccatcgtatttggtatataagatcgtcccatcaggatattgttacgatactgggtaaaatattcagcagttaccgtaaatcccatacctaccaagtcaatagcaagattcatttgcttggatttttcccaaccgattagttcatttggatagcggttaatggaaattcccggcttactgtaattgaataactctccaaaagtatatccccatccactatccgataagtttacgttggagagataaaagaagcggtctttcattgcatcaccaatctggtcattacccactattccataggatcctctcaatttcagactagaaatcttgtcttttataggccaaaatttctcattagcaatatcccatgctgcgccaactgaaggaaagaatccccagcgattgtttttatgaaaacgttcactaccatttagtccaaagttgaattccacaaaataacgggagtcgaaattataagcagcacgtcctgacaagcctaaattacggttaggtaatgactgttctagcgaacctgcattaccagtagaatagtcagagagacgtcctaccagtaagccattaatcgtatgtttctctctgaagacatggtcgtacgtcaaaacagcttccgcatacattttgctgtttaccgtttttccaccttcttcataagtcaaatattcggttccaacagatcctatagagttagggccaccgtcattaaaagggagtaaagttgcatttcctgattcatcaatctgggtataatagtagaatggtgtaaagcgacgtttagtatcaaaataggaataacggtctacatatcccattgctctgaatttcaatccttcagtaataaatttcagatcttgttgaaattcaagctgagcgttgatccttgatgatttggaagattggaaacctgataccatttgggcatacgggttaacgaacaatgattttgtacccggcataagagcgtttccaaataattcatgtttcgaatatgggctcattgaaatcggataagtagccggaaacataacaggattcgaccaaatagcagaattaaacacagctccaccaccatcaattggccccttttgatcatcaaactgtccgtaaacacggatagttgctttcgtagtcgatgtaatatttaatgttgtattagaacgaattgcataattgatcagttttacattattatcaaaaaggtcggaagctccgctttttaaaacaccattatctacatttactgttcctgatacataatattgtgcaatatttcctccaccagatacactcatattataacgttgattcactgtataatctttaaccaattgatcaatccaattattattaggatacagatatggattatcaccattgcgcgtatgctcaatcttattttgcgaataaggaagatttgccaagggatctctagtcaatgcagcttcattggctagttccatataggtaatgttgtcagcaaacttaaaattacgtgtattagaagaaattgaagtctctacacgtgcatcaaatctagctttttctgctttacctaacttcgtagttaccaagattaccccgttagcaccacgtgcaccatatacagccgtggccgtggcatcttttaatacagaaaaagcattgatatcatctggttgtaaacgagctaagtcagtagaactagattcaacaccatcaatcaagattaatggatctaccttaccggctccaaatgaaccaacaccacgaacaaagaattgtgcattgtcctgtcccggctcaccggaactctgataagagataacaccggcaatcttaccttgaaacatcgttgtcagattacttgtcggtcctttcagatcttttacatcaatagtagttaccgaacttaccatactctcctttttttgagtaccgaatcctactactaccacttcttctaacgcttcgtttgattcttccatcacgattttcaagcgtttggtatttgttattttataagtaagattgcgcatacccataaacttgaataccaaaatatcacctaaacgagcttcaatagaaaaattaccattcatatcagtggcaacaccgatattggtaccttctatcatcacatttacacccggcataaaattaccgtctacgtcagttaccacaccaacaattttatcattattctgctgatttgaatacacagaatgattctttcctgcttcatcggcatacaatggagcagcagaaatcagaaaagaagcgatgattgataaaacaaattgtgagaaagaacttttaggaccctgtattctccatttctctttttgcacgatgagaaaatggaaaacatcttcattaattttcaatttccatatggctttcatagtttttaaatttttaaaattagtttttaagatttattggatatgcaaaattagatatttactaattatttaaactgtgttttttgacacaaaaaataatatttttgctaaattcgaaacaaagagcgtgggttcgatataaaatcagaaaatatccagttgcatgccattgataaaatttacctcaatagcgggcttcttttcaaagaaacaataagcagcaatggctgacagatcatttgcaatgaaattttgttgaaagaccgatgttttgaatcctcaatctgtgcgatattctttcatttatcgttggcggtttaaatcaggccctttttcgaagcagaattttatcggttatacttaccaggatattcttcatattgttttttgccttggtaacaagctgtattccattaaggaagaagttctcaaactgcgtctgtccgatatattatcccttgtcgatacataatttctcttttatgttttccagaaacttaccctgcttcaatggttcgcggtcatctacattttcgggagtaaatatgaacttctagatttttttaccattgataatcaggtgaagtttaaatccggagaaccatttcgtgaagtatttatcacgctcagttattctctcaagggttttgtgaatcagtattcactagttacggcagacgggcaatgagttaaatcgataaaattgatacctctgtgcaagttccaacaggactttcttgatgaaaatgctcaatggaagtaataccccctttttcaattctacaaagtggttataggatgcattattggaaaacaggtcattcaggtgtttacaggcatatttcttcgtaataatgcttgaaaaatctgaagccaccgaaataaaatagggtaagaataatcataatttccgtattactcatacggttagttttcttgcgatacttatatttttgtcttcaaacatatatttttcttgttgcaatgtaaataccttgcagaaatcatctgccatacaataaatctctgtaactttagtttatgagaacatactggtaatcgtttaaatgttataattgagcactataaacttaatatctttattgctatatatctaatttttaatgatatctttattctattatatcgaactcacgttaagatcagcattcaaagagttgtctactggtgctagtgtgacttcagaggatgaaaagacatcagatgagtcaatggagaagtgataattgtagcgataacgaagatttgatttggctgtttaatgaacagagaaacggttccgaggnnnnnnnnnnaccgtttctctgttttttatttctcatcgttcttgcgaatctccacacggcgaatcttaccgctgatcgtctttggcagttcgtcaacgaactcaatcacacgcggatatttataaggtgcagtcactttcttaacatggttctgcaattctttgatcaattcttctccggcgcgtgctttatagtctttagacaatacgatagttgctttcactacctgtccgcgaatctcgtcgggcactccggtaatagcacattctatcacggcagggtgtgtcatcaaagcgctttctacttcgaaaggaccgatgcggtaaccggaactcttgattacatcgtctgcgcgtcctacaaaccacaaatagccgtcttcgtctttccatgcaacgtcacctgtgtagtaaatgccgtcatgccaggcttcgtgtgtacgttccgcgtcgcgatagtattctttgaagagtccgagaggtttgcctttgctggtgcggattacgatctgaccttgttctcccgcttctacagagcggccttcgttgtctatcaggtccacgtcatattgtggattgggcaatcccatacttcccggtttcggttccatccaaggcatggtagctactgtcaatgtcgtctcagtctgtccgaagccttccatcagcttgatgcctgtcagtttcttgaaagtctcgaatacggcagggttcagagcttctccggcgatggtgcaataccgcaatgaggacagatcatatttggtcagatcttcatgaataaggaaacggaagatagtaggaggtgcacagagtgaagtcacctgatactcttgtatcttttccagaatagctgcgggggtgaacttctcatggtcgtaaacgaagatgtttgctccggcaatccactgtccgtagagtttgccccatactgcttttccccaaccggtatcggcgatggtgagatggagactgttctcgtccagattgtgccagaagctaccggtaacgatatgacctaacggataggtaaagtcatgcgctaccattttaggttcaccggtagtaccggaggtgaagtacatcagtgagatgtcatcattcgtattggcatgtctcggacggacgaatggagcagcgttctcgatgccctgatggaaatcttcgaatccttccggaacttccggacctacactgactaacttttctacgctcggacactcaggaagagcatctttgatgtgttgcaatacgattccttcaccggcagctacaatcattttgatgtcggcggcgttgcagcggtagatgatatctttctttgtcagcaggtgggttgcaggaataactgtggctcccagcttatgcaaggcgatggtgctgtaccagaactcgtagcggcgtttcagaatcagcatcaccatatctccgcgaccgatgccgaggctctggaagtaagaagccgtcatgtccgtatagcgtttcatgtcggcgaaagagaactggcggctttcgccccggtcattggtccagagtaaggcattcttgtcgggttgttcggctgcccaggcatctactacatcgtaaccgaagttgaagttctccggaacatttattttcaggttcttgataaaatcctcttgtgaggcaaagttagtctttgctaaaaatctttctaccataatgttattacataattactgccagaaaacgtaccgttttgccatcgagcgctttcatgccatgtggaagttttgagttgaaatagatactgtcaccttggttcaggataatttccttaccttcaatgttgataagcatacgcccttcgagcacaagattaaactcttgtccgttgtggtggttgtaatgaataggctcgtcgtctcctttgggttcgacagtaacgatgaacggatcggctgtgcgattcataaaaccggctgccagtgattggtatttgtaggctctggtgcgttcgatgctcgtgcctttgccggcacgggtgacaaagtaactgctcattttcggttcttcgccaaacatcagtgcatccagtgcaatgttataggtgcgggctatcttttgtaacatgctgacggaaatgtcgtaatctcctgtctctgcgagccggtattcctcggcagatatgtcacagtcgcgggcgatgtcttcagacgttagttccagtacgtcacgtaatccgcgaagacgctctgcgatttgtttaatttgatcattcatacaagtggttattttttataattaataattttgcggtattatttggatgccttcatcgccttgataacggcggaagtaaatccgttgtgctccagttcgttgattcctttgatggtgattccgcccggagtggtcaccttgtctatttccacgctgggatgagtatcattattcagaattaatgcggcggctcctttgacagactgggctaccatctccatggcatctttaggacggatgcccatttcgataccggcttgcatggcagcctggatgtatttcaatacataagcgatgccgcaggaagtcagtgccgtggtagctgctatcttttcttcggggatgagcatagacattcccatttcattgaacagccggagcatgaactggttttgctcatcgtttgtgttgcgtgctgcgataagcgtcatgctttccagttcgctgatggcagtgttggggatgaggcggaacatcggcatttcgggtgctatcacaaagtgtgcaagctcttcaaagctaatgccggctgctacagagacgagagtttgtctgctctttagcttcagctcacgcatcaccggttccatgaaccatggcttgaccgccaaaatgacaatatctgctcctgcagcagcttctgcgttattctgagttgtggagatgcccggaaattcttctttcagcttttccagtttgcctgcgctgggattggatacaatgatatctgagtctgctatcagacttccttttgccaggccgcgggctatagaaccacccatgtttcctgcaccgataatagctattttcatatgcgcttattttttatggattcttacagacaaaggtaacggtaaattgcgaaaaaacaaaaagcagcccggataagaaaaatatttctgtatgaggctgcttttttgtcggctgtttattaatcaaatgagcgatcagagtactctcttgaagcgggcaaggaattcgtccgcttcctccatgctgaggcagagagggggtaacagacgaagtacgtttgtaccgcttgctcccgtaaatacatgctcatcatagatgagtcggctgcgcagttctttgatcggttcttcaaattcgagtccgatcatcaacccgcgtccgcgtacttctttgatttgcggaaatttcttgagttcttccagcaggtaattaccgactttagcggcattttccaccagatggtcctgttcaatcacatccattacggcaagagctgccgagcatgccaggtgatttcctccgaatgtagttcccaattgtccgtagacgggtttgaacatcggactgatcagtacacctgccatcgggaatccgttaccgatacctttggctacagtgataatatccggctggatatgattgtattggtgagcaaagaatttaccgctgcgaccgtatccgctctgtatttcgtccagaatcaggatcgttccggtttcggtacaagcgttgcgaagttcctgcatgaattcggtagtcggtattttgataccgcccactccttgtattccttcgatgataacagcgcatacgtctccttttgccagttcctgtttcatcgcctcgatatcattcaagggaagataggtcacatgtccgttgttattgatcggagcaatgatggaaggattgttcgtagcctctactgccaacgaagtacgtccgtggaaagccttgctgaaggacactactttggtacgtccgttatagaaagaagccagcttcagcgcattctcattggcttcggctccgctgttgatcagaaacagggaatagtcttcgtaaccggagatttttcccagtcgttccgctacctgttgttgcagcttattgatcaccgaatttgaatagaaaccaagggttgctacctgattgctgatcatctccacatagtggggatgcgcatgtccgatggaaatgacggcatgacctccgtaaaggtccagatattccgtaccattctcatcccataccttacagccttgtcctttgactatattgatgttatataaaggatatacgtcgaataatttcataattcttctgtttttagaaagcggaaggtttcagccgtaatcctacggtttcttccaggttgaacatcaggttcatgttatgaactgcctgtccgctggcgcccttcagcaagttgtcgatgcaggagataatcaatagtttgtcaccatgtttctccaggtgtatcagacatttatttgtatttacgacttgtttcaagtctatattcttatctacgatatgaacgaaggagtctttggcataatattcttcgtacatgcgaatgatctcttcgagtgctactttggttttcacgacaagagtggcaaagatgccgcgtgggaaatcgccccgataagggataaagtcgatttctgaatcgaagctgttttgcagctgtttcagtgattgcttgatttccggcacatgctgatggtcgaatgccttgtagatgctgatgttattgttacgccagctgaaatgactggtagcaccgggtttcacgccggcaccggtacttccggtgatagcattaactgaaacatcatctgtcaacatcagattcttggccagcggaagcaaacctagctggatgcaggtggcaaaacaaccggggttggctacatgcttcgccgtacaggtagcacggcggttcagttccggcagaccatagatgaaatcatgatcgtcactcttgatacgataatccatcgagaggtcgatgatcttcaaatcttccggcacgttgtggctttccataaatttcttcgtgtcgccgtgggcagtacagaagaaaagcacgtcgatagcgtccaggggtaactggtcggtaaatctcaggtctgtttctccgtatagtccttcgtgtacgtcggtaattttgtttccggcattactgctgctgttgataaatacgatttcagtttccggatggttgagcagcagacggattaattcgcctgctgtatatcctgcgccaccaatgattcctgctttaatcatatctcttcgtctttatggttattgtagtaaacacgtagcggagtagaagtcaccttaataaagcctttcgcatcttcggctgtccagcctttctgcatctcgccatattcgccaaacttcgttttcacgaggtcatcttccgattctacgccaacggtagagaaagaaagcggacggagttcgaggattgccgtaccgttaacgttacgttggctttcctgaagcatagcttcgatatcacgcattaccggttcgagatactggctttcgtggaggaacattccgtaccagttggctacctgatctttccagtattgctgccatttgctcaatgtgtatttctcgaggaagcggtgggcaccgataatcaacatcggagctgctgcttcgaaacctacacggcctttgataccgataatcgtatcgcctacgtgcatatcgcgtccgataccgtatgccgcaccgatttcttctactttttgtatcgctttgatcggatcgtcgaatgtttcgtcgttgacagctttcagttctcccttttcgaaagtgagacggagttgttcgctgccttctttttccacatgtttcagataggctgtttccggtaatccctgtgcggagtcgaggatttcgccaccacagatggatgtaccccacaaacctacgttataagagtatttcagcttggtaaagtctgcactgaaaccatgtttgttcagatagtcgatttcttcctgacggctcaatgccatatcacgggtcagcgtgatgatttctacattcggagccagtacaaggaaagtcatgtcaaaacgaatctggtcgttacctgctccggtagaaccgtgggcaatggcatccgcaccgatttcgttggcataacgtgcgatggccaacgcctggaagatacgttccgagctgacggagatcgggtaagtaccattacgcagcacatttccgaaaaccatatatttcagactcttttcgtagtattcctgagtaacgtccagcgttacgtatttcaccgctcccagtttataggcattttcttcgtttgttttcagttgttcttcgctgaaaccacccgtattggcacaagctgcatatacttcgtaacctttttctttggcgaggtacatgacggtgaacgatgtgtccagtccgccgctgaatgccaccactacttttttcttcttttcttccatagtgtgtatatattaaatgttatttctttcttgttctttttttatgttccgcgggtctgtcggatcgtacagcatggctgtgcagatgcagaacttacggtttttagccaccagtatatcgtggttggtgcagccttcgcatcctttccagaaagcctcgtcgtctgtcagttcattgaaagtgacggggacatatcctagttcggtgttcattttcatcactgcggctccggatgtcagactgaaaatcttagctttcggccatcggagacgtgccagttggaaagatgcttgtttgatgcgctttgccaatcctaatccgcgaaaatcgggatgtacaatcagaccggaggttgctacgtattgcttgtttccccatgattcgatataggtgaaacctgcgaatgtgtcgccacagagcgcgattattgctttgccctctttcattttagtcgctacgtattcgtgtgtgcgctctgcgattccggttcctcgtacggcagcagcatttctgatagtttccaaaatagtgtcaacgtaaacctcatgtgaggcgtcggctaccataacatctatttgttgagtgtccat

SEQ ID NO: 243 - DNA, 7403 bp, unidentified
  source 1..7403: mol_type = unassigned DNA
ttattttatggcatcgagtgcgtttgagatatctgcaatcaaatccaccttgtcctcaagacctaagcttattctgataagctctgccggcactcctgcttccttaagctgctcatcattcatctgacgatgcgtgcttgttgccggatttaagcagcaggttctcgcatctgccacatgtgtctctattgcaccaagctttaatgccttcataaatgcagacgctgcctctctgccgccctttaagccaaatgatacgactccgcagcctccgtttggaagatacttctgtgctctctcatagtatttgtttgaaggaagccctgagtagtttacataggcaacctttggatgattttccaaaaattcagccactgcctgtccattttccatatgctttggcatacgcacatgaagtgactcaaggccaagattcagcataaatgcattctgtggtgactgcatagaaccaaaatcgcgcataagctgtgctgtacatttagtgatgaacgcaccttccttgccgaatttctctgcatatgttatgccatgatagctgtcatcaggtgtgcacagtcccggatatttatctgcatgtgccatccagtcgaatttgccgctgtctacgattgctccgccgagtgtggctccgtgtccgtccatgtactttgtggtagagtgtgtgacaatatctgcgccccactcaattggtctgcagtttacaggtgtagggaaggtattgtccactataagcggtactccgtgctcgtgtgccacctttgcaaaaagctctatatcaagcaccgtaagcgcaggattggcaatagtctcaccaaacataagctttgtgttcggtctgaatgctgcattcagttcctcctctgtagcatcaggagatacgaatgtagctgtaatacccatctttgccatagttaccgcgatgaggttgaaggtgcctccatagatggatgatgatgccacgatatggtctccgcactcacatatgttgaacatggcatagaaattggctgcctgtcccgatgatgtgagcatggcagcagtgccaccctccatagctgcgatttttcttgctaccgtgtcacaggtcggattctgcagtctgctgtagaaatagccctctgcctcaaggtcaaaaagctttcccatgtcctcgcttgtgtcatatttgaatgtagttgactgaataatcggaatctgtctcggctctccgtttccggctgcatagcctgcctgtacacactttgtacctatactgtattctttcattgtgcttctcctttattatgttaatgtttcggttggatatagtatattacatttggcgcgttttgacaaattcagattatataacttttgtcaccataaattcttatgctttataacatattgtatctaccagtgcttcatagctgctgtcatcagcttgcagtatctctctgacattgtgctgctctaatgctgctgtcgttttttcacctatcgagtatgctgtttccacgtatgtattctccggcagcatatgaaaaaatctttccacatttgatgcgcttgtaaaaacagcttcacttaccatgtttccaatgctttcaggaatactctcatatgcctgctcatttacatatgcatcaattttttctaattcacatatttctttaagccctgcctcaaggtcaggtgaagcctcctttgccgagaaaatgcagactttgatttcatcattatcgcccatatacgaactcaattctcctgcaagtccttttccggtctgttctgccggaataatatctgcctttatatgatgctttgcaagctctttttctgtagcttttcccactactgcaaaccttgcacttgctatcagcctgatgtctgcccctgccagctccagattatagaaaaatgatcttacaccatttttgcttgtaaaaacaatccagtctgccgatcttaccttatcggcaaattcaggaattataactggtttaattatgcctgtcttaaccggtgtgacatctgctccaagctgctgtaattttgctatcaattcgtttgttttgatatatggtactgtgatttttcttccaaacagcggtcttttttcaaagaaatcaagcctgtcattcagtgaaaccacatctcccacaacgattatagccggtgatgtcagctttgcttcctgaatcttttctccgatatccgcaagcgttcctatgcatttgcgttgcgcggcaagtgtaccgttcgatatcactgctgccggagtatccgctcttcgtcctgctttcataagccctgctgcaatgctttttacatgcgcaagtcccatcaaaaatacgcaggtgattgtctcatctgtaagaagggaatagtctatatctgcctcctcatcctttctgctgtgcgcagtgatgacctgaaagccttttgctatgcctctgtgtgtgataggtattcctgcagccgcaagcgctgcaaccgatgaactgacacccggtaccacttctacctccacatttctatctaccaggtagagagcttcctctccgcctcttccaaagacatacggatctccgccctttaaccggactacaagctcatgatattttgatttctcgtacaaaagctcgtttatggcatcctgcttcatgacatgcttgtgattttccttgcccacataaataagctcacagcctgcctttgccattgaaagaaactctggtgatgacagcctgtcatacaccagacaatccgcctgttttatatatttttctccttttaaagtgagcaggcccgtatctcccggtcctgctccaactaatactacttttcctgtgttttctctcatgattttcctaattatttttctactgaattattatgattaaaaattatgacttgatatttttttagtcgatttctaatttataccgaatatcatgcacggcacgctccacaatattgtttctgtctgatgtaatatcccatacctgctctgtccttgcaagcttttttccatcctctgagccaaacatcgcaagaagctttagcctgttatttttgttgctgtcattaccgcggtctttttcacttacaatatcacagtatgcagccacaggcatatgacagtttccaccgattcgctttaaaaattctctctcaatgcctgcgcacagattggttttctcatctgacaaagcatcaagctttgccatcagcttagcattgtcagcacgtagctcaagcgccagtgtgccctgtgccggagccggaatcatatcatcctccgaaaagtactgtgtgatctcagaatctcttccgatacgctttattcccgccgctgcaagtacgattccatccagcctgtattcgttatacttattctgtttttcgttagctatctcattgttatttacagtattatcggcaatctcttcatatataatttcaccatcatatagcttacgaagcctcgtatcgatattcccgcgtatgccaaccaccttaaggtcagggcgcagctttaaaagctgatactttctgcgcttgcttccggttcctatcacggcaccatgaggaagctcatccagtgaagcggcattttttagcaccaaaacatcccttggatcttcacgcttccatgcctttgcaaatgtaagccctgctgccggttcatcaggcatatccttcatggaatggactgccatatgaatctttcccgataaaagctcgtcctctatctcctttacgaagataccctttgagccaatcttatcgagtgcctttttctgctctaaatcgcctgttgtctttatgataacagccttaaaatcatcatccggatatgctctttttaacttatctatcacgtaatcagtctgaacaagagcaagctttgagcctctcgttcctattaaatacctcattttactctcctacggatcatgccattttccatttatcatttataaatgaacaacaacttaaaatctgtaataccatactttaaactatatttccggaatccttccattatcaatagctgcacacaagatttctttaaacacacgctttctctcggcttgagtgtcatattgcgctattactttttcgcggatctgtcccatgtattcgttcagctcaccaagaaacggagtaagaatctcctgctctttgcctttcagatactgagtcagcacagggctgtttcctccgctcgaaaatgccgcaacaagattcttttcctttatgtatgacggaaaaataaagctgcaatcagccttttgatcgaccgcatttaccatgatgtccttagctttgcaatactctgcaatctcatgatttaaagcattatcatcagtggcagcgataaccatttccatgccatcacagtcttttcgttcaaaccttctttctatgaacgtaattctatctgctgcatccgaatccgtcttattgttttctatatttgccgtatatgagcccgttttatcctcgcttgctatatcatcaattgtaagctttctcagctcatcacatatattctctgccacaaccgtgaccttcgcgccaaaatccagcattacaatcaccttgcggtatgccacatttccaccgccgacgatcagacactctctttccgtcatatccacaaacatcggaaaatacgccatttttatctccctgtaataccatatccatactttatttcatatatatttcatgccttattttatactttattatacgctttatgctttattttttgccttatgcttcacactgtatccattgagcattccttcaaaaacaggacgaagcttggcagaaaacactgctgccgatacgcataatataaagtccggtgcaacagttatcagacagtaatctactattacgatgccccagctgacaggtgttgccgcatagaaattcttcatgcagtaaaagtatattgctccaactgtataatatgccaccagtccgaccgttgccggaagaatgagtgtaaacgcattggtctttttaagcttttccgtgatggctccgattaaaaatgcggcaagcacaaagcctaagaggaacccaaagcccggtcttaaaatgtatgtaggaccaccgcctgccgcaaatacaggcactcccaccagtccgatgcacaaatatactattacgctaagcgatgccagctttgccccgagcagaaatcccgccatcagcacaaaaaaccactgtaatgtaaaatgcatggtgtacataggaagcggaatatcaatcttgataaatgctccaactgctataagtgctgcaaaaagtgcacatgttgtaagttcctttgtttttaatttcatttcacacgctctttcgttttattaaatatacatgctataataacatctttctctaaaaaagaaaagccatcttcgatgaagctgacttttctttgcagctttcgctgcgactcaaaacattaacatatgatttagaagtaatattcatcagaatatattcgtaaatcctctttcgtgacctgtccaccctcgatatgaaacgagttgattacaggattttctgccataagcgacattatcatgtagctcgcatttggatcatatgcaagctttatatcctcatccgatggccttgaagggctagacgggtgtgaatgccagttgccaagcggcttaaggccgtttgctctcatgtcctttatggctgccagctgctcctttggatccattgtgaaatggtcctcggcatggtctgtattcgtcaggtaatatacctttgtgatgagacgaccgttttcgtcctcactgcctgctatcagaccgcacgcctcctccggcagatgcgctttagcatattttgctatttcatccagaaacggatatttcattcttatgatactcatatcgttcctttccttactgtctttttattcctgtgtacgaggtgcatcaaatctgcccgctgtctcctcgcagacctcctgctcgtagtcgattggctcgagaatggtcggatggtcgccacagactgcacagttgtgtgtatcctttggaagcttaatcttgtggaactccatggtaagtgcatcatatgtaagcagatatcctgtgagcagctctccaacaccgattaaatacttgatagcctccatagcctgaagcgaaccgattactccgcccatagctccgataacgcctgcctgcttacatgtaggcactgcatcctttggtggcggattcttgaatacacatctgtagcaaggtccctctcccggcacatatgtcatgagctgacccttgaaacggatgattcctgcatgtgaaaacggctttttctcaagcacacatgcatcgttgattaagaactttgccgggaaattgtcagttccatctatgatgaaatcataatccctgataagctctctgatgtttgacgcatctacaaacatacggtatgtattgacctgaacatccgggttcatggcgttcattgtctcttttgctgactttaccttggcttttcccacatcggctgttccgtggataatctgtctctgcaggttggataaatctacctcatccgcatccacaataccgattgtgccaactcctgctgctgcaagatacatggctgccggagctccgagtccgccggcaccgataataagcaccttgccctttaataatttcttctgacctttaacgcccacctcattaaggataatgtggcgtgaatagcgctcgatctgctcatccgtcattgccattagcatccacctcccatgaagtaaaggaactctacattgtcgccatccttaagcactgtctttggcttatcctctgtggcaacaaattcctcatttattgaaactgttacatactcaggcatatctacattctcaagctcgataagctccggtaatgtaagtccatccttatattctttcttctctcctgctactgtgatagtcattttatttcctcctgtgtcacagattgtggtatctgtaagtgttattatcctgtatcagactgctttatataataatctaaaaactataataattcttcaacccatgctttcaaatcggcaggcttttgtgcgccgacctttctgtctaagacctctgcgtcttttacgaaaagcagtgtcgggtttgcagtcacctcatactcatcagcgagctctccgtcaaagtttgtgttgaccttgtatacgtgaagcttatcctcataatcatcctcgatatctccgagaaccggtgccagcttcttgcaggccacacatgaatccgagtaaaaatcaacaattaccggaagcttgctttttaatactttttcatcgaaatccgcctttgaaattcttgctgccat

SEQ ID NO: 244 - DNA, 5604 bp, unidentified
  source 1..5604: mol_type = unassigned DNA
ttatttcagcagatctgcggagataaccattctctgaacttcggaagtaccctcgtagatctcggtgatctttgcatcacgcatcatacgttcaacttcgtactctctgatgtaaccgtaaccaccgtgcagctgaacagccttggtagtaacttccatagcaacctcagcagcatacagcttagccatagcagcttctacagagtaagagatcttaggattggtcttgtactcgtccttcttgcgtgcagccttgtataccagcatcttggcagcttccaccttggtagccatatcagccagctggaactgtgtattctggaatccggaaatggactttccgaactgctttctttccttggtgtaagcaacggttctctccagagcgccttctgcaatacccagagcctgggaagcgataccgatacgtccgccgtccagagtgtgcattgcgatcttgaatccctgtccctgcttaccaagcatattctccttggggatacggcagtcggtgaagatcagctcgtaagtggaagaacccttgatacccatctttttctctttggtaccgaaggtaaatccgggagtacctttctcaacgataaaggaagaaatctccttcatctttctgcctctcttctctacgataccggtaactgcgataacaatatatacatcagcttctttaccgttggtgatgaagcacttggatccgttgatgacccactcgtcaccatctaatacagccttagtctgctgtccctgagcatcggtacctgcaccgggctcggtcagaccgaaagcaccgatcttacggccgcttgccagatcgggaacatatttcttcttctgatcctcagtaccgaaggtcatgataggatcgatacacagagaggtatgtgcggatacgataacgccggtggttgcacaaaccttggaaagctcctcaacacacatagcgtaggtcagggtatcacagccctgtccgccgtactccttgggaacgggaattcccatgaagccgtacttagccatcttctcaacggtctctctggggaaggtttcggtctcgtcaacttcctgcgcaagaggttttacttcgttctcggcgaactctttgaacagctgtctcgccatctcatgctctttggataatgtaaaatccatgatgttaatcctccattgttatttatacttggttgtaattatgaacttagactgtccagagccgtatccggctccgaacagttattttaccttttgcctactgtgcatccacaggagtcttggtgcggtctgcattgtatacatagaagcccttgccggtcttcacaccaaggttaccgccgcgaaccatcttacggatcagagggcatgcgcgatacttgctgtcgccggtctcgttgtacagaacatccatgatggcaaggcagatatccagtcctacgaaatcgcccagttccaggggtcccatgggatgattagcgcccagcttcatagctgcgtcgatacctgcgatatcggatacaccttccatcttgatgaaagctgcttcattgatcatagggatcaggatacggttaacaacaaagcctgctgcctcgtttacctgaacaggggtcttgccgatctcttccgatatcttcttgatggtgtctacggtctctgcgggagtattcacacctgcaattacctcaaccagcttcatacggtctgcgggattgaagaagtgcataccgatcagaggacgggtcagtccgttgccgatctcggtaatggaaaggctggaagtgttggaagcaaatacacactcgggcttgcagatcttgtccagctcaccgaaggtggtcttcttaacttccatgttctcaaatgcagcttctacgatcagatcgcagtctgcacacagatcttccttcaggcccggagtgatcttagctacgatagcgtcaacagcctcctgagtcatctttcctttttctaccagtcttgcatagccttttacgatcttggccttgccgccgtcagcccactcctgcttgatatcgcaaagagctacttcatatccgtctacctgggcaaatgcctttgcaatgccctgtcccatagtacctgcaccgataatacctactttcatggtaaatcctcctgattttatacttttatattcgtaatgattagcagttcttaaaaggctcttttaccttctccttgttcttgtcaaggaagaaagccataccatacttctgatcttctgtctcgaagcagtcaccgaacagcttctcttcgatcactactgcctgatccatatctgcatccaggccttcgttaatagccttcttgcagttgcggactgcgatgggagcattctttgcaatggtggctgccatcttctgtgctgctgccagcattacttcctgtgcactctttaccacattgccgtctgcatctacttctgcgctgtaaacttcgtttaccagaccgattctgtaagcgtctgctgccttgatattgcgtgcggtgtagatcatctgttttgccatgcctgcacctaccagacgagccagtctctgggttccgccgaagccgggagtgattcccagtcctacctcgggctgtccgaagactgcattgtcggaacagattctgatatcacagctcatggaaatctcacatccgccgcccagagcaaagccgttgacagctgcgatcacgggaatggggaaggtctcgatcttgcggaatacatcgttacccttcttaccgaatgcctcgccctctgccttggtcaggctgctcatctctccgatatctgcacctgccacgaaggacttactgcctgcaccggtgatcaccagacaacgaaccgttgccagatctactgcatccaatgtagcgttcagttcatccagtacctgagaattcagagcgttcagtgccttttcacggttaatggtgatggctgccacattgccattctgctcatacaaaatgtaatccatgtttttacctcatttcacatttctattcgtgttttcaaaaccacactaaggcgatagagattctaccgccccagcgaatatttataaaattaatcctcgatcttaacgatggtggagcagcccatgccaccgccgatgcacagagtagccagaccggtcttggcacctcttgcctgcatctcatgcagcagagttaccagaatacggcatccggaagctcctacgggatggcccagagcgatagcaccgccgttggggttcagctgcttatctacatcgatgcccagttccttaccaactgctacggactgtgctgcgaatgcttcgttagcctcgatgatatcgaagtcttcgatcttcataccggtcttagccattaccttcttggtagaagctacagggccgatacccataacctcgggacgaacaccagccagagcgcctgctacgaaagtagccataggcttaacgcccagctccttagccttctcttcgctcataacaacgatagctgctgcaccgtcgttgataccggaagcgttacctgcggtaacgaatccaccgggattgatggcacgaagcttagccagaccttcgatggtagaaccatgacgagggccttcatcggtatcgaatacgatggtctcttttttcttcttaacttctacgggaacgatctctgccttgaaggcaccgttcttctgagcttcttcagcctttaactggctctttaatgcgaactcatccagttcttcacgggtaagtccccactcttcgcagatgttgtctgcggtcttgatcatatgataatcattgaaagcatcccaaagtgcatctttgatcatggtatcaaccatggttgcgttacccatacgatatccgtaacgtccctgaggaattgcgtaaggagccatggacatgttctccataccacctgctactacgatatctgcatcaccggccatgatcatctgtgctgcctggttcacacagttcaggccagaaccacataccacgttcatggtaactgcgggaacttcgatgggaagtccggctttgatagctgcctgacgtgctacgttctgtccctggccagcctggattacacatcccatatatacctggtcaactgcttcgggagcaacgcctgctctcttcagagcctccttgataacgattgcgcccagctccggtgcaggagttgtgcttaaggttccgcccatggtaccgattgcggtacggcaagcgcctgctaatacaactttctttgccatttgtttgtcctccactttttgttttcgtttggtttgctttctgaaatgtagattgttatttttttatcatttcactgtccccattttaacatagcgaaatctgttttgcaatgcttttgtcaaaaaaataacaaaataacaaatgaaatttttagaaatcagaattcccggatttttgtagtgcggatccactctcttgttccctcgactttctgcacttcctgcgtgtgttttgccagaaaacaggtcagcggatagacatcgatccagatctcgttgtcactctctttctgttcttcatcaaagaccagttccaatccccagtgcagatgggttacttctatattatttacattttctgtggtactgtaaccggtatgtcccatataaccgatcacatcccccgccgtcaccacgctgccttcttccagtccttccgcataggggtagttctgccgcagatgtgcatagtaatagtagcgcttattatcaaagctgcggataccaatgcgccagccgccgtactggttccagtccagggcttccacagtgccggactcgacagcaatgataggtacaccgacgagccccatcatgtcatggcccagatgccttcgtttatatccgtagcttcttcccgccccgaaatcatcataatgagtataatcaaatcctctcgcaatggggcaataaccttttaatccgtattttttctgccaggtgctctgtccgtcttctccgatcacctctgcctcgtattctcccaccagtcctcccagtgccgcgctgtaagcttccagataatacggatagtatttcatatctttcgtgagagtttctatctctgcctctccctcagccagtttctccgccgtctcgttcaggatcttcagcgcctttttgtcaaattcccctccggttctggctgcggtatatgcaagcagcgggatccactccacatgatgttccgtgtcaaacgtatccacatcccagtcatatgcctggcagagcgcttcataggatacggtaaagtccacccatttgatataatcctttcccgcagccgaggttgcggtgaccaccgcctgttccatgctttctgtccgtcctgtctcccggagcagaaatgctcccatcattataaatagaagcatcacctctgcccggatccatgcccgcattctcttttctctgtccattccctgtcctgctctcagttcctccttacaggttatgtttctgatttttccggtattcagacaattcgaaaatctccggggcatatcatttcccatacaatcataaccaccggctgagccggtggtttg

SEQ ID NO: 245 - DNA, 10887 bp, unidentified
  source 1..10887: mol_type = unassigned DNA
  misc_difference 2390: note = a, c, g, or t
  misc_difference 2391: note = a, c, g, or t
  misc_difference 2392: note = a, c, g, or t
  misc_difference 2393: note = a, c, g, or t
  misc_difference 2394: note = a, c, g, or t
  misc_difference 2395: note = a, c, g, or t
  misc_difference 2396: note = a, c, g, or t
  misc_difference 2397: note = a, c, g, or t
  misc_difference 2398: note = a, c, g, or t
  misc_difference 2399: note = a, c, g, or t
  misc_difference 7329: note = a, c, g, or t
  misc_difference 7330: note = a, c, g, or t
  misc_difference 7331: note = a, c, g, or t
  misc_difference 7332: note = a, c, g, or t
  misc_difference 7333: note = a, c, g, or t
  misc_difference 7334: note = a, c, g, or t
  misc_difference 7335: note = a, c, g, or t
  misc_difference 7336: note = a, c, g, or t
  misc_difference 7337: note = a, c, g, or t
  misc_difference 7338: note = a, c, g, or t
  misc_difference 8311: note = a, c, g, or t
  misc_difference 8312: note = a, c, g, or t
  misc_difference 8313: note = a, c, g, or t
  misc_difference 8314: note = a, c, g, or t
  misc_difference 8315: note = a, c, g, or t
  misc_difference 8316: note = a, c, g, or t
  misc_difference 8317: note = a, c, g, or t
  misc_difference 8318: note = a, c, g, or t
  misc_difference 8319: note = a, c, g, or t
  misc_difference 8320: note = a, c, g, or t
ttcaaacaaagttatttggaaaagacacataagttctatgaaaagtatggcggtatcaaggagattaagattgcaaaccgcgaagagtttttcgagcgtgattttgagaaacagaatgagatctatacttatgttatcaaacagaactctttcttaagtgcactgccaaagccgatcattgaggcgcttgccatcgcgggtctgatgggaatgattattgtcaagatcgtgatgggaaacacgaacaatgcacactttatcgcagtgcttggtgtattcgcagtggcggcattcaagctgctgccttccgtcaataaaatttcttcctactatgcgtccattatccacaatggtgtcgtgatcgacaagatccgtgatgagtaccgtgatatagaggcgcaccgcgaggcacgtgccgaggcggaagcaagaaaagcagaggagatcccggtaaccctggagaaggaaatccgtgtggaacatatggagtttacttatccgaatgtggaggagccggtgctttccgatgtgaatgttacaatcccgaagaatgcgtcggtggcgttcattggaccgtccggagcaggaaagaccacgtttgtcgatctgatccttggtgttctgactccgcagaagggtgtcatcatgaccgatggtgtggatatccagaagggaatgcgcagctggcatgacaagatcggttatatcccgcagaccatctatatgcttgatgatacaatccgcaataacattgcatttggtgcgaatgaggacattgatgatgagcggatctgggaggcattaaagcaggcacagcttgacgatctggtacgtgagatggaggaaggtctggataccgtcatcggtgaggcgggtgtgcgcctttccggtggacagagacagagaatcggtatcgcgcgtgcactttaccgcagaccggaagttctggtgcttgacgaggcaacttctgcgcttgacaatgagacagaggcagctgttatggaagcaatcgacagcctgcagggcaagatgacgatgctgattattgcgcaccggctgtccacgatccgtaactgcaatattgtatataaggtagaaaatggtagcgtgacagtggatacacagcgccacaaccagtagaccggaggggatggaacgaacatgataatcatagaaccatgtgcaggactgggaaaccgcctgctggcactgacttcagcgtatgaattggcggagaagctgggaagggagctgcttgtcatctggaagagcgagataggctgccagatccggtcagaggagctgttcctgtttgatggggttaaggtgatcaatatcagtgagagtggatggaagcaggattttgccgggacactgcgcggcaatgccgtcaagaaaaaataccgtggcagcgcagaccggtttgtggagtgtgatgaggtagaggtctggaaaaaagagggtggatttgcgcgtgtggaacaggagattgcgaaaacgtcccggatctacatcaaatcctacacaaatctgtgcgagatcacgccggacagcttcaggttcttaacgccttccgctgcggtggaagcgcgtggcagagaagtgtttgcccggatcacaaaggagcggacggtgggggtacacatccgccgtaccgaccacacagatgcgatcgcaaacagcccgctggagttgtttaccgaccggatgaagcgcgagatagaggaaaaggatgccaatttttatgtgacgacggacgatgccagggtcatggacgagttaaagcaggcattttccgcagagcgtctggtaatctacgagaataaggtgcttgaccgtgattccagggagggcatacaggatgccctggtggatatgctgtgtctgtcaaagtgtagcaggatcataggaagctaccggagtacgttcagcctgatcccttcgatcatgggaaatattccgctagagatgatgataaaggattgagaaaatgaaaacgtgtacgatattaggaacagagattgccgtcacgacgatggaagagacggttcgctatatagaggaacacatggaggaactgcgcgggaaatatatctgcgtctcgaatgtgcacacgacggtaacggcatatgaggatgaaagctatcgcaaagtgcagaatggtgccgcatttgccctgccggatggaaaaccgttgtctctttattcaaaaaagcacggattcccggaggcggaacgtgtgaccggaccggatctgatgggagaactgttcgcgagagacaatgggctgactcactatttttacggggggagtgaggcgacgatcaggacactgcgtgagaagcttcccaaagaatatccacatcttaagattgcaggaatggtgtcgnnnnnnnnnngcgccgatgtggatgcagaagttgagcttagagtggttataccgtctgatgcaggatcccaagcgcctgttcaaacgctattttgtgacaaatttcaagttcctgcggctgacacttggaagagggaagaagagcagaggagagaaaaagtcatgacagaggcgaaggcaaagtaccaatacatggatgtggcacgggggctggcattgctgttggtcatgatctcacatgcgcacggactcagcagttttctgatcttttactatatccagatctttttcatcatctcgggctatatttataagcctgggcggagttacagggacaatatccggcgcaaggcaaaacgccttcttgtgccttattttggttacagtgcactgctgtggtgtgcgtatgccctgatccgccgggatatgggagagatgaaacagtcgctgtttggcattttttattcgaggttctgcctgtacaaaaatgcaacgcacacagagaatgtctatctgctggatattgccaacggagcgatgtggtatctgactgcattttttgtgacctgtctgctgttttatctgatcgcagacaagtgtcttgcaagtgcaaagacgatggcggtcacatcggtcgtgcttgttgccgtgacgatggcattaaacgaactgcccattcttcttccgtggagtatggatattgtgccggttgcggcactgctcatgctggtgggagcgtggatgcgcagatatgagttttttgagagaaaatggaatccgctgtggatttttgtgacactggcagtctatgtgggaacggttgtattcaacggcagattaaatatgtccatccgcgagtatggacggtttgacagtttcagcgtacctttttttcttgtaatctcgctgaccggatcaaccttatgtatctggttttgtaaatggatcgggcacacgaaggtagggagcggtctggcatacattggcaatcatacgatcgagttgatgtgcctgcatatgttcggtcttgagatgtttgaggtaatcgcgtcgcatgtcatcccggtacaggaactgacaggagtggcggagtggatttatgtagcagtgcgcgttggcgcagcggtctgcggctccctgctgtttggtgtgggtgtgtcgtgggtcaaaaagaagagaggaaggtagcatggagaaaaaggaaagagattcaggtctggagcttttgcgcatcatcggattgttcctgatcttctggatgcatggggcgagcagttatgtaaacaattcgctgagtgcctggctgtgtattgtgattgagacaatcggaaatgtcggggttccggtctttatcctgatttcaggatatttcgggatccggttcaaacctaaaaaactcctgcagctggatctgatgctgatcttttactgctggaccggtcttgcgctgcgctttgcgtggggagatgccgcagagtatggaatggaacagattctctcctatgtacttccggtcattggtcgcaattcctggtattttacctgctactttgcactggcgattttaagtccgttcttaaacgaatttgtggaaaagctggagaaggagaccttccgcaggatgcttgtgctgatgttagtgatcttttcgggtatcacgacatttctctttttcgatatcacacaggatggcggaaagggaatcgtcaatatgaccctgttgtacctgatcgggcggtatatccgcctgtatcaggatgaaaaggtgtacagccggaaaaaactcatcacggcgtatgttgccatcatggcagtctgtattgcattaaacggggcactgtatgtggtgagtggtacggtgcagaatcggttttcgcgtgacaatacgctctttacgatcgcagcttcggtgtgcctgttcctgctttttaaggatctgcattttcgcagtaaggtgatcaaccgtctggcaacgcatgttccggcggtctttacgatggagtggacgctccgcggagtggtcacggcgtacatgttcgactatctggcgtggagggagagcaactggcatgagctgatcctctttggggtatgcttcctgctgcttgccatgggaaccgtgatcgatgaactgcgtgtactcctgctcgggcgggcagaggaaaagcttgcagatctggaataccggggacttaccaccgtctgcggtactctgaagcggtgcatccttcgatttttttaaaaactttattaaagtaactggcgtcatcaatgccacagtgctgtgcgatggtttcaatggaatcgttgctgtaacggagcagctctttggcattggtgattttttttgtcagcagatactggatgatcgttgttccgaattcttttttgaactccctggaaagatagtacttgctgatatagaactggtcggcaagctgatcgagggagatattttcggtatagtgttcgttgagatagcgaagaatatccttaagcttgacggacagcggggagtcatcggcggactcgcgtggcgcatctgtgcataaggtggtgaggatggatacgatctgtgcggcagtcagaaggtcggcatcgtccgtcttttcttcatgcagcgtaattacgttctggattgtggaggtgagttctgcgaggtggctgcttttaaaatgccagtcgtgctgctcgcggaaacagctgtagtatgcggctgcgtttggaccgtaaaaatggatccacagaagctcccaggggtccgcctcactgctgatgtgggtgtattcgccactgcaatctaaaaaaaagcagtcgccggcacgggcagcgacgcgggtcagaggatgtttggcgtcctgggggctgtcggatgcaggaaaaaggtgggagcctgcggtatcccggtaggagacactgccgctgccggagagtacgatcagaaagaggtaggaggagagaccgctccgccggcttaagtgcggccgcagactttttaagtaaccggcctcctggatgtagagaaagttgcttttgataaaagaagaaggggtattgataacacgtctggtgttggtgacctcggaggtcttatatttttcaaaaaaagagtcccgcatctgtattctcctaatttttgcgtatagcaatataatactatttttgggcaagatattcaatggaaaaaaaacgtggattagattattcttagtaacggctttcaacgcgcatattagcaaaataatcatagaacaaagaaaaaggagaatctagatgagtaaaaaagcattgatcacaggtgtgaccggacaggacggaagctaccttgcagagtttttgttagagaaggggtatgaggtacatggtatggtacgccgttcttccacagagaagagagagcgtatcgaccatttggagagcaacccgaacttccatgtacactacggcgatctgtccgattccatgagcatcatgcgcttagtgggcatgattaagccggatgagatctacaacctggcagcacagagccatgtaggtgtcagctttgatgtgccggaatacacagcagatgtagttgcaactggtgtgctccgcgttttagaggcagtccgtctctgtggtctggagaagacctgccgtatctatcaggcatccacatccgagttatacggaaaggtagaggaagttccgcagcgcgagacgacaccgttccacccgtacagcccgtatgcagtggcaaagcagtatggctactggatcgtaaaggagtaccgcgaagcatacaacatgttctgctgcagcggtatcttgttcaatcatgagtccgagcgccgcggtgagacatttgttaccagaaagatttctctggctgcagcaagaatcgcgcagggcaagcaggacaagctgtatcttggcaatctgtcttccttacgtgactggggttatgcaaaggattatgtagagtgcatgtggctgatcttacagcatgagaagccggaggatttcgtgatcgcaaccggtgtacagcattccgtaagagaattctgtgagtatgcattccgtgaggctggcattgaactggagttccagggagagggcatggatgaggtcggtatcgacaaggcaaccggcaaggtagtcattgaggtatccaaggagttctaccgcccgacggacgttgtcaacctgtggggagatccaaccaaggcaaagaccgagcttggctggaatccgaccaagacaacattcgaggagctggtaaagatcatggtaaagcatgacatggagcttgtggcaaaagaaaactaaaacaaatgtatgacgatacagtatttggcgtgccatggcaggattggggcacgccaagttgtggtaaaaaggagagaaagattatgatggaaaaagatgcaaaaatatacgtggcagggcacagaggaatggttggctcggcgatcgtgcgccagcttgagaaggaaggctatcacaacatcattacccggacacacaaggagttgaacctctgccgccaggatgatgtggaggaattttttgcaaaagagaagccggagtatgtcttccttgcagcggcaaaggttggcggtatcatggcgaacagcgaagctcttgccgattttatgtatgagaatatgacactggagatgaacgtgatccatgaggcatggaaaaatggctgcaagaagctgatgtttctcggatcttcctgcatttacccgcgtatggccccgcagccgatgaaggagagctgtcttctgaccggagaactggagaagaccaacgaggcatatgcactggcaaagatcagcggtttaaagtattgtgagtttttgaataagcagtacggcaccgattatatttctgttatgccgaccaacctctacggaccgaacgataactaccatccggagcacagccatgtccannnnnnnnnncacacagtcatgtgcttccggcgctgatccgccgtttccatgaggcgaaggtggcaggagccaaagaagtaacctgctggggaactggaacgccgctgcgtgagtttttgtatgtggatgatcttgcagatgcttgtgtattcctgatgaacaactacagtggtgatgagacggtcaaccttggaaccggcaaagaacttacaatcaaagaactcacagagcttgttgcaaaagtgatcggttataccggagagatcaagtgggatccgagcaagccggacggaacaccgagaaagcttctcgatgtcagcaagttagagagcctcggctggaaatacaagacggagcttgaggatggaatccgccttgcatacgatgatttcctgaataatccaatgagagccgagcgctagaggggagaaccatatgtatatagtattgttatcgggcggctccggaaagcgtctgtggccattgtccaacgatttatgttccaaacagtatatcaagctgatgaatcatgataatcaaaaggagacggcagaaaagtgttcgatgctgcagcgtgtgtttggccagcttaagaccgcgggactttccgacaacacgatcgtctgcgcgagcagtgcacaggtggagctgattgagagccagcttgacggggctgcagaggtggcagttgagccgatgcgccgtgacactttcccggctgttatgttatcctgtgcttatcttttgtctaaaaagggagcgaaggaggatgacgtcgttgcatttcttccggtcgacccgtacacgacaggagagttttttgaccggattaagcgtctgggagagtatattgcatccacagagaatacgattggactgctcggcggtgtaccgacgtatccatcaaccaaatacggctatatcgtgccggagaagagtgggcaggagctgcttaaggtcgaaggcttccgtgagaagccgnnnnnnnnnncgggatgaggcaactgcggagaaactggtcgcagacggggcgctctggaactgtggtgtgttttgtttccagttatccatggcagccggctggcttacaaagtatggtgttggcacggattatgaccagatggtcactgattatgagaagcttccgaagaaaagttttgactacgaggtgttagagcactgggagcgcattgttgcgattaaatatgcagatctgtggaaggatctgggtacatggaatacactgaccgaggaaatgccggagaacagcatcggtgatgtgacctgggatgatacctgcgagaacagccatgccatcaatgtgctcggcgtgccgatggttgtgatgggagcgaaaaatatggtgatcgcagcatcccatgatggtattctggtggcggacaagcatcagagctcctatatcaaggattgtctgacgaacattgcggacacttcaaagtatgaggagcgccgctggggtacgatcaagacgatcgacagtgatgaggatgacggcattaagagtgtgacaaggcgcatcaaggttgttgcaggcaagacgacaccggagcacaggcatctgtcccacacagagacaatcacggttctctccggaatgggaaaattgatcttagaaggtgtggaagtagatctgatggcaggagcgacagtcagcattgcagccggcaaacggcatgcaatcaaggctatgggttcggatctgcgctgtattgaggtgtcgatcggtacggacgagaagagtaccttggacgatgagattataggataaggacggcagaacgatgaatatattactgacatccgcgggaagacgcggttatcttgtcgaatacttcaagaaagcactagaggggatcggggaagtgcatgtgggaaacagcacaccggtttccccgagcttttactatgcagatcatgcagttgtgacccctctgatttacgatgaggcatatattccgtttttgctggattactgcaaaaaaaaccacattgatgcggtactgtccttgtttgacgtggatctgtatatgctggcacagcacagggaagagtttgcaaaagaaggcatcagggtaattgtgtccgcaccggaggtgatccgtatctgcaacgataaatgggagacataccagttctgcaggaaaaacggttttctgacaccgaagacctggctgcatctttcggatgtgaaagctgcactggaggcgggggagatttcctatccggtcatcatcaagccgcgctggggcatgggatcgatcgccatctatcaggcagagaatgcagaggaactcgaggtattgaccaaaaaggtcacgcgggagattttccgctcctatctccggtatgaatcagcgttcgatgaggaggaatgtgtcctgttccaggagatgatccatggacaggagcacggactggatgtgatccacgatctggacggagcatggcagctgacggtcgtgcgtgagaagatcgccatgcgttcgggcgagacggactgtgcgagagtgctgtcggatgagaggattgcatcggtaggaactgctgtcggcaaggcgctgggacatatcggaaatctggatatggatgtgtttgtgaccaaagatgcggtctatgtacttgaactcaacgcgagatttggcgggggatatccgttttcccatctggcaggcgtcaatctgccgaaggcgattataaagtggctttcgggtgaggcacttacagatgaacttgtggtaaagaaaacaggtctttatgcacagaaggatatccgtatgatcgatatcacatcgtgtgtaaaagaagacggaaagtaaaagtatggaaaaagaaacaaaatatcaacagtcctatgtgacaccctgctatgagatcaatcttgagcagtttcacgaaaactgtgatgctgtgatgcagccgtttgaaaaagcatgggatggaaatgtggcatacggttactcggtaaagacaaaccatcacgaggcactgatgcgctatgccgcggatcatctgggatggtatattgagacggtttctgtgaatgaatacgagcaggccagacaactggtgcctgcggagcggatcatattcaatggaccgtgcaagcaggaacgtctgctcacagtctatgagcagggaggaatcctgaatctggataaccccacagaagtagaacagctgtgtgagacggtaagaaacggagctgttccatcagaacacacacaggtgggacttcggatcaattttgatctggaggcacagtgcccggatgagacaaccgctggtacagaggtcagtcgttttggcatctgctatgaaaatggtgatcttaagcgtgccatagaccagcttggggaggcgggtattgccattgacggcatccatctgcacaccagcacaaagaccagaagcacccgtgtttttgcggcattggcagggatggcggtgaagatccgggaggaatatggactgtccttaagttatgtggatatgggaggcggctattttggcggacagaaggtcaccggaaagccgacg

SEQ ID NO: 246 - DNA, 8087 bp, unidentified
  source 1..8087: mol_type = unassigned DNA
ttagtttttctcagccaattctgctttcagcatttctgtcaactgaggaacaatcttattcaaatcgcctaccaaaccatagtcagctacatcaaagattggagctgtctcatctttgttaatagcaacgataatgtcagattcttccatacctgcaacgtgctgaatagcaccggaaataccaattgcgaagtatacgttaggacgaacggttttaccggtctgtcctacctgacgctcaaccggaagccagccattctctacaacagcacgggaacaacttactgttccgccaagtacatctgccaaatcctgaagaagtttgaagttttcttcgcttccaacaccacgaccgccggataccaaaatcttagcatctgcgatatctactgtgtcagctacagacttcacaacatcaagaatctcaacatatttattgtccggagtgaatcccggattgtactcgattacttcagcttttgcacccttaattgggtcaatcttctgcataacaccggcacgaacggtagccatctgtggacggttgtatggacatgcaatcgtagcgattgtattaccaccaaacgcaggacgtgtcataagaagctgatttggaatggtctcctttgtcatgttatcggtgaaatcaccaatctcaagtactgtacagtcagcagtcagaccagttgctacacgtgccgatacacgaggacctaagtcacggccgattgctgttgcaccaaccaacataatttcaggtttgtactcattgattacagaagcaagtgcatgagcatatggctctgtacgatatacttcaagttctttgtcatccactacgattactttgtctgcaccatactcagccaaagaatctgcaaggtctttaacaccgtaaccaagcaaaacagcggtaacttctgcgttcaaatcttttgccagatcttttgctttaccaagcagctcgtaagcgattccgcttacttctccgtctacctgctgtgcaaagacatatacacctttatattcttctaaactcatttttttcaccacttttcctttataataattagattacatgtttctctttaaacttatctacaatatactgagcagcttctgttgggtcaagagtaacgacttcgccggcacctttacgaaccttatcggaagctctagcaatctttgttggagatcctttcaaaccaaggttagaatcatctacatccttaaggtctgcacgtccccaaacggtaatctctttgtcaaatgcgtccatgattccgcccggagtcatataacgtggctcattcaactcagaaagagcagtgatcaggcaaggcattttagcctttactacatggtagcggtcctcatactgacgctcaacgattacgctgtcaccttccactttgatattctgtgcataagagataaccggaatatccaagtgctcggaaatctgtggaccaacctgtgcagtatcaccatcgatagcctgacggcctgtgataatcaaatcgtaatcaatgttacgaagtgcaccggcaattgttgtagaagtagcccaagtatcagcaccaccgagtacacggtctgttacaaggataccattgtcagcgcccattgccattgcctcacgaagaacttcttctgcttttggaagtcccatggtaagaacagtaacttctgcacctgtttcttctttaattctcagtgctgcttccaaaccggctttatcatccgggttcatgatggtaagcatcgcacctctattcaatgtaccgtccgggttaaatacaacaccgcccttagtatccggcacctgtttaatacatactactattttcacgagagcacctcctatttcaataagctgccagagataaccatacgctgaacttctgaagttccttcgtagatttctgtgatttttgcatcacgcatcatacgctcaacgtcatattctctgatgtagccataaccaccgtgtaactgaactgcttttgttgttacttccatagcaacttctgctgcgtacaattttgccatagcagcttctacgctgtaaactttctgcgtagcttttgccattgctgcacgatacacaagcatcttagcagcttccacttttgttgccatatcagcaagctggaactgtgtattctggaactgtgcaatcgaacgaccgaactgttttctttcttttacataatcgattgttgcctgcaaagcaccttctgccagaccaagtgcctgagcagcgataccaatacgtccaccatccagtgtatgcatggcaattccgaaacctttgccctgtgcaccaagaagattttcttttggaatacggcagtcctcgaagattaactcgtatgtggatgaaccacggatacccatcttcttctcctttgtaccaaaagtaaatccaggagtatctttctcaacgatgaaagcagaaatttcttttacttttctaccacgtttttcgatgataccggttacagcaatgataatataaatatctgcttctttaccatttgtgatgaagcatttagaaccattgagtacccattcgtcaccatctaaaacagcctttgtctgctgtccctgtgcatctgtacctgcacccggctcagtcaaaccgaaagcacctaatttctcaccacttgcaagtggtacaagatatttctttttctgctcttctgtaccgtacatcataattgggtcagcaccaagagaagaatgagcggatacaataacgcttgttgtaccacaaactttagctaactcctcaacgcacattgtgtacatcaatgggtcacagccctgtccgccgtactctttaggaatcgcaattcccatgaaaccaagtttcatcattttgtcaacagtctcacgagggaatacttctgtttcatcggtttcctgcgcaagtggctttacttcgttctcagcaaaatctttgaacaactgtctcgccatttcatgctgtttgtctaatttaaaatccatgataacatgaactcctttctataatattatttggaataatcaaagaatccaacaccagttttacgtccgagtttgccggcacgtaccattttacgaagcaatggatgtggacggtatttcgggtcaccagtctctgcctgaagaacttccataatagcaaggcagatatcaagaccaaccaaatcaccaagtgcaagaggtcccattgggtggtttgcaccaagctgcatagcagcatcgataccctcagcagaagcaacaccatcagcaaggatgccaactgcttcgttaatcataggaatcaagatacggtttacaacaaaaccggcagcttcttttacttcaaccggtgttttaccaatttcttttgcgatagcaactactttatcgtttacttcatctgttgtgttctcgccgcggataacttcaacaagcttcataacaggagccgggttaaagaagtgcattccgataaccggatgagaaatgcctgcaccgatttctgtaatggacaaagaagaagtattcgtagcgaaaatgcagtcttctttctttacgatatcctgcagttctttgaatgtctgttttttaacatccataacttccaaagctgcctcaacaatcaaatcacaatcagtacaaatgtcttttacgccagttgtaatcttagctaagattgcatcaacatcttcctgtgttttctttccttttgtaaccagtctctgaagaccttttgcaatcttgtttttaccgtttgcagcaaactcttcattgatgtcacacaaatatacttcataaccttctgtctgcgcaaatgcctgcgcaattccggaacccattgttccagctccaataataccaactttcattgtatttacctccattgtatttgattcaaatcccagacgggatgtcgtcacgaattaacagtttttgaatggtaccacttttaattttttctctttatctttctctaagaagttacccattccggctttctggtcttctgtctcgaagcagtcaccgaacaatttctcttcgattacaattgcctcatccatatttacctgaagaccttcgttaattgcctttttgcagttgcggacagcaatcggtgcattcttagcaataccggatgccatcttctttgctgcatccatcagttcttcttgtggatatacagcatttacaagaccaatgcggtaagcttcgtctgctttaatatttcttgctgtataaatcatctgttttgccataccagggcttactaaacgagcaagtctctgtgtaccgccaaatccaggagtaataccaagacctgcttccggctggccaaatacggcattgtcagagcagatacggatatcacagctcatggaaatctcgcatccaccaccaagagcaaatccgtttactgcagcaattacaggaaccgggaatgtctctaacttacggaatacatcgtttccttttttaccaaaggcttcgccttctgcttttgtcaatgtgctcatctctccgatgtctgcacctgcaacaaaagatttctctccggcacctgtcaaaatcaggcagcggatttcattctggtcaactgcatccaaagtctgattcagttcatccaaaacagcactgtttaacgcattcaatgcttttgggcggttgatggtaataataccaactgcaccttctacttcatatgttacaaattccattgaaagtatcctccatttaaaatttcttttttacatcacaggaacgaaccgatataataccggctcgtcccaaaagtaaaattagtctctctcaacaattgtggaacatcccattccaccaccgatacaaagtgttgcaagacctttctttgcatcgcgtttctgcatctcatgaagcaatgtaacaaggatacggcatccacttgctccaaccggatgtccaagtgcaattgcaccaccgtttacattcaatttgctaaggtcaaatccaaggtcacgacctactgctacagactgtgctgcaaatgcctcgtttgcctcaatcaaatcaaagtcatcaatgctcatgcctgttttagcaagaaccttctttgtagaagcgaccggtccaatacccatgatttttggatccacaccgccaagagcaccggctacaaatgttgccattggtgttacaccaagctcttttgctttttcttcgctcattactacaatcgcagctgcaccatcattaataccggaagcgttaccagctgttaccacaccgccttctttaccggagcagcatctaagaccgctaaggctctcagctgttgtaccaggacgtggtccctcatcggtatcaaatacgattgttttctttttagatttgacttcaacaggaacaatctcatctttgaatttacctgcagcgatagcagcttcacatttctgctggctgttagcagagaactcatccaactcttcacgagtaattccgtactgctctgctacgttctcagcagtaatcatcatgtgatactgattgaaagcatcccacaatgcatcgtttaccatggtatccacaagtttaccattgttcatacggtaaccaaaacgagcattcatagctgcgtaaggagccatggacatgttctccataccaccggcaacaacgatatcagcatctcctgtctgaatcatctgagctgccatatttacacagttcaaaccggaaccacaaacaacgtttacggtaactgctgttgtctcgattggaagaccagcaccgatggatgcctgacgagctacgttctgaccaagacctgcctggattacacatcccatgtaaacatggtcaacggcatcctttggcacgcctgctctcttaagagcctcctcaataacgatagaacctaatttgggtgctggagttgtgcttaatgcaccacccattttaccaattgccgtacggcaagcacctgctaatacaactttcttagacatgaatatatcctccttataaattttttactaatactacttaatttatcatcactgctttcgcagtttctgatcatacttttctctgaatgccttctgaacaacttccggcaccagtttcgatacatccgagccataaaaagcaacttctttcgcaatggtggaacttaggaaagcatactcaagactcgtagtaaaaaacatcgtatcaatctctggctcaatgctgtgattagtctgtgcaatctgcatctcggattcaaaatccgtcacggcacggagaccgcggataatcagctttgcatcattttgtttggcaaaatcaattgtcaatccggtaaatgttaaaaccctcacatttggaaattctttcgtggtctgctttaacagttctacacgctcttcccttgtaaataaaggcgttttttcctgattcacaagcactccgataatcaattcatccactactttggatgctctcttaataacatctaagtgcccatatgtaacgggatcaaaactacccggatatattgcttttatcatatctttttcctatctgtaaatcaaactacaatttaccactttttatgattcaatccttactcataataacaaacgaaaacgatattgtcaacaatttaacaaactttttccatgaacattttgtgaactgactggctacttgaccgcaccatgcgataatgctaaaataaacatattgcaaatatagttaccagaatggaggttttaccagatatgaacgaattatataagagtaaacttgtgactgccaaagaggcagccgaagtggttaagtcaggaaactgggtggattacggctggaccgtaacaacacctgtggatttcgacaaagaacttgccaaacgtctgccggagcttcacgatgtgaacttccgtggcggtatcctgatgtgggaaccggagattttcaaaattgaagatccggctgcacacatgacatggaactcctggcacatgagcggaatcgaaagaaaagctgttgcaaaaggattttctttctactctccaatccgctattcggaactgccacgttattaccgtgatttagaaaatcctgtggatattgctgttatgcaggtagcaccgatggatgaacacggatactttaactttggaccaagtgcttcccatttgggagctgcctgcgagcgcgcgaaaaccattatcgttgaggtaaacaaaaacatgccacgctgtcttggcggatttgaaaatggaattcatatttctaaagtagatatgattatcgaaggctcaaacccaccaatcgcagaaatgggcggcggtgctgctgcaacagaagttgaccacgcagtagcaagacagatcgttgcgcagattccaaacggtgcctgccttcagttgggaattggcggtatgccaaacgctgtcggctcactgattgctgaatccgatttaaaagatcttggtgttcacaccgaaatgtatgtcgatgcttttgttgacattgccaaagctggaaaaatcaatggttctaagaaaaacttaaacaaaggccgtcaggtatacgcttttgctgccggtacaaagaaattgtatgactatttggataacaatccggaatgcatgagtgttcccgtagattatgccaatgaaattgatgtcatttccgcacatgataacttcatttcaattaacaatgctgttgacattgatttgtttggacaggttaatgctgaatccgccggcataaaaaatatcagtggagcaggcggccagcttgatttcgtattaggtgcttataaatcaaaaggcggaaagagctttatctgcctctcttctacctttaaaaataagcagggcgaagtacagtcccgtatccgcccaactttagcaaacggttccatcgttaccgatacccgtgcaaacacaatgtatgtcgtaaccgaatacggtatggtaaacttaaaaggactctccagttggcagagagctgaagcattaatcggcatcgctcatccggatttccgtgatgaattgattaaagaagctgagaagatgcatatatggcgtagaagtaatcgatga

SEQ ID NO: 247 - DNA, 9756 bp, unidentified
  source 1..9756: mol_type = unassigned DNA
atgaagtggggaatcttagcgaccggcaccattgccaaaaagtttgcatctacggtggaacagatgggcgcagagggggagcagcttgttgccgtgggctcccggcacatggaaagtgcccaggcgtttgcacagcagtacggcatcccccgctgctatgactcctacgaagcccttgccgccgacccggaggtggaggccatctatatcgccacccccaacaccctgcattacgaaaactgcaagctctgcttggagcagggcaagcacgttttgtgcgaaaagccctttaccatcaccccggagcaggcgcagcagctgtaccgcctggcggaggaaaagcacctctttctcatggaggcgttctggatctggctgctgccgctgtacgaccgcctgcgccagatccttgcggctggcaccatcggggagctgaagcagatcacctgtcagtacggctttgtggcctccggtgcccggaaagaccgcaagtttgattccggtctgggcggcggtgcgctgctggatatcggcatctacaatctgggctttctgcgcatcctcaccgggcaggacccggagagggtggagaccaaagaggtgcacatcaacgagtacggcaccgacgattacagccgccttgtgctgacctaccccggcggctgcaaggcggagtcggtccagaccatcgggcaggagctggagcgcaacgcccgcatccttggtaccaagggcagtattttcctgccggatttccagcacgccgagaccatgacgctggaagtggagggcaaagaaccggaggtcatccgctgcccggtggacatcaacggctttgagtatgagatccgggaagcaagccgctgcgtcaagctggggcgtaccggcagcgaccgctacaccccgcaggacagccttgccctgacccgcctgatgtacgacacccgcatgagctggggcatgaagtttgcgggcgaggtgtaagcacacaccttgtacagggggctttttgcgtgcgaaaaccatgggacactaagaacgacaacttggaatttgaggaggtaatattgtatgtggttaatatttgcattactgtctgcaatatttgcagcacttacctctatactggcaaaggtcggcatagatggagtcaactcaaatcttgcaacagctatcagaactgttgttgtggtagcaatggcttggggaatggtatttctcacaaatgcacagagtggaattgctgaaatcagcaaaaagagttggatttttcttatattatccgggcttgcaacgggtgcttcgtggctttgctattacaaggcattgcaagtgggcgaagcttcaaaagtagttccgattgataaattaagtgttgttattacattaattttggcatttatcttcttacatgaagaatttactgcaaaatccctgattggatgtatgctgattacagcaggaacattgataatggttttataaatctcagtttgccgggcagacaggcaactgaaaaccacacaaaaaacgaggaaacagccatggtactttattttacgggaaccggcaacagccggtatctggcgcggcgcattgccgaaaggctggagatgccgctttacgacctgaacgcctgcatcaaggcagggaatcccgccccggtgcagaccgggcgggacgtggtgctggtgacgcctacctacgcatggcgcatcccccgggtggtgtccgagtggctgggcaagaccacgctgaccggggcagagcgtatctggtttgtgatggactgcggcagcgagatcggcaatgcggcaaaatacaaccggcagcttgcagcacaaaaacagctgcagtatatgggcacagcccagatcatcatgccggaaaactacattgccatgttcaatgcgccccaaaaagagcaggcacggagcatcgtggagcaggcagagcctgcgcttcaaaaagtgctgacccagctcagagccgggcaggaatttcccccgccgagagagaccctctacgaccgccttatgagcggcccggtgaacccggtgttctatcgcttttttgtaaaagcggaggccttccgggcaacggatgcctgtatcggctgcagtaagtgcgtggagttgtgccctttgaacaatatccatctggaaaacggagcgccggtttggggcaaaaactgcacccattgcatggcctgcatctgctattgccccaaagaagccatcgagtacggcaaaaagagcaaaggtaagccccggtatcactttgaagcactggaaaagcagcaggacgtatgaagaaaaacgatgatggtaaaaagcagatgaagtatttatacttacatggattaggacaaaaaccagacagttgggacagagtaatcaaagaaacgacggtttcggacaaaagcgtcagcttgagtctggcagagatgctggaaggaaaagcggccacctatggggaactgtatactgcattctcagaagagtgcaacaaggaaaatgacgaaatcgttttatgtgggctctctctgggtgctgttttggcacttcattatgcaatagaccatccggataaagtaaaggcactggtgctaattgcagcacaatacaaaatgcctaaaaaattattgaagttccagaatatgctgttccgctttatgccaaatgcaacgttcaagcaatttggattcaaaaaagccgatgtgatcagtttgtgcggcacgatggcagaattggatttcagagatttattgtgtaaggtgtcctgtccggcattgatcgtttgtggcgaaaaggacaacgcaaacaaaaaagcctcaaaggaacttgccagttatttgagcgattcctgctatcgtgaacttttgaaaacgagtcatgaagcaaacatagaagctccggagggattagcggcagtgttacagagattttatgacaatattgaatcaatctgatttatcaaaagagagacgaggactgtcaagcaaactcgaagaacaggcagtgcaggcgattgcttggaaagcacctgcggtacatgaatcggcgcggtgatggcggcgggcaaccggcggacgaaaaggcagagttgtctttacgagaacaaacctattgacatggtgcgaaaatgggtttatactatccccaacacaaggaaagggagcacaggcagatgaaacgtacaacagatgcccggcacaggctgcccgggcgaatgcgctgctcccagacaaattccaggcagacagactgagaaaaaacaggaagatgccgttgtctgggagaagtgcccgaatatacatcgtcacaataaaaggagaaccgacaatggctgattataaactgtggaacgcactgaagaatgctaaaaaatatcgctgggtggaactttctcactcgctgaacaacgaaagcccctactggtccggcatcccggaaggctctgtggagttggcaaagaccgtgtgggactggggcaagccggaactggaatgcctgatccagaccttcaaattccccggacagtttggtacccatatcgacttcccggggcacttcatcaagggcaaagcattgtccgaaaagtacgatgtgaatgacctgattttcccgctggtggtcattgatatttctgagcaggccaagaaagacccccgctacgctgtgacggtggaggacatcaaggcctatgaggcgaagtacgggcccatcccggatggtgcgctggtggctctgcgcagcgactggtacaagaagtggccggatatggatgcgctgtccggcatcgacgcagagggcaaagaaaatgcccccggctggtcgctggaagcactggagtatatctacaaggtgcgcaacgccgccgccaacggccacgaaacgctggataccgattcctctgcggtggcggaggaaaagggcgaccttgcctgcgagcgctatgttctggacaacgacaagctgcaggtggaggtgcttgcaaatctggataaagttcagcctgccggtgcggtggtcatcgtttcttatccccgcatcgagggtgcaaccggtctgcccgcacgagtctgggccattaccgaataagagcggagaagtgggaaaatgtcctttgaaaaagcaaaagcagacctggaggaaaaaggcttgggagaccatgtcattgtgctgaacgagttctcggcaaccgtggcagaggcagcccctgcactgggcgtagagcctgccagcatcgccaaaacgctgttggatggacccttttaagattcgcagagtaatgccggcaatattgattccgtattgcagacgtaaaaactgttgaccctgcgattgggctccagctgcaataaaaaagggcaaggccgcctgatgccaagcgaccttgccgttttgtgttatattttacaataaattaggcagtttcccgtgtattcacagcgccacattgaccggcaggacatatacgccgtcggcggcgtagaaggtgatctgagtaatcgtcttgccgatgatggatgcaaagtaaggatcatcggcgttgaagcccagcttggtaccatgccagatgttggtcacatgatgcaggccgtactcactgccatcggcggtggtcagaactacgccgtagaccttgttggccttgtagtccagatcaaaaccggagagcttcatctcgtaggtggcgtggtgaccgttggtgttcagctccacagtggtgccctctacggtggtctcggtggcgtggaccttgccaaactcccacttgccgctcagcaggttataccatgcggtgatgtagtaggcaggggtctcactgagcttgtagtaagcgtagctctcgttctcaaacaaggcatctgcgccggtgtaggtggtggtggattccttgcccttcagggtaacggtaatgtcgtagctgtcggcatcggtgacctgctttgcgttcttcagcgcccacggggtcagcaccttgaccgggaaagaaacgccggtgatgtcggagccgtctgcgttgacgtggtaggaaccggcggcaaggttgcctgcacgggtcttgttcttggtggcgctggtcacagcgtcgatctcagatgcgttgtccacaccggcagccttgtagaagtcggcgtaggggatgttcatctggacatagctggaggactggccgttctcctgctccacctcttccgcagcaaaggccgggactgccacagcgcataccagcatagcggccgcaagtgcacctgcaaatacttttttcaatctcatgataacacacctctatctcggttttgaaaaaacagttagctttacctaacaattaatgcaaaaaatacagggtcaaaacccctcagatagttaggcaaaacaaattcgcaaagtaaaaatagcactcccaccgggcgttgtcaagcagaaaccggaaagtttgcagaggtgaacttttcggtgcaggaaacgatctgcactttttatgtcgcaggggcagcactccaacgttggcacggtatttttcgcggtgggcttcagcgtgatgatggtgctggacgtagcactggggtgacggttgggggttcccgaaagcgaaatctttttcggaatcttcgaaaatgcctaaactccttgacagaggcaacagcagggcgtattattttggcagaaggaccgctgagaagcggctttttatagaacagaaagttagctttgcctaacttgcggcacaaggaattgctggcctgtcatccggtgcagtgggcgcatctggtaaaaagcattgtattgtgaacggtaaacagaaagagggtggcattatgtccttttttgaaaatacccgaaagcccgtaggccttggcgggaagatcatggttgctatgatgaactttggacacagcgcaatggcagaatgggggctgagttttttacagcctgccccggatgccatggtgctggactgcggctgcggcggtggagcgaacatgaaaacgctgttgaaactgtgccccaacggcaaggtgcagggcatcgactactcagccgtcagcgtggaaaaagcgcgaaaagtcaatgccagagccattgcggcaggacggtgtaccgtgcaacaggcaagtgtggcagagctgccgtttgaagcggagcagtttgatgtggtgactgcctttgaaacggtctacttctggccggagcttgcacagaatttcagagaggtttatcgagtgctgaagcccggcggaatctttttcatctgtaacgaagcgaatggcgaaacgacaaaagacgacaaatggacgcagatcatcgatggcatgaccatctatacggatactgcactgaaagagtatctggaacaagcaggattttgtcagatccaaagccataaaaataaaaagggctggctttgcgttacggcgcaaaagcggtgaagtagtgcaaccgtaacacttggaacagggaagagcatggcatggtttgcctgccggaaagcagaataaggagaacaggaagaaacctatgaaatacaaaatcgagaaaaacaccgtgcaggagacattgatcctcccactgtattcccggaagctgtgtaccgagctgtacccaaatctttatcgggacgagacggcggtgcgcttgctgagcgagatcgactacgacttttcgcaggcagagaaaaactcccgcagcctgatgcagcgctttggtgcgctggaggtcgccatgcggcagaatgaccttgcctttgaggtgcgggcgtacctgaaaacgcatccctgcgcggcggtggtcaatctgggctgtgggctggacaacaccggcagagcctgcgacaacggcagatgcaagatctacaatctggactttcccgatgtcattgccttgcggcagcagctgctgcccgccggggagcgggagcaaaacatcccctgcgacctgaaagaccccgcatggtttgacaaaatcgatgcatccggcggggcggtgttctttgcctccggggtgttctattacttcctgacccagcaggtcaaggcgctggtgcaggggatggcggacacttttcccggcggggtgctggtgttcgatgccgccaaccgcacggcggtaaagatgatcgccaaaacgtggctcaggacggcgaaaatcaaggatgtgggagcatatttcgcggtttcggatgcgaaaagcgagctttccccgtgggacagccgtctgcaagtgtccagccgaggctatatgatgggctacaacgacctgaaagacccttccgtcagcggctttttccggtttctcgccaaggtcggggacaacgggatgaaaatgcagatcgtgaagatcggatttggagacagacaatgaaatatgccgggatgcctatggggatgtgggtgctgtttgccggttcctttcaaaagcagccgaccgcagcccctactcgtggaacagtgttctgcatatagcagcaatatgaaagcagtatttcacagaggggcattatgaatctataatagtagttggaaataaacagaaagagggtctttttgatggcaacgatatttccaagagaagaaaaggcagaggcactgttcggggagatcctgaaaaatccagaagcctgccaccgcctgatggataccttcaacgactcgctggacatggcagacgtactggatgcgccggccgtgagtgcacagcagtttgccgcggcgctgttcaatgcctacgagaacaaggatctgtctgcctttctgatggcgatctgccagcacagtatgtttgacctgctacggaacgctgccctgatcccgttcaaattcaacgccgatggtcagccgaacccggtgatcctgacggatgatgccggcgttcttttgccgaacaacaaagttgccgtgagcagcaaagtatacgaccggttcacccgggtgttccagaagcaggaaaaggtaaaaatgtaccttgccagcggctactgcaagtatcacggctacgacgaaggctcgatggatgtggtggagtaccactacaaccagcatttggggctgctgctgatctacgaactgccggacaccgtgaagcagaaagtaacggaagcggaggcctactccaccgtctgggacatccagatgaagctgcagcacgcactgccccgttccgtggtctactatggacaggatacgctcaaggacggcggaacccgctacgatgaacttggcgtttttctgccgctggaacactttgccgaccggctggaacgccatgtggaaactgctaccaagatcgtttacggcgagtaaacgccctgtaaacgaactccctttataagtgcatcacagcaaaacaaaacgcagcgaaccgttaaatgattcgctgcgttttgccttataagggagaatggaactgctgcacatcaggtgcaataacggaaagtcttgtcagtgacaatacgggcgaagatcagccctaacggcagtgccacgatgatgagaatggcatctgcaaaccatgtggcggagtccatcagagacaggatgcccagattatagatggcacggtagaaatacagtcccggtaccatgataacgatggacggcacggtgacggagatgcggggataaccgacggcgctcttcaggcaggaggccagcaatccggacagcagtgcgcccagaaacgctgcaatagcgggcggaaagcccgcaaggctcaccagctccagccggaacgtgttcgttaccgcaccgataagggcggcgcagactgccaggttccggggactgttgaacatgagcgaaaagccgaacacaccgccaaaacttgccagcagccggaacacgatctcttccgggagtgtcaggctcagggcagggaactgcaccggctgcaaatgcagcagcagtgccatgatccaagccgtcatggttgccaccagaatgatgaggacggcgtaggccagacgttccagcccggagcgcatatccagcttggcaaggtcgatgccgctggtaatgaacggaaagcccggaatgatgaagagcatggagcagatataccccgcctcgtgctgcaccgatacggcaaacagcacctctgccagcttcagcaggatgtcatacacgaggcttgcggaacagaccgacgccgtaatgcccagaaacagggtgaaatggtgttttgtcagcttgcaccgtacaaagttgccgatgcctgcaccgcagaaagcacacagcatttccacaatgccgccgccaagcagaaaggtgaagcagccgcaggccagtgcagctgcaaagcccagtgcgatgggcgaatacaagccgtggatgcgctcgatctcatcgaggtggctgtgcagttcttcgccggtcataaattttccttcccggtcgaagtcgctgacgaaatgctccagtcggttcagccgggaggtattcacgcccgtatttgtcagacagagtgactgggtataacactggtcaccgtcaaagcaggtgaactcaatggacaacaggccgatgtctgctgttgttgtgactcccagctcccgcgaaagggtgttcatggagcttcggacacgccatgcgccggtgccgcattccagcagcatcagcccggtgcgtccaatgacggaagctttttccacaagccccgcctcggtaatggggacgcccttgctggccgaagcatagtcgtgccagtagacttccatgtgatttttgatgatctcactttgccgttgtcccat

SEQ ID NO: 248 - DNA, 5534 bp, unidentified
  source 1..5534: mol_type = unassigned DNA
atgtttgtaggaacatggtggtcactgatgccgcccattgtggcgattgcgctggcactgttgaccaaagaagtgtatttgtcattgtttgcggggtgtgcccttggcgcactgttgacggcagaattccacccgtggattgcgtttgatacgctgtttaacacaatgatcgatagtgtggatttttccattctgatgttcatgatccttttgggcatgatcgttatgctcatgcaggaatccggcggcacccgcgcttacggtgaatgggcctccagccacctgaaaagtaagcgctccgctttggtaacgacctctctgctcggtgcgctgatttttgtggacgactacttcaactgcctgacggttggctctgtcatgcgccctgtcacagataagtacaaggtttcccgcgccaagctggcgtatatcattgatgcaaccgccgcgccagtctgcatcattgcgccgatttcttcctgggcggcagccgtcaactcttacgttccggcgggcagctccatgtccggttttgaaatgttcgttaaaaccattccgttcaacctctatgcaattttaaccctgtatatggtgttcttcacctccattgtaggcttcgatttcggcctgatgaaaaagcatgaagagaacgcggccaaaggtgatctgttcacctccggcggggaagagttccagaaccaggaaacaaaagacccgaccgagggcggcaaatacgccaaaggcaaggtcatcgatctgattgcgcccatggtcgtcatgattgcaacggcaatcgcagctatgatctggaccggccacctgaacggcggccagaatctggtggaggactttgccaactgttcttcttcggaagcgttggtgtttgccggtttggtcacagtgggattcctgctgcttctgtatctgccgcgccgtgtcatcggcttcaaggattttatgaattccgttcccgaaggtggcaagcttatgatgcccgccatcctgattttagtgctggcctggactctgaaaggtatgacggacgccctgggtatcggtacctttgtacgttcggccatcaatctgaattccagcctgatgaactttgtgccgctggtcatcttctgcattgcaatttttattgccttttcttccggcaccagctggggcacctttgctatttttgtgcccatcgtggtcaacatgtttgctgaactggacccgaccatgatgatcatttctgtagcggctgtcctggctggtgctgtctgcggtgaccatatttcgcctatttctgatactaccatcatgtccagctccggtgcccagtccaaccatatcaaccatgtgcaaacccagatgcagtacgcctttgtggtcattgccgtgtgtgctgttggctacctgatcgccggctttaccgaaaactggtggctgaccctgctttgctcgctggtgattttgaccggagtgctgttggagataaggaagagagaaatgtgcggccgataaaccatactgacgtagcatcatcaaaaagaacttgttttgcacactatatggggcactaaaaccggtcgtgttttacagttatatgaactatatatgaactaaaacgccgaacttttggcccctgcggcacaaaattggcacaactttttcagaagttatgaggagatggcggaaaacaggagaaaacaatgagaatccatgagtttatcacctgcttcgtaaaactgttgttgagtacccgatgcagaggggccggtcttctttacatggctgccgaagatgtttggtaaaagagttgtagttaccgtccatggaacctgtgaaataatgttagtaaccagaaaaaatcctgatttcatgcgggtttgcgcggcttgaccttttttaccttaacttgtttctgtttaccatggtgcgttgcgttccggcgtgatttcgggggttagtggcttctggttgcgctctatacttaacccaccacagcgaaagctgatagagcagaaaacagaataaggaggtacgaggataagcctgcgtatagattgttactgcaatctgtatacaggcttgttgttgtgctgtgaggtaggaaaggtgagtagtgaaagatgagcatgacaatttaaggaaaagaactgctgggattgtgtataagcctaggacaagaatagaaattatggaatgacggttggagagaagtaatggaagaaaaaatcagacttgcggttttcggacagaaacgtctttctcgtgaaggcggaatagagattgttgtaaaagagttatgcacccgaatggcacagaatggttgtgatataacttgctacaatagagcaggccatcatgtgagcggtgcagagtatgacaaaacaattgaatatgatggcatccgtcaaaaggttgttccgactattgagaagaagggggctagagatataatagggtcaaccaagaaaacctacgataactaaatggttttgacggcttgagttgtccttcaaatgttttatttgttgaaaaactgcaagaagcgggaaatcctgagggttatatgtaggtggcttttggaagctctgttttgacccacaaaaaggagcagcaaataaagattgcaggagagttcaagcctacggtggattgcctttgtgcgatccgccgtgggtttgttgctgtttatatagaaaaagtgaggagtgcagaatgtacatgaatgacggaaataaaacgaaaatcaatctgagaaacaagagtgtttttatcacgggtgtagctggttttatcggttctaaccttgcaaagagactgctctccacggtggagggtgtcaaggttgtgggtctggacaacatgaaccactattatgatgtgcgcctgaaggaagcacgtttgaacgaattggagcagtttgacaatttcagcttcgtaaaaggtaatctggcagacaaggctgtgatcgaatctatctttgagcagtataagccggaaatcgtagtgaacctcggtgcgcaggcgggtgtccgctattccattacgaaccctgatgcctatgtggaagcaaacttgattggcttctataacattctggaagcctgccgccattcttacgatgaagggcatactccggtggaacatttggtttatgcgtcgagttcttccgtatacggcagcaataaaaaagtgccgtacagtacggatgacaaggtggataacccggtatcgctgtatgcagcgaccaagaagtccaacgaactgatggcacatgcctattctaaactgtacaacattccttccacgggtctgcgcttcttcacagtatacggccctgctggtcgcccggatatggcgtacttcggctttactaacaagctgctgaaaggcgaaacgattcagattttcaactacggtaactgcaagcgtgactttacttatgtggatgatattgtcgagggcgttgtccgtgtgatgcagggtgcgccggaacgtaaaaatggtgaagatggtctgcccgttcctccgtatgcagtttataacatcggcaaccagaacccggaaaatctgctggactttgtacagattttgcaagaagaactgattcgtgctggtgttctgccggaagattatgattttgaagcacacaaaaaattggttccgatgcagcctggtgatgtacctgtgacctatgcagataccagtgcgctggagcgtgacttcggatataagccctctaccagtttgcgcgaggggttgcggaagttcgctgagtggtacgcaaagttctacaaataatgaagaataggaaaataaaccgatgaagtgtgttgaggtttacaaggaattatatcatcaggaaccgtttgatgtggcgttctgcccgtaccgcatcagtccgctgggtgcgcatatcgaccatcagtacggaaaaatcaatggtttggcaatcgacaagggaatccacatggcctaccacccgaaacagaatggtgtggtggagttgcagtcgctgaacttcccgaagcgtgcccagttctttgtaaatgcagtgccggaagaaaagcagggagactgggctgatcatctgcgtggtgcggcaaagatgctgggagaaaagtaccgcctgaaagttggtctgtctggcattatcgagggtagcctgccgattggcggtttgtcctcgtcggcttcggtcattatttgctttttgtctgcactgtgcaaagtgaatggtatccatctagagccgatggagatgattctcacggcgaaggccgcagaaaaccagtatgttggtgttgcttgcggcaagctcgaccagagctgcgaagttctttctaagaaaaaccatctactgtacctcgatacgaaagatgacagctatgaactgatccctaccagtgagaaaatgaagccttataaggtggcaatcttcttctccggcttggagcgttctttgaaaaactctaagtacaatctgcggcaggacgagtgcaaggcagcggcctatgcactaatgggctatgcagggatggactatgacacctttgcaaatacccggctgcgcgatgtgccgtatgaggtgtttgaagcctataaagaccgtctgccagaattgtggcgtagacgcgcagaacactattacagcgagtttgctcgtgccgaaaagggtgcagaactgtggcgtaaaggtgatttggaaggctacggtcagctggttttcgagagtggcaaatcttccatttataattacgagtgtggctgcgatgaattgaaaaaactgtatgaaattatggctgacactgatggtatctacggtggccgcttctccggtgcgggattcaaaggctgctgcatggcgctgattgacccagacaaggccgaagatattgaagcaaaggtcacagcagagtatctgaaagcgttcccggcattggaaggtaagtacagtttccatctgtgcgagagtgccgatggtgtggaactgtaaggagaatacatagatgaaatgtttgattttagcagcgggctacgctacacggctttatccgctgacggagaattttccgaagccgctcctgaaagtgggagaaaagtccatcctcgattggctggtggatgatttagtggataccaccgatattgacgaatttgtggtaatttccaaccacaagttcgcgcagcattttgaggattggaaaagcaataagcaaaagacgcggccttatgagattactgtaatcgacgatggcacaagcaccaatgaaactcgtctgggagcagtcaaagatattcagctggcggtggaaaagctgaatttagctgatgatttgctggttatggctggcgacaatgtgctggatttcagtctttccaagttcgtggagttcgcaaaggaaaaggatacttcctgtgtgatgtgccatgtggaaaatgaactgaaaaagcagcagaaaacggcgattatcacgttggatggcaatgacctgattaccagctatgaggaaaagccgaaagagccgaaaggaaat

SEQ ID NO: 249 - DNA, 24071 bp, unidentified
  source 1..24071: mol_type = unassigned DNA
  misc_difference 1585: note = a, c, g, or t
  misc_difference 1586: note = a, c, g, or t
  misc_difference 1587: note = a, c, g, or t
  misc_difference 1588: note = a, c, g, or t
  misc_difference 1589: note = a, c, g, or t
  misc_difference 1590: note = a, c, g, or t
  misc_difference 1591: note = a, c, g, or t
  misc_difference 1592: note = a, c, g, or t
  misc_difference 1593: note = a, c, g, or t
  misc_difference 1594: note = a, c, g, or t
  misc_difference 15309: note = a, c, g, or t
  misc_difference 15310: note = a, c, g, or t
  misc_difference 15311: note = a, c, g, or t
  misc_difference 15312: note = a, c, g, or t
  misc_difference 15313: note = a, c, g, or t
  misc_difference 15314: note = a, c, g, or t
  misc_difference 15315: note = a, c, g, or t
  misc_difference 15316: note = a, c, g, or t
  misc_difference 15317: note = a, c, g, or t
  misc_difference 15318: note = a, c, g, or t
ttaaccaagatattgcagaatttccttagcatgcggtaaaataatatccggcttaatagaaccgttttccacatcttccatggttgcttcacctgtcagcaccatcacagaaagaatatcattgttcaggccaaaggcaatatcagttgccaggcggtcacccaccatagcaatttcctcttttttataaccggttttgtccaaaaccacatccaccatatacttgtaaggcttgccgaaaatcagctgtggctttttgccggtagcagttttaatcagctccagcatcgcaccggtatcaggaatgaattcaccgccttcaatcgggcagcgcacatcaggatgcgtagcaacgtacggtacacccttgtcaatcaggcggcaggcggtagtaaggcggtcataggtaagtgtctggtcaaagccgacaactacataatcagcgccctcctctaatgtatttgtcagcgtaaaacctgcttcctcaattgttgccaacagctgcggcgttcccagcacaaacagcttcgcgcccggcttgttcttctgcatccagttggtcagtgcgtctgacgaaatcaggatgttctcacgtgtaacaggcacgcccagtccgttcattttctgcacataatgctcgtggctacgggaagaattatttgtcagcagataatattccttgcctgctgccttcaatttatcaaaaaagccctccatacccggaatcagttcgttacccaggttaatggttccgtccatatcaaaaagaaaacacttaattttcgctaagcgagcgtaatcataagtcatgctctatcctccatacttaaaatataacaatattataaagcatttgccttatttgtgctacaatagacgaggaagaaaatctgaagttcaaaaggagattaatcatgaaatatacaaccattatttttgaccttgacggtaccttactcaacacattggcagatttagctgctgctaccaaccatgctttggcagaacataaactgcctcagcgcaccacagacgaggtgcgcctgtttgtcggcaacggcatccgcaagctgattgagcgtgcggtaccggctgacaccccggcagagctgcaggagaaggtctttgccagcttcaacaaatactataagcagcactgcgccgacaacacccgcccctacgacggcgttccgcagcttttgcagcagctgcgcactgcaggctgccgtacagccattgtttccaacaaagcggattacggcgtacaagcgctggctaagcaatactttgacggccggctcgacgctgcctgcggcgaacgcgccggcatcgccaaaaagcctgcgccggatatgctgctggcaatcatgcggcaattaaaggctgagcccgcaagcactatctatatcggtgattcggataccgacctcgacaccgcccgcaatgcaggagttgcctgcatcggcgcctgctggggcttcagaggccgtgcctttttggaagcgcacggcgctaagctgctggctgaaaacgttggcgatatttgggagcttataaagtaaaagaggctgccgagatcggaagnnnnnnnnnntgccgtaaggcagccccttttttataactattttacgctaagcaatcatccataaatttaatcagacctgcttctacttcatcgcgcaagcaaagctcattgtgaatttcgtgacggaaaccgggatacggctttacagaaaccttgtgtcctgtttttgccagcagattggcaacatgatacaagccctcgccgtaattgccgcagggatcctggtcaccggcaatcagatagctgggaatattttgcggcaccttggcagcccactcatcattttcaatataatgatacaactgcacgaaatcatagcacagctccagcgtagtatcgaaggtattgaacatatcacctgcatgatcctcaacaattcgcggatctgttgcaatccagtctgccggaccgttgggattttccactctgtccgtcatgccgcagaaaacacgctcaaaccaaacaccgcaaggctgatacggatctgcctcataagcagccttgaattctgcattaacataggcatcctcacagccctgccactgcgagcagacaccgcacagcatcatacctttgatatcctcaccgtagattgacgcataagcacgcgccagcatagaaccccagctgtgaccgaaaacaaaatacggcagctcgggatatgcctctttagcaatatcatgcaaagccttttcatccttcaggtaagtcatatagccgccggaatgcgggtcacctaaagtgcctccgtcatagcctgttttgccgtgaccgagatgatcatcagcaaacactacaaagcctgcttcgttgaacttgctgatcatgtgcagatagcggcgtgaatgctcaccatagccgtgaatcagctgtacaacagctttcggtttacctaagggactgtaggagcaagccttaatggtatctctgccgttggcagaagggaaggaaatttctctgatggacataatgcggacctcctcgcctgtaattatttataatattaagataatgataacacctgcatttcctgctgtaaagcaataataacgcccggaagaagcttttacatattttttacaccggtctgcctttcgcatgtcccaggacttccgaacaacgcatacaaaaaaccactacaacaattaatttgttatagtggcttacaaaaatctattttaaatttcacggttcggctaagcaactaactgctttgccgctgctatttacattcagcggcccttatttatttttaagcacatagaacggatcgatattctgtccgtctgccaatacctcataatgaatatgaggaccggtgctgtagcctgtactgccgacaaaaccgataatttcacccttgataaccttctgtcctgcagcaacggcaataccgctcatatgtccataggctgtttcgtagccattgccatgatttatacgcacatagcgtccatagccaccgttccagccggcctgttcaatcgtacctgcagccgtagcataaaccggtgcgccgaaatcaactgctatatccagaccaggatgccaatcatacccgccctcaatcggaccggtgcgcacaccgtaattactgctgatagtgccgccgtcggtcggccatttatccgggaaggatgccatcccgccaccggagccttcaacctcactcaaaagctcactgacagattgcttggtaccgtccagcatctttttgatattggcattttgcgctgtcagcactgccatagtcccggtgatatccattttagcaggcccgcccttgcctgtataggatgtattcgcagaactttcctttgctgctgttgaatcaaccatactggtaccttcgcccagctttctgctgtctacatcacggataacagcacggcgcagctttttctccagattagagatttccgccatatcgcgcagcattctttcgttatcctgcaacagcttctgcagctttgtctgctgctcagccttgttttgcttatatgcagcataatcggttgcttcgctgcgataatccgccagctgatgatataaatagccggctccgccgactgctccgacaagcaccaaggcagtaacagcaatgcctgccttgagcttagcatacgaaaactttactaccttgccgtttggcaagcgcagctcacatttcctttcctccattattttaattacctcacttgaaaagaccaaagcgttggcctactgccaacaatctgcgtcccacaaagggcacgttgtccaaatcctctttattcagaccaccgcaggcaagcagcgccaatgcatagacaggaacagctgccgccatagcaaacagcacacaccacatacccatgctttccgtaagcatcagcacgccgtaaatcgccgcgcccataacaccggaagcaaagcatggacggataatgctgccaacagagaagctatagcctgtcagcttgtaaataaagcccatattgataatcgctgccacggcaaaatctgctaccgtcgccatcgacgcaccacggatgcccagctccggcacagcagtaagataccagctcataacgatttttacaatgcaggcaataatcatattgattacagggattgccgtgcggccaaggccttgcagaatacctgtactgatctgatgcatacctaaaaacagaataccgatgctcattgtctgaatcgcaggcgccgcaccgggagcgttatacacaagcgccgcaaccttttctgccagacaatagaggcccataaagcacgggaaggtgataatcattgccacgcggaaggcaatgcggattttatcacggatagcatcaaagctgctcagcgcacgcgattcggaaatagacggcaccagactgatggtcatcgcagcagtaaaaattgttgccagattaaccagcggtacagccataccagtcagataaccgaacagctcagtcgcatgatgaatattaaagccggctgcttccagacgctgcggcacaatcaaaaggtccagatttgcacctatcggcagcatcagactggtaagagaaaccggcaacgccaacttcagcagacgcttgatgatatgtccggcgctttctaccggcgcactgtcatcctgctcagccatttccttttgcagacgctgcttcaggcggcgatagaaccacatcagcaccaaaagtgcgcagaacgcgcctacaccggcacccatgctggcaccgcctgcagcgaacgccagaccgtacggcatgaagaggtcggcaaaaacgagcatggtaataacacgtgtcagctgctcgacaatctcactgaccgccgtcggcgtcataatctgccagccctgcagataaccgcggaagctggccagaaaggttacgaagaaaaccgcaggcgccagagcgataatagaataatacgcacgactgtcgcggatgatatggttattaaccagccagtccgcaccgaaaaacagtgaggacgaaaacaaaaggcccgtcaacagcagcactcgcagcgaaacattaaagactcgcttggcaccgcggtaatccttgtttgccaatttttcggaggtaataatcgatattgccaccggtacaccggcacttgatacggttattgccatcagatagattggaaagcccatctgatacaggccgataccttcgccacccaatacacgtgataaaataatccagttcagagaaccgataaccttgaccactatactggaggccgtaaggattaaggttccctttaaaaatttgctattcgaagctttagaatctgcgctcataaaatccccttgtttatagataaatatacattataattatcctcttttccgcgtgattttacaagtacttttaacacatttgtcataaacacatcactgctttttgcttgcataactatctttatatgctaaaattaagttaagaccaaaattatgttgtaaaaggagcgatgcaaaatgaaatccacacatgctttattagctttcggtgcagcaatctgccttgcaagcacctgcagcctgagcgcctatgcttctccgctgaagaattatgacgcaggcaaggttgctattgatgcaggcattactctgccatccagtcttaaaggtgacaactataaattcagcaaatccaacagtacctatcttggcgcaactgtcggcatcggccaaaaaactgctttaaactacaaatggaataattacaaagcagacgaagccaaaacccgcgcccaacaattcaaccttatgtataaggttctgccgggtatttccgcttacgcaggttatctgaacgctgatacctccggtgactttggcggtaaaaccaaaaactccggtcaaatcggtctgcaggctgcctatgatattcccgcactcttcactgtttggggaaatgttggctatggcaacagaaacagcggctatgaaatcggcatcagcaagcctattctgaacaacctggaggttaacgcttcttactacaatcagacatttgatgatgcttttggcgaagacctcgacatgaaggctaaaggcgttaatctgggcttaactctcaaattttaatttgtcagctacggctaactaaattaaaataaaaactaacggataattattattgacaactgtgctggcctgtgttattatataagtgtcaagggcacacaagctgtgcaagtcaaaaataaaattaagcaatgcaatataaaaacatggagggaactaatatgaaaaaatttgtatgtcaagtatgtggttatgtatatgaaggcgaagctgctccggcaaaatgcccgcaatgcggcgctcccgcttccaaattccaggaaatggctgctgaaatgggttgggctgctgagcacgttgtaggcatcgcttccgacgttcctgaagatatcaaagctgacctgcgtgctaatttcaacggcgaatgttccgaagttggtatgtacctggcaatgagccgcgtagctttccgcgaaggctatccggaaatcggcctgtactgggaaaaagctgcttttgaagaagctgaacatgctgctaaattcgcagaactgctgggcgaagttgtaaccaactccaccaaaaagaacctggaaatgcgtgtagaagctgaaaacggtgcaaccgcaggtaaaaccgacctggctaaacgtgccaaggctcttaacctggatgctatccatgacaccgttcatgaaatggctcgtgacgaagctcgccatggcaaagctttcgcaggcctgctgaaaagatatttcggcaaataatcagccaataaaattcaaaacaaaataacgaggctcccgctgagtaatcctaaaggattacggcgggagctttttcggtttttaacagccatttacttttttggccggaatcattccgcaaatcttcttgccttatgtactttcttatgtttttcacacttaaaaagccttcaatatctttataaattgcttcagatatgatattatataaaggttaggaaacatatttaatgacactcattatcacgttcctataggtggttaattatatgcttattaaaactaattttcattatcctgctatgctgcgtgtaacaggcaaaaactgcgtaatcatcggcggcggtgctgttgctgcccgtaaactggcaacactgctggctgccgaagctaaagtaacagttgttgccccgcttttctgtgacgaggtgcaaaagctcgcctcagcgcatggatgcacgctcatcaaggattactacaaaccggaatatctgcagaatgcatttgtggttattgccgccacagataataaggctgtaaacaggcagatttcagaggctgctccctgcctcgtcaataatattaccgaacccgagctgagtaatttcactgtcccctcagctatcagcgaaggtgatattactattgcgttggcaacaggcggtatgcctgcttttacacgcctgctgaaaaaacagttggaacacattctgacacccgagctggctgacttcaacagctttctgctgctgcagcgtgaagctgtcaaaaaaatcgaaagtacgccacaggaacggacgcaattctggcgcagtgttttgacacaggatttactaaatttagttatggcaggtaaggctgctcaagcaaaggagaaggtattagatgcagttaacagttttaggactcaatcacaggaccgcccccgttgagatccgtgaacgtttcaatttttccaatgacagggtggcaagtattctgcgccgcctgcgcaattacgataatattcccgaagccatgctgctttccacctgcaaccgcacagagctgtacatggttatcgaaaatccgcatgaagcaattccttttatcaaatcattgctcaagcatttagcaggtgaacattaccaaagcgattatttttacaatctgaacggaacaaattgcgtcaagcatctgttccgtgtagcctccagtctggactccctgattgtcggtgaaggccagattctcagccaaataaaaaatgcgtatcagattgcccgcaataacggtatgacagatactattctcaataccatcatgaataaggcaattgccgtcggcaagcgcgtgcgtaccgaaacaaagattgcttacagcagcgtatccgtttccagtgccgctgtcgacctggccatcaaaattttaggcgacctgagcaaggcgcagattttggtagtcggtgccggtcatatgagtgagcttactgcacagcatctgttggacaagggtgcgcagactatttgcgtcagcaatcgccactacgaaagagcacaggacttggcaggcaagttccacggtacggctattccctaccgtgccatgttcgagcatgccgctgatgccgatatcattatcacctctaccggtgcgccgcattacgtgcttaccgtagaaaatttgggaccgctgctgcccaagcgcaacggcagaccgctgattctgattgatattgccgttccgcgtgacgtcgaccccagactggccgatgttgccggcgtaactatttataacattgatgatctggaaggcgttgttgataccaataaaaacttccgtgaaaaggaagctcacgttgccgaacagattatcagcgaagagattggtgccctcaaggagcgtctgcgttattacacaatgcgccctgttatggtacagctgcatgataaaatgaatttcctgcgccagaaggttttgaagaaggcctttattaaaatgccggagcttaccgaccatgaaaagcgcattattgacctgatgacccaacgtctggagcataaattcctgcgcgagcctatgaaggctatgaatgctgtagcaggcaccgcagaggaagaacgctataaaaagatgatgtgtgatttatttttattaaacgaaaccggagaggagtttggtgatgaaagcaaaattgacgattgggactagacaaagtcttttagcgctttggcaaagcaatcatattgcagccttactgcgcaagcaataccctgaatgtgaggttgtactgaaaaaaattgtcaccaaaggcgaccgtattttagacgtacccctggcgcaaatcggcggcaagggtttatttaccaaggaaattgaagaggatcttttagacggtactattgatttggcagtacatagtctgaaggatatgcctaccgttctgccggaaggcctgtgcctgacagcaattaccgagcgtgccaacgtcggcgatgcttttgtcagcaacaaatatggcagcttcgaagaactgccgctcggcgctgtagtcggcaccagcagcctgcgccgcaaggcacaactgttagctaagcgtccggatctggaaatccgcgacctgcgcggcaacgttgatacccgtctgcgtaagctggacgagggactgtacgatgctattattctggcagctgcaggcttagagcgtctgggtcacggtgaccgcatctccagcctgattcctgctgatgtctgcctgccggctgtaggccagggagcattggcaatcgaagcacgtaccgaggataaagaagtacgcgatatgctgagcttcttaaacgacctgaccaccaaacaggctaccgatgccgagcgtgccttcttgggcttactggaaggcggctgtcaggtacctatcggcgtacatgccgacgttgaaggtgaaaatattcgcattgaagcaatcattgctgccttagacggcagcactattctgcgtgatacaataaacggcaaggctgatgacgctgtcagcctcggtcaacagcttggcaaaaaaatgctggctgccggcggtcaggaaattctggcctctattctttaaggagagtgaaatcatgacaaaacaaggtaaagtatatttaatcggtgcaggccccggcgacccgggacttctgggactcaaggctaaggaatgcctgcagactgcagacgctgttgtttatgaccgtctggcagatccgcgtattctggccttcgcccgcaaggatgcagaaatggtttatgttggtaaggccagcgccaaccacaccatgcgccagcccgatatcaacaagctgctggtaaagctggctgccgaaggtaaggttgtagcacgcttgaagggcggcgacccctttgtattcggccgcggcggcgaagaagccatcgagctgcgcgaagcaggcctgccgtttgaattcgttcccggcgtaaccagtgctattgctgttgccgaatatgcaggtatccctgttacccatcgtcatgtagcaacctcctttgccgttattaccggtcacgaggatcctactaaaggcgaatccaccatccattggaaaggtctggcaacctctgttgacactctcgttttcctcatgggtgtagaaaatattgaaaaaatcagccgtgagctcatcgccaacggccgcagcgccgactgcccggctgccgttatccgttggggcactcatcccgaacagcgcactctgattactaccctcggcagagctgccgctgacgttaaagcaaccggtatgaaaccgcctgctatcttcctcgtcggcgaagttgtacgcctgcgtgaacagctgcaatggttcgataacaagcctctcttcggcaaaacagttatcgttacccgcgcacgtgcacaggccagcgctctcaccaaaaagctggaagcacagggtgccaaggttatcgaagctccggctatcaaaattgttccggcagcagattacgctccgctggacaacgctatcgccaacatcaatgactataaatggcttgtcttcaccagcgctaacggcgtagattacttcttcgagcgtctgggtgcagctaagaaggacgcacgcgccctggctaacgttaagcttgccgctatcggcagcgccaccgccaaggctctggcagagcacggcctcaccgccgacctcattccttccgcttacaaagcagaggagctggcagaagcactggcaggcgaaatcaccgccggtgacaaaatcctgctggcacgtgctaaggttgcacgcgaggtattgcccgaatctctgcgcaaaatcggtgccatcgttgacgttgtaactgcttacgaaaccgttgccgactgcgaaaacaaggacgagcttatcgaagccctcgaaagcggcgaagcaagcatcgtaaccttcaccagcagcagcaccgtaaccaacctgttcgaggttctcggcgacaagaaggagcttctgaacaaggctgctctggctgctatcggccccgtaaccgcagataccctgaaaaagcatggctatactccggctatcaatgccgctgaatatacaattgacggcctcatgaccgctatcacaaatttttataataaataaggaagtgtatcaagatgagtattaccggttttcctgtataccgtccgcgccgcacacgcgctactgaaaatctgcgtgcaatgatccgtgaaaccgaggtttccgtaaaggacttaatctatccgcttttcgtcgttcccggcgaaaacgttaaacatgaaatcgaatctctgcccggcaactaccactggtccatcgaccgcgttatggaatgcgttgacgaggttgttgaacttggtattcccgctgtcctgcttttcggcgtgccgtcctacaaggacgctgtcggcagcagcggctgggatatgaacgagcctgtacaacaggcctgcaagctgattaaagcaaaataccctgaactggttatcattaccgacgtctgcctgtgcgaatacaccgagcatggtcattgcggcgtgctgcaaaacggctgcaccgtcaacaacgatgaaactctgccgctcttagctaaggttgccgtttcccacgctcaggccggtgctgacatgattgctccctccaatatgatggacggttatgttaaggctatccgtgaagcactggatgcagcaggcttcaatcatattcctatcatggcttattccgcaaaatttgcttccgcatattacggtcctttccgcgccgcagcagactctgctccgtccgcaggcgaccgcaaaggctaccagatggaccccgccaacagcgacgaggctctgcgcgaggttgctctggatatcgaagaaggcgctgacatcgttatggttaaaccggcgctggccttcctcgacgttgtacaacgcgtacacgaaaccttcaaccgtccgctgtgcgtttataatgtcagcggcgaatatgctatggtcaaagctgcagctgaaaaaggctggattgacgaaaaacgtatagttatggaaaccatgctgggcttcaagcgtgcaggtgccaaaatgattattacctaccatgcgcttgatgtagcaaaatggctgcaaggcaaataaggagatataacaatggaacatacaaaatctcaggctgcttttgaggaagcacgccaatatatccccggcggcgttaacagccccgtgcgctccttccgcagtgtcggcggtgtaccgccgttcatttccggcggcaagggcagcaaaatctatgacatcgacggcaatgaatacatcgactacgttatgtcctacggtccgctgctcatgggccatgtgcctgactgcgtaaccgacgctatcaaggctgctactgaaaagggcacctcctacggcgctccgacaattgccgaaaccgagctggcaaaattagtctgccgcctcgttccgtccatggatatggtccgcatggtcaacagcggtaccgaagcaaccatgagcgctctgcgtctggcacgtgcctacaccggccgcgactgcatcatcaaattcatcggctgctaccatggtcaccatgacagcctgcttgttaaagccggcagcggcggagctaccttcggtgtacccgacagcccgggcgtacctaaggcagtagctgcaaccactattaccgtaccgttcaacgacctgcctgctctggaaaaggtttttgccgagcgcggcgaagaaatcgcctgcgttatcatggagcctactccgggcaacatgggccttgtgcttccgcatgaaggcttccttgaaggcgtacgtgccatcactaaaaaatacggcgctctcctcatctgtgatgaggttatgagcggcttccgcagcgctcagggcggcagccagtccctctatgacatcgaccccgatatcacctgcctcggcaaggtaatcggcggtggtctgcctgttgctgcttacggcggcaagcgcgaaatcatgcagatggtttcccctgcaggcccgatgtatcaggcaggtaccttaagcggtaacccgctggctatggctgcaggcattgctgcactcacctacatggagcagaacgatgtctgcaaccgtgcagaaagcctctgcgctattctgaccggcggcttggaaaaggcagcagctaaggccggtgtacctgtacagattcatcgcctcggcagcatgttcaccgttttcttcagcgataaaccggtaactgattttgacagcgctgcagcctgcgatctggaagccttcaaaatctacttccactctatgctggagcaaggcatctatctgcctccttctcagttcgaaacaaactttgtttccgttgctcacagtcccgaagatttgcaaaagactatcgatgctgcggaaattgccttcgctgaggttgccaaagcaagaaaataacagctaaagcatcaaaaaaataagcgtgcaggcttgcacaaactgacatcagtcagccgtaagcctgcacgcttttagttttaaattttaaaatcacatcttagccacgaatcagcttaatcgaaggcactgccgctctgacaaatttccacagcagcacggaaatactgcaatccataaccgaatgtagcacagtaccggcacccaccagcacgataacgctcatcacaaagccattggacagctgctccggcgtaaacatataaccgctgaagaaaaagggcgctaccacaagcacctcacccaaagcatgcaatacagcaagtcccagattcagaccgatacctgcaacgaagctctccataatattcggatagcgtttaataattaatgcaccgaccagagcgaaaataatatgggttgctgcacgcgcagcgataatcaggggcgtggttacgaaaaagcccatcgttgtacccaggcagacagctgctgccaccttaggcgaaataaacattgccagaaagattgccacatgcgcaccaagagtaaaggacatcggtccgataatcaccttcggcataaccataggtacaaccaagcctatagcgcacagtacacctgcgagaacaagttgataaatatttttatgttccaagagtatttcctcccattcatgtattagctagtgattatagcactatttgagataacttgcaagtactatgtaaaaatgatttttttaaaattaggttattcacttctcccggtggatttatcccgataatttcccacttatccccagtttttcacaaaagttatccacagtgtgcataacttttgtggattggtggataaaatctgtacattccctttataaaaatctccctatccataaacacttccgcctgctgcttattattccgctctcccagcctcctcgatttgacttattatccataatagcatataatttaagtaggtttatagataattaccgagtttaactcaaaggtggagaatcaatgaaaatatcaactaaaggacgctatgccctgcgcatgatgctggatctggcagagcatcagcaaaacggctttgttgccctcaaggacattgcggcaagacaaaacatttccaaaaaatatctggagcagattgtgcctattctgaataaatcaaacttcctgcaagccaatcgtggctttcaaggcggttaccgtctggtaaacgcaccgcgtgagtatactgtcggcagcatcctgcgcctgacagaaggcaaccttacgccggtagcttgtctggactttaaccctgtaggctgcgaacgccgcaacgaatgcattaccttgccgctgtggcagggtctgaacaaggttattgcagattatctggacaatatcactctgcaggatattctcgacaactataaagctcgcagcattgataattattcgatttaatgcttaaccgccggttgcagaaagccggcggnnnnnnnnnnatctgccggcggtttttttgcgctctaaataaaagaaagcagtccgcgcagactgctttctttgggttaggaaatgggatgtgatatgtattttatctgcttattcagcaaataacggagtggagagataacgctcgccggtatcaggcagcagcgctacgataaccttgcccttgttttccgggcgttttgccagcacagttgccgcatatacagcagcaccggaggaaatgcctatgagcacgccttccttatgggcaatggcacgaccggttttgaaggcatcctcattttcaacggcgatgatttcatcataaaccttggtatccaaagtgtcaggtacaaagcctgcgccaatgccctgaattttatgcggaccggcaacacctttggaaagtaccggagaacctgcaggctctacagcaacaaccttcacattgggattttgggatttcagatatccgcctacaccggaaagagtaccgcctgtacctacaccggcaacaaagatatcaaccttgccttcggtatcctgccagatttccggaccggtagatgctctatgggttgcagggttagcaggattggtgaactggctggggataaagctgttcggagtgctttctgccagctcctgagctttggcaatcgcacctttcatacccttagcaccgtcagtcagtaccagctgtgcgccataagccttcagcagattgcggcgttcaacgctcatggtttcaggcatagtcaaaataattttataaccgcgggcagcagcaacggatgccagaccgataccggtgttgccgctggtgggctcaataatagtagcccccggcttaagaacacccttagcctctgcatcatcaatcattgctttggcaattctatctttgacgctgcctgcaggattgaagtattccagtttgcccagaatctttgcttccagtttgttttcagcttcgtagtttttcagctccagcagcggagtgccaccaatcaaatcagtaatgctagtataaattgccataataaatcgctcctttatctttctataatcagtatttttcttcgtttagtttttgctctatatcaacaggtaaccaaagtcaacatcgtgtattatactgtaagctcctcatcggcaaaatccctcatttcctctgtttataatctctagtaatcatagctgatttataggtattattatactgatttttttcttactgtcaacaaaaagaactaaaattttcttctcttgacaaaaaaagctctgtaatgtaccatatgaaacatattaatacagtaggaattgaattttactcaaaatacgcaacaaaaagacgctgactctgtaaatctcacgccggtaagcgtataatagaaaagtaaaagcaggatttccgctattgaaggagaatgttttattattatgaagcaatttatctatgcagataatgcagctacaacaaaaatgagcgacgttgccgttaaagcaatgctgccctatcttcaggaaatatatgccaatgcttccagcgtgcaccttttaggtcagcgcagtgcagcagctctgtttggcgcacggcagcaggtggcacaggtgctgaactgtacaccgaaggaaattttcttcacctccggtggcagcgaagcagataaccaggcgcttataagcgctgcggccctcggcaaaaagcagggcaaatgccacatcgtttccactgccatggagcatcatgctattttgcacacgctcgaagctttgcaagcggaaggctttaccgtaacactgctgcgtccgcaggctgacggcatcgtcaccgccacgcaggtagcagaagctattacagatactacctgccttgtttccgttatgtacgccaacaacgaaacaggcgccatccagcctatacgtgaaatcggcgcgctctgccgcaagcgcggtgtattttttcataccgacgccgtgcaggccgcaggccatcttgctatcgacgtacagcgcgataacatagatatgctttcgctttccgcgcacaaattccatggaccgaagggaatcggccttttattcgccaagagcaatattcaacttacaagtcttatccgcggcggcggtcaggagcgcggcaagcgtgccggtaccgaaaaccttcccggcatcatcggacttaccgcagcgcttaaagatgcacaggaaaatatgcagcaaaatactgcttatatcaaaggtctgcgcgatgctctgcgtaacggcttagataaaattgacggcgccggtttcaacggcagccgtgagcattgcctgcccggtactgtcaactacagtttcctgggagtaaacggcgaaacactgctttcgctgctttccaacgaaggtatctgctgctcgtccggctctgcctgctccgcaggctcgctagagcccagtcatgtacttctcgccctcggcctgagccacgaaatggctcaaagcgccctgcgcttttcgctgtgcgaatacaatacaattgacgaagtccaaacaattataactaaggttacagaagcggtaaaccgcttacggaggtaaaattatgctgtcaacagctgccaatttaataaataagctcgcctgtgagcacaatctgagcgacgcagagctgttgacgctgataacaagcaccgaacctgacatcaacaacctgctcgcctgcaaagcggataaactccgccgtcaatattacggcgacaaggtctatatccgtggtctgattgaattcaccaattactgcaaaaacaactgctactactgcggtatccgcgccggcaacagcctcgcggaacgctaccgtctgacacaggaagaaatcctggcctgctgcgccgaaggctataggctcggcttccgcaccttcgtgctgcagggtggcgaggatgcgtattatacggatgacaaaatctgcgccatcgtcagcgccatccgcaagcagcatcccgactgcgccattacattgtccattggcgaaaaaagcagtgccagctatcaggcctacttcgatgcaggcgccaaccgttatctgctacgccacgaaactgcagacgtagagcattacgccaagctgcatccagactgcatgagcctggaaaaccgcaagcgctgcctgtttgacctcaaggaaatcggttatcaggttggttccggcttcatggtaggctccccctaccagacaccacaaaaccttgtcagcgacctgcgctttctgcaaaagctgcagcctgatatgattggcataggtccttacattacgcatgagcacacgccgtttaaggatatggcaagcggtactttagagcagacgttgcgactgctgtctatcctgcgactgctcttcccttacgcactgctgccatcgacaacagcgctcggcaccatccatcccaatggccgcgagctaggactccaggccggcggcaacgtcgtgatgcccaacctttcaccggtaagcgtgcgcaaaaaatatgagctgtacgccaacaaaatctgcactggcgaagaggcagcccaatgccgtggctgtctggaggcacgcgtaaaaatagcaggctataacatagtaaccgacagaggcgatgtacgccgcactttagataaatcagaaggagaaaaattatgaacaagaaagcactaatcgccatgagcggcggcgttgattccagcgtttccgcattgatgatgctggagcagggctacgaatgcaccggcgtaaccatgaagctttttgccaacgaggatatcggtgtttccaaagccaacagctgctgctccattgacgatgtagcagatgcccgcagcgtagcaaccggccttggcatgccttactacgttttcaactttgccgaccgctttgaacgcgacgttatcgaccgtttcgttgatgcttacgttaacggcagaacacctaacccttgcattgactgcaaccgttatctgaaattcgaccagctcttcgtacgcgcactagagcttggctgtgattatgttgtcaccggccactatgcgcaaatcagctacgatgaagccaaaggccgctatctgctgcgtaaggcagttgatcctttgaaggaccaaagctacgtgctttattcgctcacacaggagcagttggcacacgctatgttccctctcggaagcctgcataagacacaggtgcgcgaaattgccgaaaagcatggcttcgtcaatgctcaaaagcatgacagtcaggatatctgctttatccagaccggcacctacgctgattttatcgaagcacgcctgggcagaaaatttaagcccggcaacttcgtagacgaggcaggcaacgtgcttggcagacacaagggtattatccattacaccgtaggccagcgcaaaggccttggtctggcactgccgcagcctatgtacgttaaagagattgacaccaagaacaatgctgttatcctcacaacaaacgagggactgttcacaaaaaatgttacagccaagaatatcaacctcatcgactgcgatgctattaccgaaccgcgccgcgtgaaagcacgcatccgctaccaccagcaggagcaatgggcaaccgttacccagcctgacgcagataccctgcagcttgtttttgatgagcctcagcgcgctattaccaaaggccagtccgtggtaatgtatgacggtgacgtagttgtcggcggcggcacaatcgtataataccctgcaaatcaaaagcatcagttgctacaataattgtagcaactgatgctcttttattatactcgttctgaatgagtaataattttaccagttgtcagtaaaacctttttaagcatgattaatattttctttatatatacattgttaacactgactctatatgatagaatataaacaggcagatataaagcgaaacaatatttttataccgctctaaaataagtttgccagaagtaaggaggaataatatgaaatcattaaaaggcaccaaaaccgaaaagaacctgttggaggcatttgctggcgaatccatggcacgcaacaaatacacctggtttggtattgtagcccgcaaagcaggctatgatcaaatcgctgaattatttgagaaaaccgctaataatgaaaaagctcacgcttatatgtggttcaaggaattagaccagttaggcgatactgcagctaaccttttagcagcagctgaaggcgaaaaccatgaatggaccgatatgtatgtaaaaatggcacaagaagctgaggaagaaggtttccctgaaatcgcagcaaaaatgcgcggtgttgcagctatcgaaaaacgtcatgaagaacgctatcgtaaactcttacaaaacatcgaagaaatgaaggttttcagcaaagacagcggcctgaccatttgggaatgccgcaactgtggtcatattgtagtcggccccagcgctccggaagtttgccctgtctgcgctcatccgcaaggtttctttgaagtacatatggataacttctaagcttatacatctccccaaatgcataagagaaagtagaaaagtgtagcgtaaaatttacgttgcactttttctttatttccgtttcaaaaccaatacgcaaatgaaacgcaaatttttacgtttcatttctaatgcaacgtgaaagagccgtgcaaattatgcatggctctaatttcttataatgaatttttaggttaaggaatattttgtacccctacccttgccacttttaacaagcttatttttctccactaagctgttcaacaatctgatagtcttacctctactaaagcctgttatagctgaaatatcagagcttgccaaaactaaattagcggcaaagacttctaaaactgcttgctcatccacatcaagcggaagttgatactccacgctaggcaaagtaaccattacagcattgtcacttatagcaaaattcggtttcacgtcagcgttcctgtatgcttctaaaattctacgcactcctgtaccaaagatttctacatattttaatctgaagaacacattgcctaaagtaggattacgtaaaacagatacataccccttcaaatattcttccttgctaacacctaatggtaagccaccaggagaaactatttctattttatcagtatacatcaatactcttatattagcattgatatcccaagtgcgatgtactaaagcattagctaatgcctcacgaaatgccttttcaggaatctgttccttagtaattcgttcagctccctttatcagttcatatacataataacgcctgaatagcttgatagtcttagcaaattgctcaataactgatacattcttaatgagctccctatctaaaatcacatcattgctgctaccaaatttagcaatatcaatgcccgggaagctgttagtatctgccaaaagttctccggcattgttgaatctgtccttgctgtaatataaattcaaggttctgcatatatcttttgtcagcttcttaatgccaagcttagcctgcaattccttttctaaaatagtaaaccttaattcgctatttccagcaggaagttcatcataatattttcccgtaccaagtaaagtcaaacgattcaattcccctctatcaacctctatggtagaagtatcattacgtttataggcctttcccttgtacaaatacggtttgtccagaccttcagaaacctttaaagctatagtattattttgagaattaattctcagtgtaaaatcaggctttggtgaaatgctgtcattgatacgattttctaaatcaaggcataccttttcaggattatttataccgcaaggagttccgtcatcccttacgccaaataaaatttctccagtgccataattagcataagcactgactgttttcagaaatgtattggtgacctcagacttaaattccaggcttttagtttctttcatctgttacgcctcctatcactattaaacaaattgtagcagaactcagcagtaagtgcaacgtatttttttacgttttattttccttccactttcatctcatttttcatttcaaagccaatacgcaaatgaaacgcaattttttacgtttcatttctgttgcaacgaaaaagagccgtgccttcgcacgactcttttttactgcttattcagcttaacttaccaatgatacttttcgcctctgctgattttaaaagcacggtaaatctgctcaatcagcaataaacgtatcatctgatgcgtaaaggtcattttagaaaagctcagcgccaaatcggcacgcttacgcaatgcatcagtatagccaaaggcaccgccaatcacgaaggtgatatggctgttgccggcaagcgccagctcatctagctttgccgccaaatccgggctgctcagctgcttgccgatgacatccagcaaaattacataggaatttgccggtataattgccagcaggcgttgcgtttcacgctccagcacctgctgcttttctgcgggggaaggattgtcaggcatacgctcttcgttaatcgccagcgtttccagcttgcagaagggcgtcagccttttgctaaactcctctatccccgcagtaagatatttttccttaattttgcctacacaggctattgttatcttcaattgccgtaatccttcggaacctcttccaataccacagttctgctttctctctgaccgttacgcataatagttacttcggctctgtcgcctaccttgcatttagacagagcagtgcgcaggtcaagcgcagtctttaccttgttgccgttaaagctcaggagaatatcgccggggcggatatcagccttcgctgccggactgccgggaacaaccttaacgaggaagataccgccgtgcaggttgatttcaaagccatagcggttagcaatttcctgatccatcagcgaagcacccagatacggtcttgcaacacggccgcgctctgccagctcctgcagaatcggtttagctgtattgataggaatagcaaagccaatgccttcaacaccgcttacagcaaccttagcactgttaatgcctactacctcgccgtcagcatttaccaaagcaccgccgctattaccggggttaattgccgcatcagtctgaatcagattgaacttgcgctcgcctacttcaatgctgcggttcaatgcactgataacgcctgcggttacactgccgcggaattccagtcccagcgggttgccgatagcaattgccggttctccgacctgcagtgtatcgctgtcaccaaaggtggcaacggtaaggttatccgcatcaatttttactacagccaaatcggttacagcatcggcacccagtaccttgcctttaacggtacgtccgtcaggcaggctgacgatgatttccgatgcaccctcaactacgtggttgttggttgcaatatagccgtccttgtcataaataacgccgctgcctgtaccacgctccatcagttgcgtgcggttgaagaagtcgcgcacataagccttgttggtgatacctacgacagcaggaccaaccttcttggcggctgctacaatcggtgtattgcgtgccgcactcagctgttgctcagtcttggcagcaggcttttcatgtactgcggcggaggttttattgtcgccgcagccagcaaccagaattgccgcacccaaaaggccacagacaaaaatattagctgattttttccagatactcttgttcat

SEQ ID NO: 250 - DNA, 9164 bp, unidentified
  source 1..9164: mol_type = unassigned DNA
tcatttttcatccacaacctggaagatgtagaatttcagataatagctctcctgcgcctcccacagtattgggtggtcaggtgactgtgtcctgaactcgacctgacggagtcttttatgtacagctttagcggcttccttaatagtcttggtaagaagctcctgtgtcatgaagtgtgagcatgaacagcttgcaaggtagccgccgtctttgacaagcttaagtcccttcatattgatttccctgtagcccttgattgcgttctttgtagcttccctcgatttggtaaatgccggcgggtcaagtattacaacgtcatatttctcacctgcttcgttaagctttggcagctcgtccaatacatttgcacatttaaaatgtactgtatcctcaagtccgttaagctttgcattggctctcgcctgttcaacagcatattcagatatatcaagtcctgtaacttccctagcacctgcaattcctgcatttaatgcaaatgtacccatatgggtaaaacagtctaataccctcttgtccttgcacagcttctgcattgcaagtctgttgtacttctggtcaagaaagaacccggttttctgtccattcacaacatctatcatgtagtggacaccattctcaactatctcaacattagtgtcaaattcatcaccaataaagccctttactctctccattccttcaagagtacggactttggcatcgcttctttcatatactccacggatatcaatgcctttttcatgaaggattcccttcactttttcgacaataagcgacttaaatctgtcaatgcctaaagcaagcgattccacaacaagcacatctgagtacttatctataacaagccccggcagaaaatctgcctccccaaatataagacggcaggcaaaggtatctactgtgtcaaatctgtattcaaccgcagcccttactctctcctcaataaatgcctcatcaacaacatcagtgtgtcttgcgagcattcttactgtaatcttggattttctgttaataaatccgattcccatgaaataatcatcaaaatcaagcacctcaacaagatgtccgtcaattattccgtcagacatccattcaatttcgttatcatatacccaggcaccgcctgcctttaatgttcttccttcaccttttcttaatcgtatctttccgcatacgctgaataaatcttccattctgttccttcctgccagatttttctgacatgtatcataattattcataatatattaatccgttgacggattaccaagaaaataaaacatacatactcctgcaaccgtaataagaagcgacacgagcttaatccatgaaaatgtagtcttctcacttccaaacagcccgaaaagtcccagcagatacgaaacaattatctgcgcaactacaatcgtaacctccgctttagcaattccaagaccacttatactcttaataactgtaaatgttataaatgcacctatcacacctccaagaagtgtaatcttgttatcaaccttaaacagcttcatgatatcaggtcttccgtcaattacccacataatcgcacaagtcgccagtgctgtcaactgcacaaacattgccgtaacccacacactgcttgcttttgtaacatttgtattaaatgcgccctgtaaactcataagtgcacctgatattattgcaatcaaaaatcctgccattaactaacctcctcattaatctgcataggataattattagttaataacaggatatttattcataatgttatttagtactctgcgtactgttttcattattatttttagttgttttttctattgttgttgcaaatgtactgtaagctgtatcaacatttccaccatcatatacctgatgaagcataatctcatatctcatatacacttctcctactccgatatatttagcttttacaacagagtcagaataaatctggtgtaacttctggtagctttctgctctcttaacctttaaatccgcccttgcacagcttttcttagccatgttcccaagataatctgcataatcataagaaattgctcttgcaacagccttggatgcatctacattcttagtgtacggattaactactgccatcgtagtaacagacattgccttagaatcaaggtcatctcccattgaaggatactcacatattccataatctacatctgtaacattaatctctgcaagactgtctgcatctagcaccgtatagagcatatttccagtagaaaacagatccgcacattctttaagacttactgtatttctgtcaataccaaatgcatcttttaactgagcgtacttagtaagaaccttcttaatcttttcctcattaagagatacctcagccctgttctctgcattaactccgcctatattaatataggctcctgctgccgcataattaaggaacattgaatcaggatcccattcaaacaccattgaaacatcctgattctcatctgtaatctgataattatcacttatattacgaatctggtctatagtatcaactgcttctgcatatttcttattatatacaagaaatgaagtgttgaacgacactgggtaaccatataacttaccaccatacgaacatgcagtcattgcagccttaccatacacattctcattatagacttcaggatacatatcattctcagaggtaagacctgaaagataagccttctccatctcttcagatgtcagaaaatatatatcacacgcattgtcgtttctgaccgattcgtcatatatataagtaatatatgaatcagcctcaatatatacaggattaatagttaccagttcattagatttcttaaattgtctggcaacgaattcaagataagactcatatgcactgtcattataccagacattaactgtaataggtccactaagattaagcttcttcgcagcctgtgtcctgtcatctttattaccacagcctgcaaagactgtcagcatggtaacaatcagcatcatactgataaatcttcttaatttcataaagtaaactcctgattctagaaggatttcttaagcttagctatgcattcatctacatctgccttagtaattacaagtggtggaacaaatcttataacattagttcctgctgagaacagaataagtccgttatcaagtgctctcgcaattacgtccttaggattaactgataactcaagtccctgcataagacccattcctcgtctctcgacaacaacatctattgtctcaacaagctcatcaagcttttcttcaaagtaagcagatacttccttgacattatctaatacatgctgcttctcaaaaagttcgaacaccttggttgctgctgcacatgcaagtggattaccaccgtatgttgttccatggtctcctggaaccaatgccttcgcaacttcctctgtcgccgcaaatgcacctacaggaactccacagccaagagccttggcaactgtaaggatatcaggcttaacgccatactgctggaatgcaaacatacttcctgttcttcccattccgcactgaatctcatcaagtataagaaggattcccttctcatcgcataactttcttacaccttcaataaattctttagtagcaggataaattcctccttcaccctgtactgtctcaaatattatagcacaagttttgtcattaacaagttcctttacactgttaaggtcgttatactgtgcaaacttaattcccggtatcataggtccgaatgcttcctgataatgcttattaccagttactgcaagtgctcccatacttcttccatggaatgaatgctgcattgcaataatctctgcatcagcctttccgttcttgacataataatatttctttgcaagcttaactgcaccttcaatagcctctgttccactgttagtaaagaatactctgtccattcctgaagcctttgtaagtgcagttgcagcctctacagccggttcattatagaaataattagatgtgtgtataagcttatcaatctgtgcctttaatgcatcgttatattctttattgttataaccaagtgcaaatactgctatacctgctccaaaatcaagatattctttaccatctgtatcgtaaagtcttactccgtcacccttatcaagtactatctggtaacggttgtatgtatgaatcagcttctcttctgctgtttctataatctgctgtgtattcatgattactctcactttcctattcttatgagcacacattttcacatgggctaatataatattataacctcaacgcttacggttcgcaattatttatctgaatcaaagaatttttctgcatcatctgaaagaatagctgtaccaacacccttgttagtaaatatttcaagaagaaggcagtgtggaattcttccatcaagaatatgtactcttgatacaccatgctcaatagcatctatacagttattaagcttaggaagcataccgccgccgattgttccgctctctaaaagtgttctcgcctctgaagtagaaagctcagatataagtgaatccttatcgtcaaaatccttatatacaccttcgatatctgttaagaatgcaagcttttcagcactgacagctcttgcaattgcacatgctgcgtcatctgcattaatattgtatgcatgaaaatcatcatcatatccaatagggcatattactgggaggaaatcgtccttaagcaatgaatcaagaagtgttgtgtcaacatctgtcacttcaccaacatatcctatatcctcacccttagaatacttcttctcaacctttaacatgccgccatccttaccactgataccacatgccttaactccaagctgctcaatcattgacacaagactcttattaaccttgttaagaaccatctcggcaatctccattgttggctcgtctgtaactcttaatccattcttgaattcaggtgtcatgcctgacttttcaacccatttgctgatttccttgccaccgccatgaacgatgattggcttaaaaccaacgagtttaagaagaacaacatcctgaataacttttctcttaagttcttcatctaccatggcacttccgccgtacttaactacaattatctttctgttaaacttctgaatataaggaagtgcctcaacaagcacctgtgccttcataagttcctctgtcatatcttttgcgctcataataatctccatttcatatttattcagatatatttgctttaaaatgctgtgtcagatcagcttctgtaatcagcatttatcttgacataatcaaatgtaaggtcacagccccatgctgtagcgcttgcatcgccctgcttaacatcagcaatagcaattacaggattctgtgaaagtatttccgttgctttctcctcgctgtaatctgtagcagttccatctttaacaatctgaagctcacctgcttcactcttaaagaatatatcaaccttttcagggtcaaagtcagcaccagaatatcccattgcacagagaattcttccccagttagcgtcatgtccgaatattgctgctttagtaagacttgatgtaacaattgacttagcgagtgtcttggcttctgccttagttgttgcaccctttacctgaacctcgaaaagacatgtgcagccttcgccgtcacctgcaatcatcttggaaagctctgtaaatacatagcttaagccttcatagaaagcattataatcagcaccctcttctgtaatcttcttattgccagccattccgttagcaagaacaagagctgtatcattagttgatgtatctccatcaactgatatcatgttaaatgaatcatcaacaattgcacttgtcatcttctgaagaagtgccttgtcaatatcacagtctgttgttatgtagcagagcattgttgccatgttaggatgaatcattcctgcgcccttgcacataccaccgattgttaccttagtacctgcaacctctacttctacagcaacctgcttgcttcttgtatctgtagtcataattgcctctgctgcctgtgttcctgcttctaatgaagcatcaagcattggagcaagcttttcaattcctgcacatattctgtcaacaggaagctgcattccgataacacctgttgaaccgataagtactgcattctccggtacattaagaacctttgcaactgcctttgcttcttctgcacatgcgttatctccttcaacgcctgtacatgcgttggcaacaccgctgtttacaactacagcctgtgcaaagtcttcattatatacaatgtttctgtcccatttaacaggagctgcaaatactttgttagttgtaaatgttcctgctgtaacacatggcttctcgctgtatacaagtgccatatctttctttccgttcttatatttaatctgtgcttcacatccggcagccttgaatcctttagctgctgtaacaccgcctttaattatattcataacatcctcctattgtaccatcacatatactctgtcattgtgcatatttcgtcgtgtaaattctgaatttacgctacatttattatggaaacattggtgcaagctgtaatccctcattctctggaagtccgaagagaaggttcatattctgtactgcctgacctgctgcacccttaacaagattatctaacgcacccatcattataagtctgttagttcttggctcaatcttaaatcctatatcaacaaagttgcttccctcaacccagcgtgtttcagggcatacatctttaggaagtactcttacgaaatattccttatcatagtacttgtcatatgctgccttaacatcttcatatgtaacatctttggcaaggttggcgtatgctgttacaagaattcctctgttcattggaactaaatgtggcgtgaagataagctttaaatcatctcttccacatgcataacctaactgttcctcaatctcaggtgtatgtctgtgagttccgacaccataagccttcatgctctcattaacttcgcagaaaaggttggcaaccttagctccacgtcctgcacctgaagttccactcttggcatcaattataattgtatccggattgattattccttcctttaccattggataaagtgtaagaattgatgttgttgtataacatcccggattagcaatgattcttgtatccctgcttacttttcctctgttaatctcacataatccgtaaacagcttcatctatatactgtggtgctttatgctcaagcttgtaccactgctcatatacattaacatccttaagtctgaaatcagcactcaagtcgataatcttagtctttgaaagaatctcgtcattgacaagtgatgcacacagtccctgtggagttgctgtaaatataacatcaacctcattagcaagctgttccatattgtcgtccatacattttgcatctacaagtttaaacatgtttctatatacatctgaataattctgatctatgtaacttctcgaaccgagccatacaatctctgcatccttatgtcctaataataatctgacaagctcgttacctgcgtaacctgtcgcaccgataatgcctactttaatcataactcctccttgttttgcgaagcaaaatgcatatattcaacatttatgcataaaataacgcaaaatgtaaattgataacctacattatagcaactttttttcttatgtaaaggatattttaaagaaattttatatttatacattttaattgcatatccatgtataatatgcataattttttgttgcatttttaaataaagtagtttattataatctgcaggtgcatagcatatgtgttttactatgtaaacttaataatatacggaggaatatataatgaaagaaaaagttattcttgcttattctggcggacttgacacaactgccatcatcccttggttaaaggaaacatacaactatgatgttgtctgcgtatgtgcagactgtggtcaggaagaggagttggacggacttgagcagagagctctctcatgtggtgctgctaagttatatatagaagatatcactgatgaattctgcgacaactacatcgttccatgtgttcaggcacacgctgtttatgaaaataaatatttacttggtacttcaatggcaagacctcttatcgctaagagacttgttgagattgcccgtaaggaaggtgctgttgccatctgccacggtgctactggtaagggtaatgaccagatcagattcgagcttacaatcaaggctttagctccagatatcaagattatcgctccttggagagattctaactggaagcttcagtctcgtgaggatgagattgaatactgcagacagcatggtattcatcttccattcagcacagactgcagctacagccgtgaccgtaacatctggcatatcagccatgaaggtcttgagcttgaagatccagctaatgagcctaactacaagcatttattagttcttggatgcactcctgaggaagctccggatgaaccagaatatgttactatgacatttgaaaaaggtgttccaaagtcagttaatggcaaggctatgaaggtttctgatattatcagagagcttaacagacttggtgccaagcatggtatcggtatcattgatatcgttgagaaccgtgttgttggtatgaagtcccgtggtgtatatgagactcctggtggaacaattctttacgaagctcatcagcagcttgaggaattagttctcgacagagatacaacaacattcaagatggatgttggaaacaagtttgcacaggttgtttacgaaggaaagtgggagacacctcttcgtgaagcacttcaggcattcgttgagaagactcaggaatatgtaacaggtgaagttaagttcagactttacaagggtaacatcatcaaggctggaacaacatctccatattcactttacaatgagtcaattgcatcattcaagacaggtgatatgtatgaccatcatgacgctgacggattcatcaacctctttggtctttcacttaaggtaagagctatgaagaagcttgagaatgagaagaagaacaataagtaa

SEQ ID NO: 251 - DNA, 6407 bp, unidentified
  source 1..6407: mol_type = unassigned DNA
ctatttaatcgtccttagaatactttcaagctcttccatactatcagtctgaagtatgatataccctaaacggtctaaagagttttttatttttttttcagaataaggtcttatttcagaccgaaaaacagccgatgaccgggaagagcttagaaaatccacacaacgctgatagttgagcggattaaggaactgtaccgctgagcatttttcatgtttgcgaaggacatcaacgggcaaaccaagagaacagttcaccagatttctcagcatatctatcccggttgacaatggaaccaaatcagaggttatataatctcctccaagccggcaagcaatttctatgatataagcgcccgattcattcagctttatttctgtatgcgagggacaattattaagtccaatcaggcaaagtgcttttgatacggtctccgaaaccagctcccactcctgtttcgttatacgcgccggttcaatgtgcgtatcttcaacaaagaagccttctgcctcaccgatacaaagtttctccgtaatagtgacaacggtagttttattgttttgcgtatatgtttcaacactgaattcacggcctgttataaagccctcgacaatggcctttccggtacgggaataaccgagagcttcggaaaaagcaagtacaagttctttatgatttgtaaccttttttactccgcggcttgcagaggaatctaccggtttgacaatatatggataatcttgcaatgtgcccaagtccgtatctttatcacaaagcatgaaaaatggtacatcaatcccgttggccgcaaacatttccctctgcaagtatttgtttgtacagatttttgcgacctcagtggacatggacggaagccccagctgttccccgacataggaaaccacatttacaggcgcgtcacttgtagtaagtatgccgtcaacagagtgacgtttggcacattccaaaacaccttccttatccatcgtgctgacaagaaccggttccgaggcgtaccccattcccggagtattcgcatccatatctgcgactatggtatgcaatcccatatcgttcgcctttcggatgacaggaacctgcatttcacctgcgcccagtatcaataatcttttattcatataaccgaatttatcacatcacagatctttcttgcctgtgcttcactgaaccagaaatcattaaacaaattgacgatatgcttcacctccacttccgcaacaggagaagaaacacctttgaacatgtatgaaaccgaagggaaattagtcccggcaaacagaccggccttgaatattgcgtcaagaaccttctgccggttctcgatgacaatcatgaacctccagttctggaaatcatctcccatctgaatcgattcaggaagcagattcctgtatatcttgtttattttctctttttccgcaatcacttttgggagctttctttcaatgatgtcaaaatattcctcatcggtcatttgcaaatttgaggcgtccagccaaggatagtcagccggaagcatatatctgacattctccaggagacatttccttatatataccgaatgcttttgttcactaatgctatcatactaataatcaacaacttcgtaccccctaaaacttgcatagccaccataggaaagttctatgaatttagcatatccggtactgtaaaggcagagatccacattttcaggcaaggaatctaccaattcgggaatgcacaaacaacaatcatcaatgatacaaagattttgatcgagacttttcactgctcggtaaaattctttgttgtcatactttttcccgtaggcatgcacaaatacaagaccggaatattttcccgcctctatagctgtcaaacatttctcggttgacatggcatggctttcatctatgtctataaattcaaaaccgacacctgctttcataaacgacaggggcactacaggacacacatttgccggcaataagaacggtttatcaaaatggttgccagacagataattatacaatatggccgaagctctttgtgaagttacttgcatatcaacagacttttaaacaaattgacaaaccgtttgggaatatccggagtgatggcatgtcttttacgaatggccatcttatccaaattctcagcaacaagagtaaaggcagcggcatcggtataatcacccaccccctgaatcagcccttcacgcaaaaacatataatagtcgtactcctgattatcaacataataccctcctataacaggagttccacaggccaatgcctcattcatcatcgtagaggcaggcaatatggcgacatctacagtactaaacaagtctgcaatggaaccggcagacaaattcttctgataggttactttggggtcatcaaccatattctcggctgcatacgaatcaccgacaattgccgttatcttcttcacattgtctttggctttaattgcatgaatggtctgatacgtcaaattcaagaaatcagaaccaccaaaagccaccaatacatataaacctcctgaataattgttccgtttattctgcagcgcaacattgaagaaaggcctcctcaacaatgaaaattgaagcccaaaggcaaattgagtatatggttcacacgaatagtcatcacgcgtgtaacccaatccctgattgactataagatcagccacatagtgcttgtcgtgcatatcatccacacacaccagacagcaacctttttgcttgatggcacgctggtaatcagtagtaaagaaatagttgtcaagtaccacaatttcgtcaccttgtaaaagggaaaggaactcatcataatgcgattcttcctgtaaggggatgaaaggacataccttctccatctcactcacctgataaggggtaggatggcaagtaaagaaggtacaatcaaaatcgtccttcagcatatcggccaaagccagagtacgaataaagtgaccgtagccgatggcagcacttgcatcggcacggagatagattttctgcattacatcatttatgaagcaactcatacttcatctctgccaatgcccagtcagtctgtgtatcaaggtcctgcacttcaagttcggaaagtaccaacccggctgtattctcaccccaaaaagtccggctctccacaaagggagcagtgcgagagaaatagaactgaccggcatcgtgataaatcggttctaaatcttgggaacgtgcatttttgtattcgggataaaccatactaatttttccatccacgatgtgaaggctgcgctgtataggataggaataagccacacaagtgaaaacggaatctatctccgaattcatttttccgtatgcttcccggagtctttcgggagtgacaaaaggagccgttgagtaaatgcaacaaaccgtttcaaactccctgccttgctctttatacttcctcagtacttcaagaattacatcatcagtaccggcatagtcatttgacatctcggcactccgcataaaaggaactttggcaccatacttacaagctattccggcaatctcctcatcatcggtagaaaccatcacctcctcaaaaagaccgctttgtaaagctgcctctatggaatatgtaatgataggtttacccataaagggcttgatattcttacgcggaatacgtttactgccgccacgtgcaggaatgattgctatatttttcatttcgctacaaattctataaccttttcaatcacatactcctgttcctcgtccgtcagcgtgggatacatcggaagactcagacaatgttcgtaatactcttctactataggtaaatcgcctttcctattgccccactgctgatagtaaggcatcagatgaagcggagcataatgaacctgcgcatagacattgttctcgtgcagataattataaaggcccaagcggtcagctacttgaatgatataaaggtgataagcatgatagacatcggcagcattgaacggagtcttgatgccatctattccggaaaacgcttcattatagcgtctcacgatttcatggcggcgttcaagacctgctttcgcacgctccagctgagaaatacccaaggcagcctgaaaatcagtcagacggtaattataccctaactcctgcatctcataataccagccaccatgatgctcgtgtaataaagcagggtctttcgtaatgccatgcgtacggtaaagacaaagcctgtcatagagctccttgctgttggtggtcaccatgcctccctcacccgtagcgatatgtttcacgggatggaaagagaatacggcacagtcggcaaaacgaccgttaccacaatgttgtttcttgcctttactgtccatgaaatagccgccgggagcatggcaggcatcctcgataatccacaaaccgtactcgtcggcaagctttctgaactcttccagatccaaaggatagcctgcaaaatcaactggaacaatacctttgtaagtaccgcggggagaagctttaagcatggcttcaagtttacggatatccatgaggtaagtatccttgtcaatatcacagaataccacctcgccgccacaatagcggatgcagttggcactggcagcaaaggtcatgggagtgacaatcaccttgtcacccggctttacattcagtgcggtagctgcaagatgaagccctgaagtggcattgttcaccgctacggcatattgtgcacctacatattcggcaaatttcgtttcaaattccctgattttgggaccttgtgtcaggtaatcgcttttcaaggtatcgatgactgcccggatatcctcatctgtgatatgctgacgaccgtatggaataggcttgcttatcatttcacctcgaaattagggtcaacgtatttctttatattctcgcgcatagtctctactgtctcccactccgtattgttgtcactgctgtagtggaaaccgtcgggaacgggtactgcattgtgatgtctgatgaactcttcgcgactgtgcttgaaagatacggaaggaagaatgacataatatctgcccaaatcgattgtatcaagagcatcggttacagtaatcatctcctcgtgcagcttctctcccggacggatgcccacttccacctgcggcagattgggtgcaatggcggtagccacgtcctggatatgataggaaggaatcttaggaataaagatttcaccacccaggtgatgtccgatggcatacatgaccaaagcgacaccggcttccagcgaaatgttgaaacgggtcatgcgcatatcggttatgggaagttccttcgccccgttgtcacgcttgttgataaagaaagggattacggaaccgcgggaacccatcacattgccataacggactacggagaaccggatgttcttggaaccgctgatattgttggcagcagtaaacagcttgtcggaagtgagcttggtggcgccataaagattgatgggggcacatgccttgtcggtagaaagggccaccacatgctgtacaccggtggcaagagcagcctttatcacattctgcgcaccgtgtacattggttttgatgcactcttcgggattgtattcagcggtatccacctgcttgatggcggctgcatggataatcacgtccactccttcgcaagcccgcgtcaggcgttcgaggtcacggacatcaccgataaagaaacgcagttgcggatacttatgaccgggatatttctgtttcagctcaaattgcttcagctcatcgcgggagtaaataatgattttctttacttgcggataatcacggaggatggtttccacaaacttctttccgaaggaacccgttcctccggtaatcaatacggatttattgttaagcattataatgaaaagttttattcatcgatatattcccacggatagggattgtctgtcacattctgaaactcatcaaccgcttcctgctgtttgggagtaagtgataaggaatcccaggaggcgatgatggaacggccttcgtcggccaaagactcgtcgaacacttcaccgtagcaggcggtaagcagacggagcttcagtaaggaagcgggaagggcatcgagcacatcccaacaacagtccagcactttctggacatgccgctgcttttcgccatggtccacaaaagaggcgctgtaacccataagaagggcaagacagacatttgcctgctcgtcgatggtagtgccttttacacccgaccggtacaaagccatggtaagacggtagacctcaccgttccgccgtgacaagtcatcgctatagacgggactgccgtccatacccaaatacatcagttcgtgcgcagcacgctgaagagtgattgcttcttcggaaagagacat

SEQ ID NO: 252 - DNA, 11524 bp, unidentified
  source 1..11524: mol_type = unassigned DNA
atgaaaaaaggacataaatacggcacacaccgggtaatctccccgaagggcgtgcttccccagccggcagacaagctggacaacaacatggacgagatctacgacaacgagattctgatcgacgtacagaccctcaacatcgactcggccagcttcacccagatctcgaaccaggccggaggcgacaaagccaaaatcgccgagatcatgctcgacatcgtcgaaaaacaaggcaaacaccgcaatccggtaaccggatcgggcggcatgctgctgggcacggtcgagaagatcggcgacgcgctcgtcggcaagaccgacctcaaggtaggcgacaagatcgccacgctggtttcgctgtcgctgactccgctgcggatcgacaagatcaaggagattcgccccgatgtcgatcaggtcgatatcgacggcaaggcgatcctgttcgaaagcggcatctacgccaaaataccttccgacctgcccgaaaagctggtaatgtcggccctcgacgtggccggagctccggcacaggtagccaaactggttcgccccggcaacacggtgctgatcatcggcgcagccggcaaatccggcatgctctgctgctacgaggctcgcaagcgggtcggcgtaacgggcaaagtgatcggactctgttacagtcccgaggagaaggagcgcctggacaagctgggcttctgccacgaggtcgtctgcatggacgctcgtcagccgattccggtactcgaaaagattacggagctgaccaatggcgaaatgtgcgacatcaccatcaacaacgtgaatgttcccgacaccgaaatgaccagcatcctctgtaccaagaacacgggcatcgtctatttcttctcgatggccacgagcttcacgaaagccgctctcggcgccgaaggcgtcggcagcgacgtgacgatgattatcggaaacggctatacgaagggacatgcggagatcacgcttcaggagttccgcgaatgcgaagccttgagaaagatattcaccgagctgtacgcctaaccgatacgaacgacacctgccgcccttcctcatcgtccccgccggcgcaaattaaaaaagcaggacggatccgacttaccgaggcagggaggcactcatcgaaaatagccgtccgccgcatccgttttcgatgagcggacggcgaaaacaaacgctcgctacatcggcgaaaaaacacaaatcacaacaacgtaacaaccgaacgaaacaaataaaatcaaatgacacctctcacacccgcaatgagccgcagaaaagaattctttcccgaagtgaccgaccagcaatggaacgattggcactggcaggtaaaaaacaggattgagaccgtagatgagctcaagaaatacatcaagctgaccgctgaagaggaggaaggcatccgtgaatcgctcaaaacgctccgcatggccatcacgccctactacctgacgctgatcgatccggaaaatccgcactgcccgatccgcaagcaggccattcctaccgtcgaggagctgaagcgctcgcccgccgacctggaagatcccctgcatgaggacagcgactcgcccgtaccgggtctgacgcaccgctaccccgaccgggtactgttcctgattaccgacatgtgctcgatgtactgccgtcactgcacgcgccgccgcttcgccggccagcacgactgtgcaacccccgagaaacagatcgacgactgcatcgactacatcgcccgtacaccgcaggtacgcgacgtgctgctctcgggcggcgacgccctgctggtgagcgacgaaaaactcgaatatatcatcagccgtctgcgtgccattccccacgtggagatcatccgcatcggctcgcgcaccccggtcgtgctgcctcaacgcatcacaccggaattggtgaacatgctcaagaaataccacccgatctggctgaacacccacttcaatcatccgaacgaagtgacccccgaatcgaagcaggcctgcgcacgtctggccgacgccggtattcccctgggcaaccagtcggtgttgctgcgcggtgtgaacgactgcacgcacatcatgaaaaagctcgtgcacgaactggtgaagatgcgtgtgcgtccctactatatttatatctgcgacctgtcgctgggcatcggacacttccgcactccggtatcgaaaggcatcgaaatcatcgagaacctccggggacacacctcgggttacgccgttccgacattcgtcgtggacgctccgggcggtggtggcaagattcctgtcatgccgaactatgtcatctcgcaggctccgaaccgcgtggtactccgcaactacgaaggtgtgatcacgacctatacggaaccgaccgactacaaggacgaatgccactgcgaagagtgcgagaaagcacgtcggaaggaaggcgtggccgagttgttgagcggcggacgtctttcgctcgagccgtccgaattgagccgcaagacccgtaaccacaaccattagaacgtaacgctgcaagaccagcccgcaccggattgggattcgtaacgaacatatcggatttcggcagcctggccatcgtcggtctggagaagaacacgggtaaaaccgaatgtctgaactacattctgggacaactcggtggtcaggcggaccgtttcgccctgacttcggtcggaatcgacggcgagagccgggatcaggtgtgccagacggcgaagcccgagatcgagattcccgagggaatgatcttcgtcacctcggagaaacactaccgggaaaaacggctcgcggccgaggtcctcgacgtgagtctggagcggacggcgctcgggcggctgataacggcccgcgcgaggatgagcggcaaattgctgctctccggaccttcggacacggcgggcctgaaagccctgatcgaccggctcaaagcccggggcgtaggcacgacgatcgtggacggcgccctgtcgcggttgagcctggcttcgccggcggtcaccgaagcgatgatcctggccacgggagctgccgtcgcgggaaatattcccgaactggtccgcaagacgaaatacgtttacgaactgatcggaatcgaagagatagaggaggcgctgcgtacccggctcgatcctctgacacagggggtgtgggccgtcagcgacggcggcgaaccgatcgacctcgaattaccctcggtgctgatgctcgaacggagcggagagaacctgttccggcacggccggcggatttacgccatcggcatcgtcacggacaagctgttccaactgctgcgaacgcaacaacgggaagtggagttgatcgtccgcgactttacgcgggtgttcgcctcgcccgaagcgttttacgccttcctgcgccggggacaccggatcagggtggtacaccgcagccggctgctggccgtcacggtcaatccgacggctccgtcggggctggtgctcgactcccgacggttgtgcgaagcgatgcaggaggcgttgcaaataccggtttacgacgtaaagaaaatgcccgaataggaacgaatacggctcccacgaacagaatcgaggatcttaaaatcccctccgaggaggggagtcaaaggaaggtcagacgctctgacacggcagaaggccgtgaaataaatacgcgaaaccgtgcaaaattgcatcgaataaccagaaaacgaatgcgactcaaagaggccatacaacataccagcggactgcgctgcgtcgtcgaaggaatggagatctgttcctccgtcgggcgacgtatgctccatgaaatgacatggctcgacaaggagtcggcgatcacggaggaacacgaccgtatcgcctcggtgctgcgcctgctcgaaaccgaagagggacgcgaccgcaccgaaacgattcgccgcaaactggccctgctgcgcgacatccgctcaacgatcgaacgcacgggcggcaactgcgtattcgacgacatcgaactgttcgaattgaagtttttcgcgctgctggcggaagagcttcgaccactggcttcgcaagggcatcttgcggaacttcccgagctgaacggggtcgtcgatctgctcgatccggaaggcaaccggctcccccatttcttcgtctatgacgcctactcggaggagctgacgaccctgcgcaaacagatcaaagcacgcaaacaggccggagccgacgagtctcaagtgcaggagctctatttccgcagcgtggaaatcgaagaccgcattcgggagagactctccgtcgaattgcggaaataccacgaagcgttgcaacaggcactcgaccggatgggatggctcgatgtggtgatcgccaaggcgatgcaggcccgcgactggggccttacccgtcccgcgataacgcaggacacgacctccttccgaggcttgttcaaccccgagttgcggatttcgctcgaagcggccgggaagcgattccagcccgtgaacatccgcctgacgacgggacctacggtaatcaccggcgccaacatgtcgggcaaaaccgtgttgctgcacagcgtcgagctggcccagtacatgctgcaattcggattttacattgcggccgaaagggcggaaatagcccttgtggacgaagtgcactgctccgtcggcgacggacaggatcaattgagcggcctttcgtccttcgcggccgagatgatgcggatggacgaactggccaaaagcgtccgggcaggcaggcgggtgctggctctcatcgacgaaccggcccgcacgaccaatccggtcgaaggaagggcgatcgtgaacggtgtcctcgaatttctggccgactacgaagtcccttcgctcgtgaccacccactacaacggcatcgcggctccgtgctgcaagctgaaggtaaaaggcttctcggaaacgaacgcggaggagaagatcacgctgaaaaacatcaacgatttcatagactactcgctcgaggaggtcacgacggacgaagttccgcacgaagcgatccggatcgcccgtattctgggcatcgacccggagatcctccggcgaatcgaacgcaacgaagaactcaaaaacaaccaatgacggcagccgtacggcacagcctacatgaacgatatgaaaagcaaattaggaatagactttaaccaggtggaacacgcccggagcgtagcgcgcaagatcgccgacggggtgcaggattttgtggaaggttatacgacggtagccgtcgagcgaacgctgtgccgtctgatcggcatcgacggcgtggatgccaacgcggtaccgctgccgaacgtggtggtggaagagctgcgggagaaaaacgtattgggcgaaggcgccctgttcttcctcggcaacgcgatcgtcgaaacgggactcacaccccagcaaatcgccgaagagatcgctgccggcaaactcgacatcacccgctcggccgtatgtacggcagccgagcgcgaagcggcgctgaaaccgtatatcgacgccagcatcgccaaaatcgcagccaaccgccagcgtcgagaaaactacatcgccaccatcggcgaagggccgcgcccctacctctacgtaatcgtagcgacgggtaacatctacgaagatgtcgtacaggcgcaggccgcagcccgacagggcgccgacatcatcgccgtaatccgcactacgggccaaagtctgctcgactacgtgccctacggcgcgacgaccgagggattcggcggcacgttcgccacgcaggagaacttccggatcatgcgcaaggctctggacgaagtaggcgaagaggtcggccgctacatccgcctttgcaactactgctcgggactctgcatgcccgagatcgccgtaatgggtgcactcgaaggtctggatgtgatgctcaacgacgccctgtacggcattctgttccgcgacatcaacatgcagcgcacgctggtcgatcaatatatgtcgcgcgtaatcaacggcttcgccggcgtaatcatcaacacgggcgaggacaactacctcaccacggccgacgcggtcgaggaagcccacacggtgctggcttccgacctgatcaacgaacaactggccctgctggccggcctgcccgaggagcaaatgggtctgggacacgccttcgagatggatccgatgctcgaaaacggcttcctctacgagctggcgcaggcgcagatgacccgcgagatcttccccaaggctccgctgaaatacatgccgccgacgaagttcatgaccggcaacatcttccggggacatatccaggacgcactgttcaacatggtgggcatctggacttcgcagggcatccagttgttaggtatgccgaccgaagccatccacaccccgttcatgtcggaccgctacctttccatcgagaacgcccgctacatcttcaacaacatgaagaacatcggcgacgaagtggagttcaaggaaggcggactgatccgcaaacgtgccaaggaggtgttggacaaagctaccgcactgctcgaacgcctcgaaaaagagggactcttctcggcgctcgagaagggaatcttcgccgacatcaaacgccccatgaacggcggcaagggtctggagggcgtgagcagcaagggccgcaactactacaaccccttcgtggagattatgaaaaacggcagtcgcgccgcagcgaaaaaatgatattccgatgctgcaagcacgaccaaacgccttattttaactatattagcatattgattctatgagtggaggattatattcaaccgaaggcagggatttcgaccagaccctcgacctgaaaaagataaagccctacggcgacacgatgaacgacggcaaaacgcagttgagtttcacactgcccgtgcccgccggcgacgaagccatcgaagcggccaaacagttgatgaaaaagatgggcttcgagaacccgcaggtggtattccaccgggagctgacggccggttacacgttcttcaactgctacggaagctgtacccatacggtcgattattcgaatatccatgtcccgaaagtcgaatcgaccaaatgggacatggccgaaacggacagcttcatccgcgagcagatcggccgcccgatcgtggtgatcggcgccagcaccggcacggacgcccatacggtaggtatcgacgccattatgaacatgaaaggcttcgcaggtcactacggactggagcgctacgagatgttcgaagccctcaacatgggcagccaggtaaccaacgaagagttcatcgccaaagcgatcgaactcaaggccgacgccctgctggtttcgcagacggtgacccagaaggacattcatatcaagaacctcacggagctggtcgaaatgctcgaagccgaagggctgcgcgacaaagtgattctggcgtgcggcggcccgcgcatctcgcacgaactggccaaagagctgggctatgacgccggcttcggcatgaacacctacgccgacgacgtggcgtcgttcatcgcccaggagatggcccgcagaatgcaccgcaaataggaaacggtcccggattccagaaccgccccgtttcaagacagtacgacgaacagacaaaaacgacataaatctatggaaaaggaacagatcagagaaatcatcgccaaacgcgtggcgatggaactcaaagacggcgacgtggtgaacctcggtatcggactgccgacggccgtccccgattacctgccggaaggcgttcaaatcttcctgcagagcgaaaacggcctgctcggtatgggcccgacccccgcaccgggcgaggaagaccccgaatttatcaatgccggcggcggattcgtcacggccctcgagggcgcctcgtgcttcgacagcgccacctcgttcggcatcatccgcggcggtcatgtgaacgcttcggtactgggagccttgcaggtcgatgaaaaaggcgacctggccaactggatcatcccgggcaagaaagctcccggcatgggcggtgcgatggacctgctcacgggtgccgacaaggtgatccttgccatggagcacacggccaaaggcgcacccaaaatcctcaagaaatgtacgctgccgctgacggccaaaggctccgtgaacatgatcgtaaccgaaatgggcgtcatggagattaccccggaaggcatcgtgctgacggaaatcaaccccgaattcaccgtcgaacaggttcaggccgctaccgaagcgcacctgatcgtgtccaaggatcttaaacccatgaaaaaataggcccgccatgatcaaaacaggagataaataccgtcacgaagtgacctatacgcaggaaggcgtgatcgctttcgccgaaatcacgggcgacaaaaacccgatccacctcgatccggaattcgcagccaaaaccccgttcggccgtcccatcgtgcacggattcctttcggcctccgtattctcgaaggtcttcggaatgctcttcccgggacagggcaccatctatctctcgcaggagatgtcgttccgtgcacccgtcttcgccggggagaaatatacagccgaattcgaagtaatcgacgtaaacaccgaaaaacacatcggtacaatcaaatgcctgctgctcgatgctgccggcaaagagtgcatcacgggcaccgccaaactcaaacacaacaaagaattcatctaaaaagagataaccatgaaaagacttgagaacagagtcgccatcgtcacgggcggcacagccggtatcggcgaggcaacggcactgcgtttcgcacgcgaaggcgcacaggtagtcgtatgggcacgtaacgaagcccgcggtaaggaaatggagaaaaaagccgcagccgaagggctcgccatcaccttcgacaaggtcgatacgagcgatttcgaggcggtaaccgctgcggccaagcgcgtcgccgacaagttcggcaagatcgacatcctgatcaacaatgccggcatcaccaacgacagcacgctcaagaaaatgaccgtcgaacagtggcagaacgtgatcgacgtcaatctttcgggcacgttctactgctgcaaggccgtgttgaactacatgctcgaagccggctacggacgcatcgtcaatgcctcgtcggtagtagggctttacggcaacttcggccagaccaactacgtggccacgaaagccggcctgatcggtatgaccaaaacgatggcccgcgaactgggacgtaagggtatcacggtcaatgccgtagccccgggcttcatcgaaaccgaaatggttgccaagatgcctgagaacgtactcgacggcatgcgggccaaagttcccgtaggtcgcctgggtcgtcccgaggagatcgccgccgcctatctctacctcgcatccgacgaagcggcctacgtcaatggtgccgttttgagcgtagatggcggtatgactgtttaaaatcattaaaaaaccatacttataaaatgaatttcgaattgaccaaaaccgagcagctgttccggcaaatgatccgcgaatttgccgaaaacgaggtgaaacctctggctgccgaaatcgacgaagaggagcgtttccctgtggaaaccgtagagaaaatggcaaaactgggaatcttcggtattcccttccccgtcaactacggcggtgcaggcggcaacaacatcctttattcgatggccgtcgaagagctgtcgcgcgtatgcgccactacgggcgtggtcgtatcggcacacacgtcgctctgcgccgctccgatttatgagcacggtaccgaagaacagaaaatgaaatacctgcccaagctctgctcgggcgaatggctcggcgctttcggccttacggagcccaacgccggtacggatgctgcggcacagcagaccacggcagtcgatgcaggcgaccactatatcctgaacggcaacaaaatcttcatcaccaacgccgcttacgcacacgtttatatcgtgatggcgatgaccgacaagtcgcagggtacgcgcggtatctcagcattcatcgtcgagcgcgacttccccggtttctcgatcggcaagaaagagaagaagatgggtatccgcggttcggcgacctgcgagctgattttcgagaactgcatcgttcccaaggagaatctgctcggcaaggtcggcaagggcttcagcatcgctatgaagaccctcgatggcggccgtgtcggtatcgcttcgcaagccctcggcatcgcacagggggcgatggacgaaaccgtgaaatacgtcaaggagcgcaaacagttcggacggacgatcggacagttccagaacacccagttccaactggcagacctggataccaaaatcgaagctgcccgcctgctggtacgtgccgcagccttcaagaaagaccagaagctcccgttctcggtcgatgccgcccgggccaagctctttgcagcggaaaccgcaatggaagtgacgaccaaggccgtgcaattccacggcggatacggctacacgcgcgaataccccgttgagcgcatgatgcgcgatgccaagatcaccgagatttacgaaggtacttccgaagtacagcggatggtgatttcgtcggcactgttgaaatagcggcgggcgaccgtgcatccggttccggaataaaccccgaagccggtcgtactcccctcgcaaggacacataaggtaaaaacaataaaaaacagatattcgaatgaaaattgtagtttgtataaaacaggttcccgatacgacggaaatccgcctcgatcccgttacgggaacgctgatccgcgacggtgtgcccagcatcatgaaccccgacgacaaggcgggactcgaaatggctctggagctgaaagaccagtacggcgcacacgtcaccgttatcacgatgggtcctccgcaggccgacgacatcctgcgcgaagccttcgcaatgggtgccgaccgtgcgattcatctgagcgaccgcaaattcgccggtgccgatacgctggcgacttcgaacgctatcgccggtgctctccgcatgctggagttcgacctggtaattaccggtcgtcaggctatcgacggcgacacggcccaggtaggcccgcagatcgccgaacacctcggtctgccgcaggtgacctacctcgaaggcattaaatacgaaggaggaaaccggctcgtcgtcaagaaatggacggaagaggggtatcagttgctcgaggtggaaaccccgtgcgtggtaaccgtactctcttcggccaaccggccccgttatatgtcggtacgcggcatcgtggaggcatacgacaagcaggtggaagtctggggtttcgacaacatctccgtcgaagagtcgaaactcggtcttgccggttcgccgacccgcgtcttcaaatccttcacgaagggtgcgaaatccgcaggtaaggtcttcgagctggagccggccgaagcagccgatctgatcgtcgagaagttgcaagaaaaattcataatctga

SEQ ID NO: 253 - DNA, 20395 bp, unidentified
  source 1..20395: mol_type = unassigned DNA
atgaacatcacgctatccaacacgcgcctcttccgcggcattggcagtgatgagctgccgctgctgctgcaatgtctcggcgcggtgcaaaagcactacgaccggggcgagaccattctcgctgagggcgcgccgaccgagcagctcggcatggtgctctccggcatggccatgatcggctatgacgatgtctggggcaaccacagcctgctcggtcacgtcagccccggtgaggtgtttgccgagccctatgcctgcatcccgggcgagccgctgctcatcagcgtgaccgcctcggaggacaccgaggtgctgtttttgaacatcggcaaggtgctcacgacgtgcacgaacgcctgcccgtttcacgccaagctcatccagaacctgctgaccgtgtgcgcggctaagaacctgcagctctcgcagcgtatcctgcacacggcgccgaagggcatccgcgcccggctcatgtcgtacttttccgagtgcgtcaagcgcgccgggcaatacagctttgacattccctacaaccgccagcagctggccgactatctgggcgtggaccgcagcgccatgtgcagcgagctgtcacggatgcagcgcgaggggctgctgagctatcacaagaaccatttttccgtgcacgaagcactggagtaaatcgacgaaaggcggacacaacatgacgagagaagaatacgcaaagcggatgaaaaagcaccccgactgggccccgggccgggacgcgatcgaggcggcctttgccaagcgctatcccaagacggagccggtgtgctttgagagcgagctgcacgaccgcgcggccttcggcggcgacgaatatctcgacggcttcgccgtctatgacacgggcaggggctatcagcacatcgtcacctacggcatgagcgagctgtatccgagcatggcggccttcggcgccgagtacagcaagtggggctatgagatgacgatgaaggtgcgcgagagctatgccgagaccggcacatgggcgctcgatctgctggcccagctggcgcgctacacgttccagaccggcaatttcttcgagccgggcgcctacatccccggcgacggcagctccctgcacccggagctgggctcggccatcacggggctggccatcgtcagcgacacgaccgtcgccccgatcgaaacggtacacggcagggttgcatttttgcagctcgtcggtctcacgcagccggagctggacgcgatcacgcgcgacccggacacactgaccggcatcctggagcggatgcgcgcggagaatccggagctggtgctcgacatgcgcagaacgagatccttcgtgtgattgcgccagcgctggcagttttctccgtggatcggcgcaaatgtctgcaaagcccacgaacgaatcaggagaatagatacacatgaagtacattttctgcacggacatgaccgggcgccaaaaacatactcggcccgacggtcagtgctttctgtcagcagagctcccgcaggtcatgcgcgacgggcttgaacaaacggcacacacactgtcacaggcagaacggcggcacaagctgccgggcattttgctgattatgcaatatatctgcctggtgatcggcatggtctgctgcggcgggcttgtgcgtgcacttgcgggcagatcggtcagtctggcacaggcctaccacaatgcgcctggcattttctggaccggtgcggtcacattgtgcatagccggtctgctcgcgctctggcagcgtgttcagacggcttccgccgaccgcagcagcagtgtccaggcagcccgaaggaaaatgaacgatcagatccgcggtgcaaaagcttatctcggcattcccggccaggttcagcccgttgacattcttctgttcgactaccgcagggaagcgcagggcctgaagatcctcaacacggcacataataccgagttctggctctaccgggatcaaaacagcctctgcatcgccgacgagtatcaggtatacgcacttgcactgcaggaactgcagcgtatccgcgttgtgcagcgtgtgatcccgatgaccggctggaacaaaggcggccaaccagatcaggcacgttttcggcgcagcggtgtgatgtgtcacgagggcgcagctattggcctgcagttttgctgcgcattggaactgacccataacggcgagcaatacgcattgctgtttcctggctatgagcttccggaaatccagaatctgacaagattgtccgcacctgagctgcctgcggcagcacctgaaaagaagcgaaaagcagcacccaaaaagcatccaccgaacggcgaaaaaatccgccccctcttttactggcggattccgaagggagaaaatgtggcgctgtggttcacgcctttggcagacgtagagtttcaggcagcgcacccacggctgtacacttttctggtcatccttgcgatcgcgctgctggtagccccgatggcaggatatttgtctctgacaacgcactatttccccgacgcaaacagcccatggctgcttttgggtggcgttggtggtttcctggtcgggtgcagtctgttcaacatccttgcagcgtggctgcatcagtactttggacaaattgtaacgatttgtttggcagtgctcggtttcgcactgatggctatcagctgccttctgctgtgatcgatcgcttttcatcggtcggacaaaaaaccgtgaccttgaacagaggtctaaggaacgcatccgtgactttgagcagacgcacggtgaaattgcctgcaggatatatcaaacccttgaaaaaaacagccgcaccgtgacgccacggtgcggctgtttggttctcacagcttgggatcagttatcctttttcgcgatcagctccgcgcaggcttcgccgaggatgcggatgcccttttcgatcacctcatcgctgctgttggagtaattgatgcggaatgtgctgacattgcgctccttttcatagaacgggtcgcccgggcagatagcgacgcccttcgcgagcgcaacacggtaaagatcgactgcggacatgccattcggcagcttggcccacaggaacatgccgccctccgtcggcgtgaactccacgccctccgggagatatttgcgcatgcagtccatcatcagctccgccttgtgcttgtagagcactttcgtcttctcgatgtgcgcgtcgatgtcgttgtccgcgaggtactgtgccagaacgagctgcgagaagatgttggtgtgcaggtcggcagtcgccttgtagctcaggagcttttcacgcagcgccttgttgcgcacgcacacccagccgatgcgcatgccgggggcgacgatcttggagaatgtgccgagcatgcagcactgctcgcccagctccttgccgaaactgtcggtcgcggtgccggaaaaacgcagctcacgatacgggttatcctccagcacgatgatgtccgtgccccggaagatctccacgacgcggtcatgcactttctgactgtagctcaggccggtggggttctggaagttcgggatgacataagcaaacttcgcatccgggttggcctgcacggtcgccgcaagctcatcacagtcgatgccgtcggggttgatggtgacaggcaggatctcgggatcaaagaagtggaacgactgcagcgcgacgaggtaggtcgggttctcgacgatcaccttatcaccggggtcgagcatgcacgcgccgatcatcgtcagcacctgctgcgagccgttggtgatgatgatgtcgtcggccgtcacgccgtagacgcccatcgtctcatagcgctttgcaacccactcgcgcagcggcagatagccctgcgtgccgctgtactggagcgccatgacgccgtttttctccagcaccttgtgtgttgccttgtccatcgcctcgaccgggaaagagaccggattcggcagaccgcccgcaaaagaaatcaggtcgggagatgccgctgccgcaagaatgcttgccgtaaactcgccctgaaagtcgggacgcatgatttttttggaaagtctgggattcataatgatttctcctttcatgggcacttgtaatggtcggtcgatccgacaggcaagccctcataatgtgtcgattatagcgcacgcgattgcggcatgacaaggcgttgcaaaaaaatctgcgttctaacggaaagccgcgcttatgcaaagcagggttctgtatagaacgctcattcatctttgatatactgctcttccacctgctgctgcgcccggatcagcacttgccgtgcacgtgcgtatgcaccggcatccagcagccgaaccgcattcgtaatcgcgtgaaacaggggaaaacataatcgcatcgtatccataattgtcccttctgttgtgcgtcaaaaatgcgtcatttctgcattttatattaatatgacgctagaatttgtcaatccttcgtcatggagggtcggcaaaatgaaagacaacctgagccggtacacattgcgcatcgatcaggcgctgctggacaagctcggctacatcgcagaatacgaaagccggacaaaaaaccgcgaactcgagcagatgatcaaaaagcgcatccgggactttgaacaggaacacggcgagatcgacctgcacgacatatccaagctctgacaaaccatcagccgcaccgtggtgtcacggtgcggctgattctttcctgtatgcagggtcaatccagcacggaccggaggaacgactccagcgcggccagatacgcttccctgtccaccatgtagctcagcccatgtcccgcgcctggcacgaccagcagatgcttattgtgcgccgcgcagtgcgcatagttttcgtgccccatgtcgcaggggacgaagcggtcgtccccgccatgaatcagcagcacaggaatgtcgcaatgcgccagcgcatccgtgaccgtggcggactccaggtcgaaaccgccgaacagtttcccgcccaggcggatcaactggtagaccgggaaaatggggagatgctggtcgcggatgaccttgcgaatgatcgcggcgggcgagctgtacccgcagtcggccacgatgccgacaacattgcgcgggagattcaatccgccggccatcagcacggtcgccgcgcccatcgacaccccgtacagcaagatcttcgtgtccgcgccgaagcgcccgacggcgtagttcacccacgcacggcagtcatagcgctcctgaatgccaaacgtgaggcacctgccctcgctcttcccgtgcgcgcgctgatcgaccagcagaacgtgatagccgccctgcacggcgatctgcgccccgccgcagaagtcccgctccgcgccgctcttgtagccgtgcatcatgatctgcaccggtgcgcccggccggccggcgtagtatttcccgtgcaggtgcagcccgtcgtcggatcggatccatacgtcctcatatgggagcgcgagcacggtccggaccatctgcgtcatcgcttcccgatagggggcatactgctccgtgtccggcaggcggaagagatccgcctccgtctgtttgggcacggaaaagcagaggcggtagcacacataggatgcagccagaatgaaaataagaaggatcaagacgctccacacaacgaccatgttcgtttcctccggacattttttgacgcatggagcagtatagcacaggaaaagaaggctgccaaatgaaagtacaaaaaatcgccgctgcaatatgcagcccacggcgacgttgcttggtcagccaattttgaggacgtaacgaaaaaaccgacagctcgaacgagctgtcggtttttgagcggagcggactttgctccgacgtggcggagagtaagggattcgaacccctgtggcgttgccgcctaacggttttcaagaccgccccgttatgaccacttcggtaactctccacatatgcagatagagaaacaagacgccgaaatcggcgtcttgtctttggcggagaaggagggatttgaaccctcgcgccgcttatcacagcctactcccttagcaggggagccccttcggccacttgggtacttctccaagccgaattccactttccatatggacgcgcggccagcgcgctgcattatagtagcatattcggcagcggatgtcaacttgttttttggttgacaccgtacgcaaaatgcgttataagtgtgccagagcaaaggagagacatgatatgcgctatacatccatacttttcgacctcgacggcacgctgctcgacacgctcgccgacctgaccgccgccatgaaccgcacgctcacccgccacggcctgccggagcgcacgcggcagcagatgcgcaccgcgctcggcaacggggcccggcggctgatggagctgtccgtgccagccggaacggacagtgcgctgttcgaaacgctgctggcggaatacaacgccgactacgccgcccactgccgcatcgagactgccccctaccccggtgtcgccgcgctgctgcttaagctgcacgcgcaggggcgcaaactcgccatcgtatccaacaagccggacgaggccgtgcgcgcgctgcgggcagatttctttgccgacgcagtcccgatcgccgtcggtgagacggcggccatccggcgcaagccggcgccggacatgctgctggccgccatggaaaagctcggtgccgaccctgacaagacggtctttgtcggcgattccgaggtcgacattgccacggcgcgcgcggcaaatctgccgtgtatcagcgtgctgtggggctttcgtgaccgggacgtgctcgagcgcgccggtgcgcagcagtttgctgccaacatcgcgcagctgcaggcacttctgggctgaaaaagatccgccggatggttccggcggatttttcatgccgttttgcgcgctcagcccttctttttcatgaattgtcctgccgcgcgcatcatgaggcgcttggtgccggcagtctcgaattccacctcgagcagcgcgtcgccgcccatgggctggatcttcgtgacgacaccggagccgaacgcgcggtgcgtgactcggtcaccgacggcgaaggccggtgcagccttgcccgccggctttgccgcaggcggcgcggggcgcatgggcggcttgcgccgcggctccggtgcggagaccgtataggcgcgcggcgcgctctggcgcggcgggtactgctgctggtcgcggctgggctcggaatagccgtagccgcgcggaacgttgagcttctgaatatcgtcctccgggatctcctcgacaaagcgggagacgcggtttgccgtcgtgcggccgaagagcatgcgctggcgggcacacgtgaggatgaggtgctcgcgcgcgcgggtaagcgcgacgtagcagagacggcgctcctcctccatctcgtccggctcgccgatacagcgcaggccggggaaaatgccctcctcgcagccgacgatgaacaccgtcggaaattccaggcccttggccgcgtgcatggtcatgagcgtgacacagtccatggactggtcgtagttatcgaggtcggtatagagcgcgacctcgtcgaggaatcccgcgagcgtaggatcatcggcctccttgacgaaggcgatgatgttcgacttgagctcctgcacgttctcgatgcgtgcagcatcctcggccgtgttcttttcctcgagtgcgcggacgtaaccgctgcgctccacgaccagatcatagagctcgtccggcggcatggttttggcctgttcctgcagctcctcgatcaggatggcaaactggcgcaggcgcatctggctgcgctgcagctcaggataggcatccgcgtggcggataatgtcaaagaggcttgtctgctgcgcgtttgcgagctgtgcggccgtttcgaccgtgcgcgcgccgatgccgcgggcaggtgtgttgatgatgcgcgtcaggcgcaggtcatcacccggcgtctggatgacgcacaggtaggccagcatgtccttgacctccgcgcggtcgaaaaagcgcgtgccgccgatgatgcggtacgggatgccgttgcgcttgaaggcgtattcgagctggttgctctgcgcgttcatgcggtagagcacggcgtggtcgcggaagttcatgccgtggccgaaatcgtccatgatcttcgtggccacatagcgcgcctcgtcgttctcgttcgtggcgcagtagagcgtgagcgggtcaccggcttcggcctttgtccagagcgttttgccctttcggccggtgttgttggcgatgacgtggttggccgcgtccagaatgcggccggtgctgcggtagttctgctcgaggcggatggtgcgggcatttttatactgcttttcaaagctgagaatgttctcgatcgtcgcaccgcggaacttgtagatgctctggtcatcgtccccgacgacgcagatgttgccccagccgtccgccagcagggccgcaagccggtactgcagattgttcgtgtcctgatactcgtcgatgagcacgtagcggaaacgccgctgccagtgctcacgcacgtccgcatgctcgtcgagcaggcggacggtgttgtagatgaggtcgtcaaaatccatcgccccggcggaaaacaggcgctgccagtaggtctggtacacctcgccgatgcggatgctgcgcggattgtgcgtggcctgtgcacgcgccagatactgctccggcgtgatgccggcatccttggcacggctgatctccgtgagcacggcgcgatatgggaacgccttctcgtcgagattcatctctttgagaatgcgcttgacgaccgcctgactgtccgatgtgtcgtagatcgtgaagctgtttgggtagccgagcttgtccgcgtccttccgcaggatgcgcacgcacgcggagtggaacgtcgaggcccagatatccgccgcagcctcgggcccgagcatgcgctcgatgcggtccttgagctcgtctgccgctttgttcgtgaacgtgatggcgatgatgcgccacggctcgaccggctcgaccgccgctgcccgctgcgcgcgccggcgctcgtccggcgtcaggtccgtgcgctcgagcagcgcaaggtccgcctccgtcgccgcgtccggcacctcgtcggtgtcggacccgcggccgtactggatgagattcgcgatccggtggatgagcaccgtagttttaccgctgccggcaccagccagcagcagcagtgggccttccgtggtcaggaccgcttgcctctgcatatcgttcaggttcgcgaagtccgccgcaatgaagcgtctgcgcgcctgcacatagcgttgttcaaaagtcatcgttgtattcatagcgtctgattttaacacattttcccccgggaaacaaggcccgcattatccggcgcggagattgacaatcgcaggatgcggaagtaaaataaagaaaatttgatgattgaggtgcatcttatggacatcatctggcatggccattcttgctttgagctggtctccggcggctacagcgccgtcatcgacccgtttcaggacaccagcgtcggcacggcctatccccacgtgcggctgacggcggacgccgtctatatcagccacgaggaccgcgaccacaacttccgggaaggcgtcacgctgcgcagcaacagcaagacaaacccgtttgccgtcacggagctcgagacgtaccacgacatcatgcgcggccgtctgcgcggcatgaacacggtgcgcatcttcgccgccgagggcatgcgcgtggcgcacttgggcgatctgggcgcgaagcccacgccagagcagatgcagcagctgcaggggctcgacgcgatgatgatccccgtcggcggcatctacacaatcgagccggacaccgcctactatctctgcgagcaactgcagccgcgcgtcatcatcccgatgcactttcaggcgcccggccacagcaaccaccgtctgcgcgcaccggaggacttcaccggcatttttgagggcaacggcgcaaatgtccagcgctatgacaccaaccgcatgacgctcacaccggacatgccggcgcaggtcgtcatcttccgccgcccggaataaaaaacacgatacagcaaagccgccgctccccgatggggagcggcggccgttttctctgcaattatttcagaatgtccttcagctcgtgcataccatggttggtggtgacgacaaccacgcgatcaccgagctcgatggcatcgttgccggacgggacgcggcacttgccgcggcggatgattgaggcaacgagcacggagtccttgagcttgagcgccttgagcggcacatcgagaaactggctctcggcacgcacgataaattccagcgcctcggcctgcccgtcggccaccatgcgcagcgtctccacgccgctgctgtgcgcagagttctgcatccagcggacatactccacaatgcggccggccgtcacgtccgccggctggataatcgtcgtcagaccatacgattccgcgagctggatgaaattgtcctcatccaccttggtgacgatcttcggtactttctcatgatacgcgaacgaggagatgatgaggttcgtctcgtccgactccgtgagcgtgacgagcgcgtccgcctccggcaggccctcctcgcgcagaacgtccggcttcgtaccgtcggcgcagatgatggttgcctccggcaggagcgttttcatgacgcggcagcgggccgggtcgcgctcgatgatcgtcgagtggatgtgcatgcgcgtcagctccagcgccagccgctcggcaatacggccgccaccgacgatgatgacgctctcggcctcgtggcgaaactcaccgatcttgcgaaacaattcgtgcagctcgtgcggtgcaccgaccacggtgacatagtctccggcggcgagcacaaagtcgccgttcgggatcgtgacgctgccctcacgctccacggcacagatgaggatgccgtcgctgtagcggccgcggaaatcgttcagacgcaggccgtcgagcttgctgccctcgcgcagcttgaactccacgagctccacgaggccattggcaaacggctcgaccttcgtagcggccgggaagcgcagcgtacgcgagatttctttggcggaggtacgctctggattgatggacagactcagccccagctcatcctgcagcagcaccacgtcctgataatactcctcgtcgcgcacgcgcgcgatcgtatgcgtggcaccgagcttgcgcccgaccatgcagctgatgaggttcgtctcgtccgaagtcgtcgcggcgataagcaggtcggcatccgcaacgttggcgatgcgcagctggtccacattcgcgcggccctcgaccacgatcacatccagcgtggaggaaatataggcagcgcgctcaggatcactctcgacgacggtaatgtcatgcccttctgtcagaagctgttccgcaatggcataacccacgcggccagcgcccacgatcacaattttcatattctaagctctccagttatcatgttcaggcccctagtccgggtgactaaatattatagcagacattctcccatgtttcaacagcgacgcaggaaaattatatcgtgtttgtttgtgaataaacagttaaaattctgcaaaaccggcgtcctgccgcttgacggatgctggcgccgcgcttatcattatgttctaatactttttttagtatctaaggctgcgccgccgtgcagcgtccatataaaggagcatcccatccatgctggaactgaaaaacatcaccaaggtctatgaggccggcacgacgcaggttgaggcgctcaagggcatcgacatcgcctttcgtgagagcgagttcgtcgcaattctgggccagtccggctgcggcaagaccacgctgctgaacatcatcggcggtctggaccgctatacttccggcgacctcatcatcaacggccgctctacgaaggagtacgacgaccgcgactgggacacgtaccgcaaccactccatcggcttcgtctttcagagctacaacctcatcccgcaccagagtgtgctggctaacgtcgagctcgcgctgacgctctcgggcgtctcgggcgaggagcgacgtgcgcgcgccgtcgaggcgctggaaaaggtcggtctgggcgaccagctcgacaaggcgccgaaccagatgtccggcggccagatgcagcgcgtggccatcgcgcgcgccatcgtcaacaaccctgacatcctgctcgccgacgagccgaccggcgcgctcgacagcgaaacgagcgtacagatcatgaatctgctgcaggagattgcaaaagataagctcatcatcatggtcacgcacaacccggagctggcgtcgaaatacgccacgcgcaccgtgcgcctgctcgacggcaggatcgtcggcgacgacaacccgtgcacggagtccgaaacgtctgcacccgtgacggtcaaggtcaaggagcatacatccatgagctttgcgacggccatgagcctgtcgctgcacaacctcatgacgaaaaaggcccgcacgctgctcaccgcgttcgcagggtctatcggcatcatcggcatcgcgctcattttgtcgctttcgcacggcttccagtcgtacattgacaccgtacaggagcagacgctctcatcctacccgctgacgattgaggcaaaccccgtggacatgtccggaatgctctcggccatgtcaggcgcaaaagatgacagcaaagacgcgcatgatctcgacaaggtctatgccaacacggtcatgtacagtatgctcaactccatggtcagcagcgcgaccggccagtcgaacaacctgccggaattcaagaaatacctcgaaaaccccgacaacaagatccacgactacatcagcggcatccagtacacgtatgacatgggcttcgccgtctacaccgaagatcccaacggcaccgtcatcaaggccgatacgaccgagctgctgcaaaacgttatgaagtccatgtacggcggcgactacacggcctactttgactccatgggcggcttttactccgggttcaacgtctggcaggagctgctctccggcgaggacggcgagctcgtgagcgcctcgacgcagaatcagtacgacgtgatctacggctcctggccgcaggattacaacgaggtcgtgctcgttgtggataagaacaacgagatctccgacctgacgctctatgccctcgggcttgagagcatggacgacatcagcaacgccatgatgcagtccatgagcaaaaagcagatcgacacgacgcaaaacagctggagctatgaggatctgtgcggccgcagcttcaagctcatcctcccgtcggagggctatgtggccagcggctccggctacacggacatcagtcagacgaccgacggtctgcgccggctttacaacaacgattccgtcggcgtacagctcaaaattgtcggcatcgtgcgtccggccaagggcagcgtgaccagcaatacctacggctccatcggctacacctccgccctgacggactacgccatcgatcaggccgacggcaccgagatcatccagaagcagctcgcgaacccggacgtggacgtgttcaccggctccgcgttcccgaacgccgcgaccgccacgaccgagcagaaggtcgccgccgcacaggcctatctcaaccagctgagcgtggacgaccgtgcgaccgtctaccgcaagtgcatgaccacgccggatgacgccacgctcgacgccgcgctcacgcagaccatggcaaccttcacccgtgacgaggccaaagagatggccgacaacggcatcttcgaggccagcggcaagaccgcgcagcagatgaaagaaatgatcgacgccatggacgacgagacgttcacgcgctttttccgcccgtacctgcgcgcgatgctgtccatgcagatgcagcaggagactgtcaagtcctacagcggcatgacctcgcaggagatcatctcggccatcaacgccaagggcatcagccgcagccagtacgtggacgtgtacgacaactacgtcgcctcctccgccagcggctcgacctatcagagcaacctcaaaaagctcggctacgtcgacaaggattccccgagtgccatcaacatctacgcttccagctttgaaaataaggaccgcatctccgactgtatcgacgactacaacgccgacaatccggacaatcaaatcagcttcaccgattacatcggcctgctcatgagcagcatcacgacgatcatcaacgccatcagctatgtgctcatcggctttgtggccatctccctcgtcgtgtcgtcgatcatgatcggcatcatcacctacatctccgtgctcgagcgcacgaaggagatcggcatcctgcgctcgatcggtgcaagcaagcaggatatctcgcgcgtcttcaacgctgagacgctcatcgagggcttcacagccggcgtaatgggcatcctatgtacgctgatcttgctgatcccgattaatctcatcgtgcaccatctgaccggtctgccgactctgagcgccattttgccggtgctcggcgccattttgctgattctcatcagcatggcgctgacgttcatcgcgggcctcatcccgtccggcatggccgccaaaaaagacccggtcgtcgcgctgcgcaccgaataaacccaaaacgcatatttccaccacctccgtgcaaactaggagcagcctacatttgcacggaggttttgcaatatgaagcagaaaattcttgcggtccttggcgcgctggcgctgtgtacggcgctcgtcccggcgagctttgccgaacaggacacagccggtaccgcacccgtggccgaaaatctggagctgaccacattccgcaacacgtccatcggcggcacgctgagcgccaacgcgcccgacggcagcccgctcacctttcgcatcacgaccgagcccattaagggcacggtaacgctcaccgacagcggcacgttcgtctacacgcccgctgacggcaagcgcgggcgcgactacttcggcttccgcgccgccgacagcagcggcaacgaatcgcaggaggcgaccgtcctcatctccatcaagaagcagaagccggacgtcacctacagcgacatggccggccgcccggaggaatacgccgccgtcatgctcgccgagcaggggctgtgcgtcggccggcaggttggcgagcagtatctcttcgaccccgacagcacaatgccgcgtgatgagtttctcgccatgtgcacgcatctgaccggcacggagacactgcagggcgtgctctcgaccggcttcggagacgacgagcagatcccggcgtgggccaagacctacgtcgcgaccgcggtcatgaacggagacatcgacggctgctctgacggcacggcaatcgtgttcgacgcgcagcgcggcatcactgcggccgaggccgccgtcatgctcagcaactttctcgacccctcccccgccgccgcgctcgagagcgcctatattcccgattgggcgtgcactgccgtgtcgagcctgacgtcctgcggcgtgtatccggacggcagcgactgcgcggcccccattacgcgcgccgaggcggcacagatgctgctgggcgcatatgagctgctgcaaaagcgataaaaaagcacggaccgtttccgactcggaaacggtccgtttctttatgcatctttcaaaatcgcgtccagctccgccgggctgagctccgggaacggacgcacaggcgcgggatttgcttcgtgcgcaccgatgcacttttccatccagaccatggaataccacgtgccgaacttatagccgcagcgcggaaactccccgacaagccggtagccgaggtgcgcatgaaactgtgcgctgtttttcgtcaggtgcgcatcgtccgccccgtccggataaccgatgcaggcatagagattttgaatgtgctgtgcgcgcagcaccgcctcaagcgcggcatacagccgcctgccggttccccgatgccgctgatcctcgcgcaggtaaatgctcatctccgccgcccagtcataggcggcgcggctgccgaacggcccggcataggcatagccaacgagctcaccgccgcgctctgcgaccagatacggataccgccggagcgtggcgcgcatacgcgcggcaaattcctcaacatcgggcacagtatactcgaacgtgatggccgttttttccacatacggcgcatagattgtgcgcagtgcgggcgcgtcgctcaggcgcacggtgcggatacacagtgctgtgtcgtccatgttcttctcactttccgctgtcgccgtagtttgcgagcacgcgcgcggacggatcgtccacgtcgcagccggcccatgacttgttcggcatccagaaatcgacgatcatgtgtgcctgaccggggtaatactgctcaaacagctcacggtagagcagggattccttggtgaacggctgcgcaaagtcgtacttccggcgcagggtctcgaattcctcgtccgtgtacttgtcctctgcgtaggccttgagatcgtcgaccatggagtggcccactgcgtcgctgaaggccgccttctcacgcatgagaatgtcgtgcggcagccagtcgccctcaaaggcgtggcgcagcaggtacttgcccttgccgtagacgttgcacttcttggccgggtcgatggacatgacatactgcacgaagtccagatcgccgaacggcacgcgggcctcgagactgttgacggaaatgcagcggtcagcgcgcaggacatcgtacatatgcagctcgcggatgcgcttggcggactcctcctggaacgccgccgggctgggcgcgaagtctgtgtacttgtagccgaagagctcatcggaaatttcgcccgtgagtagcacgcgcaggtcggtctgctcgtggatagccttgcagacaaggtacatgccgatgctcgcgcggatggtcgtgatgtcataggtaccgagcagcgccacgacctccgggagcgcctgaatcacatcttcgggcgtgatgatgacctcggtatggtcggcgtgcagatactccgccacctcgcgggcgtacttgaggtcgatggcatcggcacgcatgccgatggcgaacgtgcggatgggctttttgagcagctttgccgagatggcgcacacaaggctgctgtccagcccaccggagagcaggaagccgagcggcgcgtcggcatcgaggcgcttttccacgcctgcgatgagcttctcgcggatgtgggtgcagacggtctccagatcgtcctcacagacggcgtcgacctgcgtcatgtcgcggtagcaggtgaacttgccgtcggcataatagtgtccgggaggaaacggcatgacatcgtgcacaaggccgacgaggtttttcgcctcgctggcaaagacgatcgcgccctcggcgtcatagccgtagtacagcgggcggataccgatggggtcgcgcgccgcgacgagaccgccgcgcttggcgtcgtagatgaccatggcaaactccgcatcgagcccgcggaacatatccagcccctcgcgctcgtagagcggaagcaggatctcgcaatcggattcactctcgaacgtctcgccctcggcaatgagccgctcacgaatgggacggaagccgtagatctcgccgttgcacacgagcgcactgccgtcgcgcgtgaacggctgcatcccctccggatgcaggcccatgatggccaggcggtggaaaccgagcgtcgccgcgccgatgtgcagcatacgcgtatcgtccgggccgcgagaaatggtcttgtcaaagccggcgcgcagatcctgcgcgctgatggacgagccgagataaccgatgatggaacacatgattttttcctcctgaatgaatcaaaaatacgcagctactgtccggcaataggacgagtagctgcgtatcgtggtgccacctattttacttctcacgggttctaacaaaccgcaccgggataacgtccggctttgacggcgcacctactgaggctctcgcccgttcagattgcagctcgggagtgttcttcacacaggctctgttatgcggctcgcaccgtcccgcactcgctgggaatgatcgcccgtgctacttttctccgtcaacgcttttgacagaagtatggaattgaaagaagagaaaaaagaaagagaaaacgatgttaacgcacgctgaacagcagatcaccgtaggacgggaccggccacttgtcggacggcgtcatggtctcgagctggtcgatcgtgatacgcagctccgccatggcggagaaaaccttgtcacggtagtagttcgccagtgcctgactgccctcaaccgtcttggcgcccatgagcgcctcatccaggctgcggaccttgcggtaggcgtcgcccagcagcgcagacatttcggggatgatgctctcttcatacgagcagtccgccgtaacggacacggcgtggatcgccgtggcggtctcggacagctcgcgcagatagctgctgacggcgggcatgatgtcgcgccgcgccatctcgagcatcgtcagcgcctcgatgttgaggatcttgctgtagttttcgaggtggatctcatagcgggcctccatctcggtgcgggtgtagacgcggtgcttggtaaagagcgccacgttcttgtcggcgaggtaatacggcagtgcctccggcgtcgtgcgcaggttcagcaggccacggcgctcagcctccgccagccaggcatcgtcatagccgttgccgttaaagaggatgcgcttgtgcttgatgagcacgctgcggatgagcgcctgcaggtcggcctcgaagtccttgctgccctcgagcgcgtcagcaaactgctcgaggctctcggcgaccgccgtgttgagcacgacgttgatgccggaaatggaagccgaggaaccgggcatgcggaactcgaacttgttgccggtgaacgcaaacggagaggtgcggttgcggtcggtcgtgtccttggggaagcgcggcagcgcatgcacgccgatcttcagcagctccttttcctggccggcgtaggacgtctcgttgacgatggcatcaagaatgttctcgatctcatcgccgacgtacatcgacacgacggctgggggcgcttcattcgcgccgagacggtggtcgttcgcggccgacgccacgctgatgcgcagcatatcctgataatcatccaccgcctggatcaccgcgcacaggaagagcagaaactgtgcgttctcggccggcgtctcgccgggctcgagcaggttcatgccggtgttggtggtcagggaccagttgttgtgcttgccggaaccgttgacaccggcaaacggcttttcatgcagcaggcagaccatgccgtggcgcgcggccaccttctgcatgatctccatcgtcagctggttctggtcggcggcgatgttgccggtcgtgaacaccggcgcgagctcgtgctgcgcgggcgccacttcgttgtgctcggtcttggcgtaaacaccgagcttccagagctcctcgtccagatccttcatgaacgccgcaacgcgcggcttgatgctgccgaaatagtgatcgtccagctcctggcctttcggcggcttggcaccgaagagcgtgcggccggtatagatcaggtccttgcgcttgtcatacacggacttgtcgatcaggaagtactcctgctcggggccgacggtcgtgcgcacggcggtcacgtcctcgttgccgaacagatggatcacacgcagggcctgccggttgagcgcctcggcgctgcgcagcagcggcgtctttttatcgagcgcctcgccgccgtaagagcagaacgccgtcgggatgcacagcacattatctttaatgaatgcataggacgtcgggtcccaggcggtgtagccgcgcgcctcaaacgttgcgcgcaggccgccggacgggaagctggacgcatccggctcgccgcggacgagctccttgccggagaactccatgatcacctgaccgccgccgcagggagagatgaaactgtcgtgcttctcggcggtgatgccggtcatcggctggaaccagtgcgtgaagtgcgtggcgcctttttcgatcgcccagtctttcatggcattggccacgatacgcgcggcatcgtcatcgagacgcttgcccttttccatcgtcgcctgcacctgccggtacgtttccttcggcagacgctcgcgcatgactgcatcgttaaataccatggatccaaaaatgtcagagatcttttccat

SEQ ID NO: 254 - DNA, 10492 bp, unidentified
  source 1..10492: mol_type = unassigned DNA
ttatacaaactgacactgccatacagatacaccactgtcctggaacacatcatgtaaacgctcctgcagctgtttggccgtaataccctttttcaatacaacctgaaggaaaccaccgcctcctgcaccacagatcatctttgcatcaataagatcttctactgccttaaaaatcatatcaatacaaacatttgtacatccgctgtcaaggcgcttgcttaattcccaatgttcatttaaaagtcttgcaaacgcatccacatcgcccttttcaagttcaaagcgcattaaaaccgcacttcgctggatttcatacagaacctcgactgcatctggattgccgcccacatatcgtcctactacatcgcgcagcaaatttctggcaagacgacgctgtccagaataaatcagacagaaacgctcatcaagttctttcattgtctgttcactcacaacacatggcatgcagctaatttgctgtctaacttctgcatgagatgtcaccatcttaattccaggtgcaagaccgcctacctgatcctgccagcctcctcctgtcgacataatctgttccatacaaagcacacggttatatagttcatcctcttccagcctgcgtcctgtaatttcatataatgctttcacacatgcaccggcaaggatagaagatgttccaagaccagagccacgaggaatattgattacccgtgtagataaatataagccactgcccaactgatttgtaatctcctcaattgaacgattctcactatacggaatcagaccacatgcaattaatgctgccttatgaagtgcaaatggatcatatggattacttgaatcctgcagctgcttaatatcagtaaattcctgctctgctccactgtctgcactagccaaaactatcttgtttccttcaatgcgacgtgcaattgcctcaattgggtaatttccatctaataatactgctgcattcagaacagttccgccatgctccatgcagtatggcggagtatcactccaaccacctccccagtttacacgaactggcagacgaacaattgactcttccttagaaagcttcgtttccctgctgcactcaagtcctgcgacagctgtatccaaaactgcctttccaatcgtatcaaaacaattgtccatatatgtttcttttacaagtgacagcatgtaataaatacgaatcttacggctaaactgttcaagattacgactatccaaacgttctgcttctctcaaaagcaaacgttcaacgcgtggtgaaacatttcctccgcaagatataaatgcctgttttaaatcaactttattgtcaatagcttctaaaagtgattccacacggaccttatcatctaatttatcctgccatggaagaattgctgtcacatcagccatattaaaactatcctttaatgaaacaaaagagtctttaataggaaaaccctgctcatatgcctgcagcgcagcatctactgcttcacgcatggtgcgacaaataggataaatttttgctgtccaaagcggctctgaaagcttctttccaaacaggctgcattcctttggattatcatttaccccatacatacgagcaacaaactgctcctcaccaagctttaaaccatgaatcacggcaccgtctggaatattctgtccatcaagcgtaacacctgacaccacacaattcgttccaatcactgttccatggtgaacatagctgtcctctacataagtgccctttccaatctttgcacgcttgctgatatagctgtttccagatgcatagccactgcggatgcttgtactattagtatttacaaaactattccatccaagatatacaaactgctccattccctctgtcatcaaatggcgcagctcttttgtcgttccgaaatggataaatgcagccggtgacatgcgaatcagcttcatatgaaatgtatgaagcacctcccaaagtttcatgcggcactcatggagttctggcgtaaaatcaccttccggtgtttccttataatactgctccagcgaggactgggatgccagcggatataaaaagtctgcataaaaagacagtcttgtattttcatttacataagcatcaaactgctctggcgtatctaccaatttatataatgcctttaacagatctgtatccatgataacagcacctgtatcaatatcaacatttccgttttcatcggcagcctgcagctcatgaagctgatctactgttttcttatgtaaaaatccacctacatttccctgctcatcaacacggtatacaccatgattttttccaatctcagcaggttccttaattgacaatgccgctgctccgtttccgtaaaaatcaatctgaagtggattaaacaacaaaagaacatcacctgaacatacaagcataccagcacgaatacgcgctgcaactccgcacatggaaatcataaactcatcaaaaagtgtagatcttctgccatttggaagcagacgcggaacaggcgagaacagcttgccacatgccgaatactgtggcacacgcttactgtctccgccagaatgaatcacgagaatacgcttatcatcaaaacttcctgcatcctgatgtatgtaacgcagcacatttaatgtagcgccgccgcttcccactcttttcccatctggatctggaagaactgcataatgaatagactttggcagcattccatgatcaagacggtactgaatctgcatacgatacgactgcgcctgtgattcatttgacgcagtcaaaatcacgtaatcccaaagcggcattttttgtttttcaagcaattccatatattgcctagtacaatcctcataagactgctgaagaaataatgttttgtgtgacatgttatcttttcctttcaccttatatattccctattatatcgtacttcttttttaacgtccactagatttcatacttaatcttatcatgaacattaacatcttttcccatctggacctcaattacttttagctctgtctctgcaataatagtatgacgacagcctgccttcatttcaataacatcacctggctttacagaccgttctttttcatttaaaattacacggcctgttccagaaataatggtccatacttcatcgcgaaactcatggctgtgataattcattttatgacctggatttaaagtcaccttaatcgtaaggctctctttctcaacgtctaaaacacgaaagcttccccatgacttctcggcaaacataactctatgatccagcgtattgacgaatggcttaatatagctcgactgctttttatctgatacaagaatgccatctggactagcagatacaacaacatcctttaatcccatacaaagcaccggaagattaagttcatttacgacatgcacattctggcatgtctcactaaaaagcgcctgtccaacattacggctgtccattgcctctgtaagagtattccacgttcccaaatccttccacattccagaaaaacgcattacttcgattttttcctcatgctcaacaactgcataatcaaagctgattttctctaatgtctcatatttatcaaacaaatcctgataatcagtaaaatcaatcagctgatgtgctctttccaatacatagccaagtcgaagtgcaaacacaccgccattccaaagagctccctgtgtaatataagtttgagcaacctcttctgttggtttctccttgaacatagaaactgagctgatattttccagcgactttggaataatataaccatactttgcacttggatatgtaggctcaattcccattaaaacaagattagccgaactttctgccgcacgcttttcaagcgcatcaagagcttcaaaataatcactatctacataaggatcaacaggacaaattacaatagcttcatctaacggcagatgctttttatccttcaaataagctgccgccagtgcaatagccggaaacgtatctcttctacaaggctcaacactaattccaacattttctccaagctgattatgaattgctgaaacctgagactttgatgttgcaattgtcacattagcatcaggatcaatacttctaatctgacgatacactctttgcaccatcgattcaagtgttccatcctctttatgaaaaatcttaataaactgttttgatctaatatcatttgaaagcggccataagcgctgtccagaaccaccagataacaatacaatattcatttttctatcctttcttatatgcgaaaggccgctgcccaaattgggtaacggccgcatttcatttaatcgttatcgttcagccctcatcgggttatttaaaaagtcttcataggacagacggattccctcctcaagctcagtcttgtatgtccagccaagatccttagccttcgatacatcaagcagctttctaggagtgccatttggctttgttgtatcccaattgatctttccagtatagccgattacttttgccaccaactctgtcagctctttaattgtcagctcttttcctgttccggcattgacagtctcatctccgctatagttattcattaagaatacacataagtttgcaagatcatctacatacaaaaattcacgaagcggtgaaccatctccccaacaagtaacttcctcaaggccatttacctttgcctcatggaaacggcgaataagtgctggaagcacatgactgtgagtaggatgataattatcattagggccataaagatttgtaggcataacactgatgtaatcagtgtgatactggcgatttaaaaattcgcaatactttaatccagaaatcttagcaagcgcatatgcctcatttgtcttttcaagttcagatgtcagcagacagctttccttcataggctgtggtgccatacgcggataaatacaagaagaacctaaaaattcaagcttcttgcagccattcttccatgcagagtgaatcacattcatctcaagagtcatgttttcatacataaaatcagccaatgcattctgatttgccacgataccgccaacctttgctgctgctaaaaatacgtattctggcttttcctctgcaaaaaatgcctcaaccgcatcctgacggcataaatccagctcagcatgtgtacgagtcacaatattcgtatatccctggcgctgtaattctctaacaatcgcagaacctaccattccgcgatgacctgctacatatatttttgcattcttgtccatcataatcgtcacctatttctcgctctttctaaattacagagcagcctccttcattgctttctcctgctttgcaagctgtctgtcatgctttgccatgatctcaactaactgtgcatatgttgtcttctgcggattccagccaagaacagtctttgcctttgtcggatcaccccacagattatcaacatcagtcggacggaaccatgccgggtttacacatacaagcatctttccagtctgtgcatcatagcccttttcatcaagaccatttccctcccaacggatcgtgatgccatttgctgcaaatgccttttctgtaaaatcacgtactgtatgctgctcacctgttgcaatgacaaaatcttctggtgtctcatgctgcataatcatccacatgcactctacataatcctttgcataaccccagtcacgtaaagaatccatatttccaagctccaaatgatcctgcagtccctctgcaatacggcctgctgccaacgtaatctttcttgtaacaaagttttcaccacgtctctcagactcatggttaaacaaaatgccatttacagcaaacatgccatatgcttcacggtattcctttacaatccaaaagccatactgctttgcaactgcatatggagaatatggatgaaatggtgttgtctccttctgcggaacttcctcaacctttccataaagctcagatgtggatgcctgatatacctttgtcttctttgtcaggccaagtatacggcatgcctctaaaatacgcagaacgccaagtgcatctacatcgccagaatactctggtacatcaaaagatacctgcacatgtgactgtgctgccaaattgtaaatttcatccggattaaccagacttataatacgaattaatgatgaggagtctgacagatctccgtcatgaagtgtaatttttcccatcaaatgatcaatacgtgctgtatttgaaatagacgcacggcgtgtaattccatgaacctcatatcccttctccaacaaaaactctgccagataagaaccgtcctgtcctgtaattcctgtaatcaatgcaaccttagccatagatataactcctcttttgattattcttgttttcagtttcctctttattttattctttttaaaagaaaaaaacagagcttatcttgcattatttttgcactatattggtttttaccattactgccactgcttgcggtatttttttggactgatcccctctgactttttaaacattctgctaaaatagcccgctccatccattccaacagcacatccaacctcatctatcgtcatttgtgtaaaacgaagcagctgttttgcccttgtaatacgccttgaaatcagatagctgctgatcgtcactccatacgtttccttaaaaattttcaaaagataatacttattaataaaaaattgtgcctctaaatcatctaatgtaattttttcaacataatgctcgtccatataattttttacagaaactagctccatacgcttctttgaaattgctgaattatcaggattccaagattcctgcataagaagtgttaaaagtgtgctcaaactttcattaattcgcatatcacgtatataatcagatgatcctgcaagcttatacaactgcttcaaaagctcttcaaatactttactattctccgggtgaaatattggcaatccacctcgttctttatatttttcataaattgccgtcatacttgttccataaaaatggcaccatgcaagtgaccataaattttctgatgtactgtggctgtatggtttttgacaatcaataaagacacaatctccctgttttagctgatattgacgtccttcatacgttaaacttccttctccatccaaaacaaggaaatataaatatgatgtcagccccgatctggtagatgtatgtggactgcgtgccttcagcgaccctacttcctgcaaattaagaagtgcactgcgcgcaaataaagatggggtatataaaatacggtcagactgaaccgatgcttcactatttaaaaataattcctgcataaaatttctactccgcctatttttctttaacttcattttctaatactgacagtatacaagacaatttcaagacatgcaagctaatccttcttcaaaggaaaacatatttgcaaattaataattttcttcttactcttacactcatgtttttccatcattttctttaacaacaacaagaacacctgataatccgtgtcatcctgaaaaataaccattctgcgtattcccctagccattgcatgataagttgcaccaggataccaaattcttttttgacgaataatatcaccctctctcttgtattttatcatgtgcaatactatcattgatgattatatgtaaatatagataaaagcactgtgcttttatctatatttacttttaatgtggtcactttgcttcctgatcacaaagctcaacctttatcctttttccaagagcgctagcatatttttgcaacacaactaatgtcggtactcttgaaccgttttcaaaacgcgcaatattggctggtaatattcctgtaatatctgctatatcctgctgcgttttcttctgatattttctttctgccactaattctgcaatcaatgcagatgacatttgcagcgtatttttctgaatttcttctgcataagccataagccgtttttctcgtgcctttttttgtgtccgatactcttccatattattagtcagagcgctgtccatctcttttgttttttcctgcatataatgcacattcttcctttgtctgttttgtgttatcatatcacgtatgatagatttttgcaagagttttttcttagatcccctgtatgttacactatgcatttgcttattcaaaactaattgtaaccggatcagatatacaaatctcatcataagaatcgccatccaaaactgctactttaaattccaaatactcaagatcttccatcggacaatactcatcatatgattcatacatgtctatttcatccttggatttcttatttggggctaaattagctgaatacacagcgtaaaacataaaatcatttaatgaagcatcctcatactgtacaatgatttttttatcagtaagattttctgttataaaattaatcgaatatccatcaccatactcatcttccttaattccattataagtaattataacagactcatcctgataaattacatctcctatttctgtaacattggactctcgcaactgctttcgttcttctttcaacactgcaatttgcttctccaaatcgtgaatctgcttctcaatctccgaaattcgatcctcatttcctgaaactacactttccgcctcagtactgtcctttgtttcttcaactgcctcactaatcttttcttccgtactggtttcttttgccattactggaattcctgataccaccaatgctgccgccattactgtaaaaaatctttttctcatttctacctctctcctcttccaagtttattacaaaatatttcttacaaaacaaagtaccaggggctggcacgtaattgcctactataccttatatgccatacttccttgctgcccatagaatcccatgcgcagagctattgcagcaaatctcgttatccatcaccatactgaccgcctgttctaacggcatgaccaatacctcgatttcttctgtcgcgtccaaatgctgcccactgaccttacggcaatgatctgcaaagtatatgtgcatatagtttgtaagcttcgcggaactttctactgttcttccaataaactgccagtcctcagaaatataacctgtctcttctagcagttctctctttgcaacctccagaccttcctcgcccctttcaaaaccacctgcagggatctcaatcaagtctcggccaaaacaatatcgatattcttttttcaatatgatatttccatagtcatctaatgctacaattgccgccgcctcgttaatcgtaatggcataaaaatcatcaatatgttgcccatttggaagctccacagcatcttttctcaccttcacccacttagtatcaagcagcgcttgtgagcatatcgttttccatttatccatgctttacctctaatgttattacgtggtaactgtcacatagtacctgaatctggtaacaatgtgatcaatgcctcactggctttttaatttttatttaaggcagataccattctcagtatatcacaatttcatacatttttacagacactttcttaccttcatcaccgcacaatacatcaatccgccaattattccatatcactactgctgaaaatggcaacatcataatcacgttttcaatgcactcggttgtcagcttctgttcgccattcactgtctcccatattccccagccgcccatgaccttggacaacgggttcatccacagattacgtttcaataatgttcgttagtaccaggggtctggcaccaatgttttctaaccgaagtacaaaaaatcgattgaaagttcttaggtgtcaatgccctctcgggcttataccccatttctacagattgtggaaactatttaaacacgaccggagctactgggtgtgtcaatgccctctcgggcttatacctcatttctacgcttgaatagtttgccaatgtataccttcaaatcagtggtgtcaatgccctctcgggcttatacctcatttctacgtcttgaagatctcaacaatttaccatttcactttactggtgtcaatgccctctcgggcttatacctcatttctaccaggttcggagagtatggcggaagatcttcaaattgtatgtgtcaatgccctctcgggcttatacctcatttctactacgatcgaagacttctcggttatcaaaaagtaagccacctgtgtcaatgccctctcgggcttatacctcatttctacctgttgtaatcgcgattggatttgctgtcatcatgtgtgtcaatgccctctcgggcttatacctcatttctacagttgaaaagagaatgcagagtattctcaatagctgtgtcaatgccctctcgggcttatacctcatttctaccgttgatgcgttggctgagcaggctgtaaacgaaatcgtgtgtcaatgccctctcgggcttatacctcatttctacggtaccccttcaaaa

(The sequence listing continues in the following parts.)

What is claimed is:

1. A method of differentiating between a diagnosis of ulcerative colitis (UC) and Crohn's disease in a subject having an inflammatory bowel disease (IBD), the method comprising determining a level of one or more of SEQ ID NOs: 1-590 in a sample from the subject, wherein (a) a level of one or more of SEQ ID NOs: 1-590 that is changed relative to a respective reference level for SEQ ID NOs: 1-590 indicates that the subject is likely to have UC, and (b) a level of one or more of SEQ ID NOs: 1-590 that is not substantially changed relative to a respective reference level for SEQ ID NOs: 1-590 indicates that the subject is likely to have Crohn's disease.

2. A method for determining whether a subject having an IBD has UC or Crohn's disease, comprising the steps of:
(a) measuring the nucleic acid level of one or more of SEQ ID NOs: 1-590 in a sample collected from the subject using amplification and one or more pairs of primers specific for each of the one or more of SEQ ID NOs: 1-590; and
(b) using the amplification results to determine whether the level of one or more of SEQ ID NOs: 1-590 is changed relative to a respective reference level for SEQ ID NOs: 1-590, wherein (i) a level of one or more of SEQ ID NOs: 1-590 that is changed relative to a respective reference level for SEQ ID NOs: 1-590 indicates that the subject is likely to have UC, and (ii) a level of one or more of SEQ ID NOs: 1-590 that is not substantially changed relative to a respective reference level for SEQ ID NOs: 1-590 indicates that the subject is likely to have Crohn's disease, thereby determining whether the subject has UC or Crohn's disease.

3. The method of claim 1 or 2, wherein the method comprises determining or measuring a level of at least two, at least three, at least four, at least five, at least six, at least seven, at least eight, at least nine, at least ten, at least fifteen, at least 20, at least 30, at least 40, at least 50, at least 60, at least 70, at least 80, at least 90, at least 100, at least 110, at least 120, at least 130, at least 140, at least 150, at least 160, at least 170, at least 180, at least 190, at least 200, at least 210, at least 220, at least 230, at least 240, at least 250, at least 260, at least 270, at least 280, at least 290, at least 300, at least 310, at least 320, at least 330, at least 340, at least 350, at least 360, at least 370, at least 380, at least 390, at least 400, at least 410, at least 420, at least 430, at least 440, at least 450, at least 460, at least 470, at least 480, at least 490, at least 500, at least 510, at least 520, at least 530, at least 540, at least 550, at least 560, at least 570, at least 580, or at least 585 of SEQ ID NOs: 1-590 in the sample from the subject.

4. The method of claim 3, wherein the method comprises determining or measuring a level of all 590 of SEQ ID NOs: 1-590 in the sample from the subject.

5. The method of any one of claims 1-4, wherein a level of one or more of SEQ ID NOs: 1-590 is changed relative to the respective reference level for SEQ ID NO: 1-590 in the sample from the subject and the method further comprises administering a therapy appropriate for treating UC to the subject.

6. The method of any one of claims 1-4, wherein a level of one or more of SEQ ID NOs: 1-590 is not substantially changed relative to the respective reference level for SEQ ID NO: 1-590 in the sample from the subject and the method further comprises administering a therapy appropriate for treating Crohn's disease to the subject.

7. The method of claim 5 or 6, wherein the method further comprises treatment by fecal microbiota transplant (FMT).

8. The method of any one of claims 1-7, wherein the reference level is a pre-assigned level.

9. The method of any one of claims 1-8, wherein the reference level is a level in a set of samples from a reference population.

10. The method of claim 9, wherein the reference population is a population of subjects having Crohn's disease.

11. The method of any one of claims 1-10, wherein the level of each of SEQ ID NOs: 1-590 that is determined or measured in the sample from the subject is a nucleic acid level.

12. The method of claim 11, wherein the nucleic acid level is a DNA level.

13. The method of any one of claims 1-12, wherein the change is a decrease relative to the reference level.

14. The method of claim 13, wherein the levels of at least 10%, at least 20%, at least 30%, at least 40%, at least 50%, at least 60%, at least 70%, at least 80%, at least 90%, or more than 90% of the sequences for which a level is determined or measured are decreased relative to a respective reference level for the sequence.

15. The method of any one of claims 1-14, wherein the change is an increase relative to the reference level.

16. The method of claim 15, wherein the levels of at least 10%, at least 20%, at least 30%, at least 40%, at least 50%, at least 60%, at least 70%, at least 80%, at least 90%, or more than 90% of the sequences for which a level is determined or measured are increased relative to a respective reference level for the sequence.

17. The method of any one of claims 1-16, wherein the sample comprises a sample of the microbiota of the subject.

18. The method of any one of claims 1-17, wherein the sample is a fecal sample.

19. A kit for differentiating between a diagnosis of ulcerative colitis (UC) and Crohn's disease in a subject having an inflammatory bowel disease (IBD), the kit comprising:
(a) polypeptides or polynucleotides capable of determining the level of one or more of SEQ ID NOs: 1-590 in a sample from the subject; and
(b) instructions for use of the polypeptides or polynucleotides to determine the level of one or more of SEQ ID NOs: 1-590 in the sample from the subject, wherein (a) a level of one or more of SEQ ID NOs: 1-590 that is changed relative to a respective reference level for SEQ ID NOs: 1-590 indicates that the subject is likely to have UC, and (b) a level of one or more of SEQ ID NOs: 1-590 that is not substantially changed relative to a respective reference level for SEQ ID NOs: 1-590 indicates that the subject is likely to have Crohn's disease.

20. A method of differentiating between a diagnosis of UC and Crohn's disease in a subject having an IBD, the method comprising determining a level of each of SEQ ID NOs: 1-590 in a sample from the subject, wherein (a) a level of at least 50% of SEQ ID NOs: 1-590 that is changed relative to a respective reference level for SEQ ID NOs: 1-590 indicates that the subject is likely to have UC, and (b) a level of a level of at least 50% of SEQ ID NOs: 1-590 that is not substantially changed relative to a respective reference level for SEQ ID NOs: 1-590 indicates that the subject is likely to have Crohn's disease.

21. The method of claim 20, wherein a level of at least 50% of SEQ ID NOs: 1-590 is changed relative to a respective reference level for SEQ ID NOs: 1-590 in the sample from the subject and the method further comprises administering an anti-UC therapy to a subject.

22. The method of claim 20, wherein a level of at least 50% of SEQ ID NOs: 1-590 is not substantially changed relative to a respective reference level for SEQ ID NOs: 1-590 in the sample from the subject and the method further comprises administering an anti-Crohn's disease therapy to a subject.

23. A method of treating a subject having UC using a therapy appropriate for treating UC, wherein the subject was diagnosed as having UC by the method of any one of claims 1-18, 20, and 21.

24. A method of treating a subject having Crohn's disease using a therapy appropriate for treating Crohn's disease, wherein the subject was diagnosed as having Crohn's disease by the method of any one of claims 1-18, 20, and 22.

25. A method of treating a subject having UC using a therapy appropriate for treating UC, the method comprising the steps of:
(a) measuring the nucleic acid level of one or more of SEQ ID NOs: 1-590 in a sample collected from the subject using amplification and one or more pairs of primers specific for each of the one or more of SEQ ID NOs: 1-590;
(b) using the amplification results to determine whether the level of one or more of SEQ ID NOs: 1-590 is changed relative to a respective reference level for SEQ ID NOs: 1-590, wherein a level of one or more of SEQ ID NOs: 1-590 that is changed relative to a respective reference level for SEQ ID NOs: 1-590 indicates that the subject is likely to have UC; and
(c) treating a subject who has been determined to be likely to have UC with a therapy appropriate for treating UC.

26. A method of treating a subject having Crohn's disease using a therapy appropriate for treating Crohn's disease, the method comprising the steps of:
(a) measuring the nucleic acid level of one or more of SEQ ID NOs: 1-590 in a sample collected from the subject using amplification and one or more pairs of primers specific for each of the one or more of SEQ ID NOs: 1-590;
(b) using the amplification results to determine whether the level of one or more of SEQ ID NOs: 1-590 is changed relative to a respective reference level for SEQ ID NOs: 1-590, wherein a level of one or more of SEQ ID NOs: 1-590 that is not substantially changed relative to a respective reference level for SEQ ID NOs: 1-590 indicates that the subject is likely to have Crohn's disease; and
(c) treating a subject who has been determined to be likely to have Crohn's disease with a therapy appropriate for treating Crohn's disease.

27. The method of claim 25 or 26, wherein the nucleic acid level of the one or more of SEQ ID NOs: 1-590 in the sample collected from the subject are measured using amplification and one or more pairs of primers specific for each of the one or more of SEQ ID NOs: 1-590, and the amplification results are used to determine whether the level of one or more of SEQ ID NOs: 1-590 is changed relative to a respective reference level for SEQ ID NOs: 1-590.

28. The method of any one of claims 25-27, wherein the method comprises measuring the nucleic acid level of at least two, at least three, at least four, at least five, at least six, at least seven, at least eight, at least nine, at least ten, at least fifteen, at least 20, at least 30, at least 40, at least 50, at least 60, at least 70, at least 80, at least 90, at least 100, at least 110, at least 120, at least 130, at least 140, at least 150, at least 160, at least 170, at least 180, at least 190, at least 200, at least 210, at least 220, at least 230, at least 240, at least 250, at least 260, at least 270, at least 280, at least 290, at least 300, at least 310, at least 320, at least 330, at least 340, at least 350, at least 360, at least 370, at least 380, at least 390, at least 400, at least 410, at least 420, at least 430, at least 440, at least 450, at least 460, at least 470, at least 480, at least 490, at least 500, at least 510, at least 520, at least 530, at least 540, at least 550, at least 560, at least 570, at least 580, or at least 585 of SEQ ID NOs: 1-590 in the sample from the subject.

29. The method of claim 28, wherein the method comprises measuring the nucleic acid level of all 590 of SEQ ID NOs: 1-590 in the sample from the subject.

30. The method of any one of claims 25-29, wherein the reference level is a pre-assigned level.

31. The method of any one of claims 25-30, wherein the reference level is a level in a set of samples from a reference population.

32. The method of claim 31, wherein the reference population is a population of healthy subjects.

33. The method of any one of claims 25-32, wherein the nucleic acid level is a DNA level.

34. The method of any one of claims 25-33, wherein the change is a decrease relative to the reference level.

35. The method of claim 34, wherein the levels of at least 10%, at least 20%, at least 30%, at least 40%, at least 50%, at least 60%, at least 70%, at least 80%, at least 90%, or more than 90% of the sequences for which a level is measured are decreased relative to a respective reference level for the sequence.

36. The method of any one of claims 25-33, wherein the change is an increase relative to the reference level.

37. The method of claim 36, wherein the levels of at least 10%, at least 20%, at least 30%, at least 40%, at least 50%, at least 60%, at least 70%, at least 80%, at least 90%, or more than 90% of the sequences for which a level is measured are increased relative to a respective reference level for the sequence.

38. The method of any one of claims 25-37, wherein the sample comprises a sample of the microbiota of the subject.

39. The method of any one of claims 25-38, wherein the sample is a fecal sample.

40. A method of treating a subject having UC, the method comprising the steps of:
(a) measuring the nucleic acid level of each of SEQ ID NOs: 1-590 in a sample collected from the subject, wherein a level of at least 50% of SEQ ID NOs: 1-590 that is changed relative to a respective reference level for SEQ ID NOs: 1-590 indicates that the subject is likely to have UC, thereby determining an increased risk of UC for the subject; and
(b) treating a subject who has been determined to have an increased risk of UC with a therapy appropriate for treating UC.

41. A method of treating a subject having Crohn's disease, the method comprising the steps of:
(a) measuring the nucleic acid level of each of SEQ ID NOs: 1-590 in a sample collected from the subject, wherein a level of at least 50% of SEQ ID NOs: 1-590 that is not substantially changed relative to a respective reference level for SEQ ID NOs: 1-590 indicates that the subject is likely to have Crohn's disease, thereby determining an increased risk of Crohn's disease for the subject; and
(b) treating a subject who has been determined to have an increased risk of Crohn's disease with a therapy appropriate for treating Crohn's disease.

42. The method of claim 41 or 42, wherein the nucleic acid levels of each of SEQ ID NOs: 1-590 in the sample collected from the subject are measured using amplification and one or more pairs of primers specific for each of SEQ ID NOs: 1-590, and the amplification results are used to determine whether the level of each of SEQ ID NOs: 1-590 is changed relative to a respective reference level for SEQ ID NOs: 1-590.

43. The method of any one of claims 5, 6, 23 to 26, 40, and 41, wherein the therapy appropriate for treating UC or Crohn's disease comprises an anti-inflammatory drug, a biologic therapy, an anti-inflammatory, an immune system suppressor, a steroid, an analgesic, an antibiotic, surgery, and/or fecal microbiota transplant (FMT).

44. The method of claim 43, wherein the anti-inflammatory is a nonsteroidal anti-inflammatory drug, a corticosteroid, or an aminosalicylate (e.g., an oral 5-aminosalicylate, such as sulfasalazine or mesalamine); the biologic therapy is vedolizumab (ENTYVIO®), infliximab (REMICADE®), adalimumab (HUMIRA®), golimumab (SIMPONI®), certolizumab (CIMZIA®), risankizumab (SKYRIZI®), ustekinumab (STELARA®), natalizumab, pegol, or ustekinumab; the antibiotic is ciprofloxacin (cipro) or metronidazole (Flagyl); or the immune system suppressor is azathioprine (AZASAN®, IMURAN®), mercaptopurine (PURINETHOL®, PURIXAN®), methotrexate (TREXALL®), tofacitinib (XELJANZ®), upadacitinib (RINVOQ®), or ozanimod (ZEPOSIA®).
